United States Patent Application Publication US 2011/0183924 A1 - sequence listing, part 102

SEQ ID NO: 313896 - DNA, 4111 bp, Homo sapiens
aacggcattccccaggagacaagaaaggaggatagaaaaacgacttaggaatctccttggagctcaagaccaggaacttccccaagccggaggtccctgaggcgctctagcgcgctggccgcactcgcagcccaggtcgccagtgcgcacgcgcaagattaggtggggcgccagagccggggcacctgcgcaggcttggctgcgccctctcgcgccgcacgctctgcgggttcctcccttcttccgagcctctcctctggccgccgcgcgggagagaggccgagatggcagatgagattgccaaggctcaggtcgctcggcctggtggcgacacgatctttgggaagatcatccgcaaggaaataccagccaaaatcatttttgaggatgaccggtgccttgctttccatgacatttcccctcaagcaccaacacattttctggtgatacccaagaaacatatatcccagatttctgtggcagaagatgatgatgaaagtgtaagtacatttctaacatgatttattttcttgctttttaaattgtgagattaattttgtccttaaagtgctgtcacattttcatcttcctaaggtcattactaaggaaaaaccagaaaaaccattaggacttcaactgcccagctgttttccaaagttactgcatcattttgtatcccaccagcaatgaatgagcgttccagcttctccgtatccttatcaacacttgctattaccttttttttttttttttgagacagagtcttgctctgtcgcccaggctgcagtgcaggggcactcggttcactgcaagctccacctcccgtggttcacaccattctcctgcctcagcctcccgagtagtgggacaacaggcgcccgccaccaaggctggctaattttttgtatttttagtagagacggctttcaccatgttagtcaggatagtttcgatttcctgacctcgtgatccgcccgcctcggcctcccaaagtgctgggattacacgcgtgagccaccgttcctggcctattatattcttaaagtaagctagagaaaaggttattaagaaaatcataaggaagagaaaatatatttactatttattaagtcgagtgaatcataaaggtcttcatccctgtcatcttcatgttgagtaggctgaggaagacgaggggttggtctagctgtagctgtctcaggggtggcagaggcagaagaaaatttgcatatgagtagacctgcacgggtcaaacccatgttgtgcaagggtcagttgtatttacttggggatacctttttaaagtgagacattatttctgaaacttagaaacttcaaggcattaatttttaattcaatatatttgtacaaatcacagagttcaaagattagagcgagtacttaatggtaaaataccgtcttatatgcaataacattaaaccctcagaatacatttttttcttttttttttttttttgagacggagtttcgttcttgttgcccaggctggagtgcaatggcgcgatctcggctcaccgcagcctctgcctcctgggtacaagcgattcccctgccctcctgagtagctgggattacaggcatgccatcacgcctggcttatttgtatttttagtagagatggggtttctccatgttggtcaggttggtctcgagctcccaacctcacgtgatccacccgcctcagccttccaaagtgctgggattacaggtgtcagccaccacgcccagccccagaatacaaatttttaacatttagtataattagacagtcatggcattttaaggtcagagcttcttactcaaatgcagctcttttctgtaaggacaataaaatgttaatttttactcagttaacattctaaattagtgttttaaggtcatctcttttacttagaagacagttgttggccaggaaacgtttactgaaccagctttaaaaccgtgctaattcataattaaatgttgtgaccaatataggtatctgctgtacaaaattttatatagatgctcatcaacttaagatgggcttacatgctgataaacccatcataagttgaaaatattgtatgtctgttgaaaatgcgtgtaagacacctaacttactgaacattatagcctagcctagtctaacttaagcttgctcggaacacttaacgttaacctacagttgggcaaaatcatctaatacagagcctattctgtaacagagtgttgaatatctcatgtaagagtattttactgcatatcaccagtctggaaaaggatcagaattcgaagtatggtttctcctgaatgcatatcgccacaccattgtaaagttgaaaaatcataatttccccaacttacaatttttgtccattgtccatctgtacaatggaccttactgcatgagtaaggtaagcagagtccactgtcctggggcttaataaggtaatgggaatagaaatgtaagactctctcccttccctcttttcttgccaaaggaattaaaggagttccctttcctgagagctttttagaatgttgaagttaaccctcccaacttttttctctcataatgggaaagcataagcagtgaaatgggagttaaagttcttttctcttggcaaccttctcccctttaacttttattagggaagaaagctggcaacatacaaatagactccatgtgtaaatagagacaaattgactgtagatagaaccaaaaaacaaacaggatgacacagagcgagactaggtatttgccacaggatcctgcaagtcccgacaatgcaatagatctggtagtgttcaaaggaaaatccataatggtcataaggaagtcataaagaaagcaagatgtcttgctttattaagaaaacttaaacagcacttggaatataattaagttttttttttggttgggcatagtgccttgtgcctgtaatcccagcactttggaagttaaggtgggcagattgcccaagcgcaggagttcgagaccagcctggacaacattggagaagccccatctcaacaaaaaaatacaaaaattagccgggtgtggtggcatgtgcttgtggtcccagctccttgggtgggtgaggcaggaggatcacttcaacctgggaggtcgaggctgcagtgagctgagatcgtgccactgcactccagtctgagtgacagagcaagaccccatctcttaaaaaaaaaagtttaattgaacagcagattttatttctaatttgtttcttgaaattagtaatgataaatacctaatcttaatgagtctccagttgtagattatgctctgttgggattaagagtttccaaatatttgctcaaagggttgtgtttcaatgagagttttaagatttgatatttcagcttgacagtttgttatttaatggcaagaagtaataaattgcctgtgcctaagaaactttttttccttttccagcttcttggacacttaatgattgttggcaagaaatgtgctgctgatctgggcctgaataagggttatcgaatggtggtgaatgaaggttcagatggtggacagtctgtctatcacgttcatctccatgttcttggaggtcggcaaatgcattggcctcctggttaagcacgttttggggataattttctcttctttaggcaatgattaagttaggcaatttccagtatgttaagtaacacacttatttttgcctgtgtatggagagattcaagaaataattttaaaaccgcatacataataaaagacattgttgcatggcttatagtctctctgagtgttgcgtttgatttgttattttaaaaacatatttgttggaatatgtgaaggtgggtttataattttggatgtttcttgctttttcttcccaaggaggactcaacatatgaacatcgcattgttttaatggtgttactagtctttgaagacaaataatgagagtttataaatttagctttaacttcgaaatatctttccaggctaaaataggtccaacttagatttttaagctaattctcacattttctaagaacataggaaattgaccattttgggtttagaaacagtgctttatgttcagcccacattgcccct

SEQ ID NO: 313897 - DNA, 3685 bp, Homo sapiens
aacggcattccccaggagacaagaaaggaggatagaaaaacgacttaggaatctccttggagctcaagaccaggaacttccccaagccggaggtccctgaggcgctctagcgcgctggccgcactcgcagcccaggtcgccagtgcgcacgcgcaagattaggtggggcgccagagccggggcacctgcgcaggcttggctgcgccctctcgcgccgcacgctctgcgggttcctcccttcttccgagcctctcctctggccgccgcgcgggagagaggccgagatggcagatgagattgccaaggctcaggtcgctcggcctggtggcgacacgatctttgggaagatcatccgcaaggaaataccagccaaaatcatttttgaggatgaccggtgccttgctttccatgacatttcccctcaagcaccaacacattttctggtgatacccaagaaacatatatcccagatttctgtggcagaagatgatgatgaaagtgtcattactaaggaaaaaccagaaaaaccattaggacttcaactgcccagctgttttccaaagttactgcatcattttgtatcccaccagcaatgaatgagcgttccagcttctccgtatccttatcaacacttgctattaccttttttttttttttttgagacagagtcttgctctgtcgcccaggctgcagtgcaggggcactcggttcactgcaagctccacctcccgtggttcacaccattctcctgcctcagcctcccgagtagtgggacaacaggcgcccgccaccaaggctggctaattttttgtatttttagtagagacggctttcaccatgttagtcaggatagtttcgatttcctgacctcgtgatccgcccgcctcggcctcccaaagtgctgggattacacgcgtgagccaccgttcctggcctattatattcttaaagtaagctagagaaaaggttattaagaaaatcataaggaagagaaaatatatttactatttattaagtcgagtgaatcataaaggtcttcatccctgtcatcttcatgttgagtaggctgaggaagacgaggggttggtctagctgtagctgtctcaggggtggcagaggcagaagaaaatttgcatatgagtagacctgcacgggtcaaacccatgttgtgcaagggtcagttgtatttacttggggatacctttttaaagtgagacattatttctgaaacttagaaacttcaaggcattaatttttaattcaatatatttgtacaaatcacagagttcaaagattagagcgagtacttaatggtaaaataccgtcttatatgcaataacattaaaccctcagaatacatttttttcttttttttttttttttgagacggagtttcgttcttgttgcccaggctggagtgcaatggcgcgatctcggctcaccgcagcctctgcctcctgggtacaagcgattcccctgccctcctgagtagctgggattacaggcatgccatcacgcctggcttatttgtatttttagtagagatggggtttctccatgttggtcaggttggtctcgagctcccaacctcacgtgatccacccgcctcagccttccaaagtgctgggattacaggtgtcagccaccacgcccagccccagaatacaaatttttaacatttagtataattagacagtcatggcattttaaggtcagagcttcttactcaaatgcagctcttttctgtaaggacaataaaatgttaatttttactcagttaacattctaaattagtgttttaaggtcatctcttttacttagaagacagttgttggccaggaaacgtttactgaaccagctttaaaaccgtgctaattcataattaaatgttgtgaccaatataggtatctgctgtacaaaattttatatagatgctcatcaacttaagatgggcttacatgctgataaacccatcataagttgaaaatattgtatgtctgttgaaaatgcgtgtaagacacctaacttactgaacattatagcctagcctagtctaacttaagcttgctcggaacacttaacgttaacctacagttgggcaaaatcatctaatacagagcctattctgtaacagagtgttgaatatctcatgtaagagtattttactgcatatcaccagtctggaaaaggatcagaattcgaagtatggtttctcctgaatgcatatcgccacaccattgtaaagttgaaaaatcataatttccccaacttacaatttttgtccattgtccatctgtacaatggaccttactgcatgagtaaggtaagcagagtccactgtcctggggcttaataaggtaatgggaatagaaatgtaagactctctcccttccctcttttcttgccaaaggaattaaaggagttccctttcctgagagctttttagaatgttgaagttaaccctcccaacttttttctctcataatgggaaagcataagcagtgaaatgggagttaaagttcttttctcttggcaaccttctcccctttaacttttattagggaagaaagctggcaacatacaaatagactccatgtgtaaatagagacaaattgactgtagatagaaccaaaaaacaaacaggatgacacagagcgagactaggtatttgccacaggatcctgcaagtcccgacaatgcaatagatctggtagtgttcaaaggaaaatccataatggtcataaggaagtcataaagaaagcaagatgtcttgctttattaagaaaacttaaacagcacttggaatataattaagttttttttttggttgggcatagtgccttgtgcctgtaatcccagcactttggaagttaaggtgggcagattgcccaagcgcaggagttcgagaccagcctggacaacattggagaagccccatctcaacaaaaaaatacaaaaattagccgggtgtggtggcatgtgcttgtggtcccagctccttgggtgggtgaggcaggaggatcacttcaacctgggaggtcgaggctgcagtgagctgagatcgtgccactgcactccagtctgagtgacagagcaagaccccatctcttaaaaaaaaaagtttaattgaacagcagattttatttctaatttgtttcttgaaattagtaatgataaatacctaatcttaatgagtctccagttgtagattatgctctgttgggattaagagtttccaaatatttgctcaaagggttgtgtttcaatgagagttttaagatttgatatttcagcttgacagtttgttatttaatggcaagaagtaataaattgcctgtgcctaagaaactttttttccttttccagcttcttggacacttaatgattgttggcaagaaatgtgctgctgatctgggcctgaataagggttatcgaatggtggtgaatgaaggttcagatggtggacagtctgtctatcacgttcatctccatgttcttggaggtcggcaaatgcattggcctcctggttaagcacgttttggggataattttctcttctttaggcaatgattaagttaggcaatttccagtatgttaagtaacacacttatttttgcctgtgtatggagagattcaagaaataattttaaaaccgcatacataataaaagacattgttgcatggc

SEQ ID NO: 313898 - DNA, 1340 bp, Homo sapiens
aacggcattccccaggagacaagaaaggaggatagaaaaacgacttaggaatctccttggagctcaagaccaggaacttccccaagccggaggtccctgaggcgctctagcgcgctggccgcactcgcagcccaggtcgccagtgcgcacgcgcaagattaggtggggcgccagagccggggcacctgcgcaggcttggctgcgccctctcgcgccgcacgctctgcgggttcctcccttcttccgagcctctcctctggccgccgcgcgggagagaggccgagatggcagatgagattgccaaggctcaggtcgctcggcctggtggcgacacgatctttgggaagatcatccgcaaggaaataccagccaaaatcatttttgaggatgaccggtgccttgctttccatgacatttcccctcaagcaccaacacattttctggtgatacccaagaaacatatatcccagatttctgtggcagaagatgatgatgaaagtagtgttgaatatctcatgtaagagtattttactgcatatcaccagtctggaaaaggatcagaattcgaagtatggtttctcctgaatgcatatcgccacaccattgtaaagttgaaaaatcataatttccccaacttacaatttttgtccattgtccatctgtacaatggaccttactgcatgagtaagcttcttggacacttaatgattgttggcaagaaatgtgctgctgatctgggcctgaataagggttatcgaatggtggtgaatgaaggttcagatggtggacagtctgtctatcacgttcatctccatgttcttggaggtcggcaaatgcattggcctcctggttaagcacgttttggggataattttctcttctttaggcaatgattaagttaggcaatttccagtatgttaagtaacacacttatttttgcctgtgtatggagagattcaagaaataattttaaaaccgcatacataataaaagacattgttgcatggcttatagtctctctgagtgttgcgtttgatttgttattttaaaaacatatttgttggaatatgtgaaggtgggtttataattttggatgtttcttgctttttcttcccaaggaggactcaacatatgaacatcgcattgttttaatggtgttactagtctttgaagacaaataatgagagtttataaatttagctttaacttcgaaatatctttccaggctaaaataggtccaacttagatttttaagctaattctcacattttctaagaacataggaaattgaccattttgggtttagaaacagtgctttatgttcagcccacattgcccct

SEQ ID NO: 313899 - DNA, 762 bp, Homo sapiens
aacggcattccccaggagacaagaaaggaggatagaaaaacgacttaggaatctccttggagctcaagaccaggaacttccccaagccggaggtccctgaggcgctctagcgcgctggccgcactcgcagcccaggtcgccagtgcgcacgcgcaagattaggtggggcgccagagccggggcacctgcgcaggcttggctgcgccctctcgcgccgcacgctctgcgggttcctcccttcttccgagcctctcctctggccgccgcgcgggagagaggccgagatggcagatgagattgccaaggctcaggtcgctcggcctggtggcgacacgatctttgggaagatcatccgcaaggaaataccagccccaacacattttctggtgatacccaagaaacatatatcccagatttctgtggcagaagatgatgatgaaagtcttcttggacacttaatgattgttggcaagaaatgtgctgctgatctgggcctgaataagggttatcgaatggtggtgaatgaaggttcagatggtggacagtctgtctatcacgttcatctccatgttcttggaggtcggcaaatgcattggcctcctggttaagcacgttttggggataattttctcttctttaggcaatgattaagttaggcaatttccagtatgttaagtaacacacttatttttgcctgtgtatggagagattcaagaaataattttaaaaccgcatacataataaaagacattgttgcatggc

SEQ ID NO: 313900 - DNA, 1458 bp, Homo sapiens
aacggcattccccaggagacaagaaaggaggatagaaaaacgacttaggaatctccttggagctcaagaccaggaacttccccaagccggaggtccctgaggcgctctagcgcgctggccgcactcgcagcccaggtcgccagtgcgcacgcgcaagattaggtggggcgccagagccggggcacctgcgcaggcttggctgcgccctctcgcgccgcacgctctgcgggttcctcccttcttccgagcctctcctctggccgccgcgcgggagagaggccgagatggcagatgagattgccaaggctcaggtcgctcggcctggtggcgacacgatctttgggaagatcatccgcaaggaaataccagccaaaatcatttttgaggatgaccggtgccttgctttccatgacatttcccctcaagcaccaacacattttctggtgatacccaagaaacatatatcccagatttctgtggcagaagatgatgatgaaagtgtcattactaaggaaaaaccagaaaaaccattaggacttcaactgcccagctgttttccaaagttactgcatcattttgtgggcaaaatcatctaatacagagcctattctgtaacagagtgttgaatatctcatgtaagagtattttactgcatatcaccagtctggaaaaggatcagaattcgaagtatggtttctcctgaatgcatatcgccacaccattgtaaagttgaaaaatcataatttccccaacttacaatttttgtccattgtccatctgtacaatggaccttactgcatgagtaagcttcttggacacttaatgattgttggcaagaaatgtgctgctgatctgggcctgaataagggttatcgaatggtggtgaatgaaggttcagatggtggacagtctgtctatcacgttcatctccatgttcttggaggtcggcaaatgcattggcctcctggttaagcacgttttggggataattttctcttctttaggcaatgattaagttaggcaatttccagtatgttaagtaacacacttatttttgcctgtgtatggagagattcaagaaataattttaaaaccgcatacataataaaagacattgttgcatggcttatagtctctctgagtgttgcgtttgatttgttattttaaaaacatatttgttggaatatgtgaaggtgggtttataattttggatgtttcttgctttttcttcccaaggaggactcaacatatgaacatcgcattgttttaatggtgttactagtctttgaagacaaataatgagagtttataaatttagctttaacttcgaaatatctttccaggctaaaataggtccaacttagatttttaagctaattctcacattttctaagaacataggaaattgaccattttgggtttagaaacagtgctttatgttcagcccacattgcccct

SEQ ID NO: 313901 - DNA, 1601 bp, Homo sapiens
aacggcattccccaggagacaagaaaggaggatagaaaaacgacttaggaatctccttggagctcaagaccaggaacttccccaagccggaggtccctgaggcgctctagcgcgctggccgcactcgcagcccaggtcgccagtgcgcacgcgcaagattaggtggggcgccagagccggggcacctgcgcaggcttggctgcgccctctcgcgccgcacgctctgcgggttcctcccttcttccgagcctctcctctggccgccgcgcgggagagaggccgagatggcagatgagattgccaaggctcaggtcgctcggcctggtggcgacacgatctttgggaagatcatccgcaaggaaataccagccaaaatcatttttgaggatgaccggtgccttgctttccatgacatttcccctcaagcaccaacacattttctggtgatacccaagaaacatatatcccagatttctgtggcagaagatgatgatgaaagtgtcattactaaggaaaaaccagaaaaaccattaggacttcaactgcccagctgttttccaaagttactgcatcattttgtatcccaccagcaatgaatgagcgttccagcttctccgtatccttatcaacacttgctattaccttttttttttttttttgagacagagtcttgctctgtcgcccaggctgcagtgcaggggcactcggttcactgcaagctccacctcccgtggttcacaccattctcctgcctcagcctcccgagtagtgggacaacaggcgcccgccaccaaggctggctaattttttgtatttttagtagagacggctttcaccatgttagtcaggatagtttcgatttcctgacctcgtgatccgcccgcctcggcctcccaaagtgctgggattacacgcgtgagccaccgttcctggcctattatattcttaaacttcttggacacttaatgattgttggcaagaaatgtgctgctgatctgggcctgaataagggttatcgaatggtggtgaatgaaggttcagatggtggacagtctgtctatcacgttcatctccatgttcttggaggtcggcaaatgcattggcctcctggttaagcacgttttggggataattttctcttctttaggcaatgattaagttaggcaatttccagtatgttaagtaacacacttatttttgcctgtgtatggagagattcaagaaataattttaaaaccgcatacataataaaagacattgttgcatggcttatagtctctctgagtgttgcgtttgatttgttattttaaaaacatatttgttggaatatgtgaaggtgggtttataattttggatgtttcttgctttttcttcccaaggaggactcaacatatgaacatcgcattgttttaatggtgttactagtctttgaagacaaataatgagagtttataaatttagctttaacttcgaaatatctttccaggctaaaataggtccaacttagatttttaagctaattctcacattttctaagaacataggaaattgaccattttgggtttagaaacagtgctttatgttcagcccacattgcccct

SEQ ID NO: 313902 - DNA, 765 bp, Homo sapiens
aacggcattccccaggagacaagaaaggaggatagaaaaacgacttaggaatctccttggagctcaagaccaggaacttccccaagccggaggtccctgaggcgctctagcgcgctggccgcactcgcagcccaggtcgccagtgcgcacgcgcaagattaggtggggcgccagagccggggcacctgcgcaggcttggctgcgccctctcgcgccgcacgctctgcgggttcctcccttcttccgagcctctcctctggccgccgcgcgggagagaggccgagatggcagatgagattgccaaggctcaggtcgctcggcctggtggcgacacgatctttgggaagatcatccgcaaggaaataccagccaaaatcatttttgaggatgaccggtgccttgctttccatgacatttcccctcaagcaccaacacattttctggtgatacccaagaaacatatatcccagatttctgtggcagaagatgatgatgaaagtcttcttggacacttaatgattgttggcaagaaatgtgctgctgatctgggcctgaataagggttatcgaatggtggtgaatgaaggttcagatggtggacagtctgtctatcacgttcatggggataattttctcttctttaggcaatgattaagttaggcaatttccagtatgttaagtaacacacttatttttgcctgtgtatggagagattcaagaaataattttaaaaccgcatacataataaaagacattgttgcatggc

SEQ ID NO: 313903 - DNA, 1008 bp, Homo sapiens
aacggcattccccaggagacaagaaaggaggatagaaaaacgacttaggaatctccttggagctcaagaccaggaacttccccaagccggaggtccctgaggcgctctagcgcgctggccgcactcgcagcccaggtcgccagtgcgcacgcgcaagattaggtggggcgccagagccggggcacctgcgcaggcttggctgcgccctctcgcgccgcacgctctgcgggttcctcccttcttccgagcctctcctctggccgccgcgcgggagagaggccgagatggcagatgagattgccaaggctcaggtcgctcggcctggtggcgacacgatctttgggaagatcatccgcaaggaaataccagccaaaatcatttttgaggatgaccggtgccttgctttccatgacatttcccctcaagcaccaacacattttctggtgatacccaagaaacatatatcccagatttctgtggcagaagatgatgatgaaagtagtgttgaatatctcatgtaagagtattttactgcatatcaccagtctggaaaaggatcagaattcgaagtatggtttctcctgaatgcatatcgccacaccattgtaaagttgaaaaatcataatttccccaacttacaatttttgtccattgtccatctgtacaatggaccttactgcatgagtaagcttcttggacacttaatgattgttggcaagaaatgtgctgctgatctgggcctgaataagggttatcgaatggtggtgaatgaaggttcagatggtggacagtctgtctatcacgttcatctccatgttcttggaggtcggcaaatgcattggcctcctggttaagcacgttttggggataattttctcttctttaggcaatgattaagttaggcaatttccagtatgttaagtaacacacttatttttgcctgtgtatggagagattcaagaaataattttaaaaccgcatacataataaaagacattgttgcatggc

SEQ ID NO: 313904 - DNA, 692 bp, Homo sapiens
taaggcgacgtctagaggatccttttaggttatccccaacacttcttggacacttaatgattgttggcaagaaatgtgctgctgatctgggcctgaataagggttatcgaatggtggtgaatgaaggttcagatggtggacagtctgtctatcacgttcatctccatgttcttggaggtcggcaaatgcattggcctcctggttaagcacgttttggggataattttctcttctttaggcaatgattaagttaggcaatttccagtatgttaagtaacacacttatttttgcctgtgtatggagagattcaagaaataattttaaaaccgcatacataataaaagacattgttgcatggcttatagtctctctgagtgttgcgtttgatttgttattttaaaaacatatttgttggaatatgtgaaggtgggtttataattttggatgtttcttgctttttcttcccaaggaggactcaacatatgaacatcgcattgttttaatggtgttactagtctttgaagacaaataatgagagtttataaatttagctttaacttcgaaatatctttccaggctaaaataggtccaacttagatttttaagctaattctcacattttctaagaacataggaaattgaccattttgggtttagaaacagtgctttatgttcagcccacattgcccct

SEQ ID NO: 313905 - DNA, 1263 bp, Homo sapiens
aacggcattccccaggagacaagaaaggaggatagaaaaacgacttaggaatctccttggagctcaagaccaggaacttccccaagccggaggtccctgaggcgctctagcgcgctggccgcactcgcagcccaggtcgccagtgcgcacgcgcaagattaggtggggcgccagagccggggcacctgcgcaggcttggctgcgccctctcgcgccgcacgctctgcgggttcctcccttcttccgagcctctcctctggccgccgcgcgggagagaggccgagatggcagatgagattgccaaggctcaggtcgctcggcctggtggcgacacgatctttgggaagatcatccgcaaggaaataccagccaaaatcatttttgaggatgaccggtgccttgctttccatgacatttcccctcaagcaccaacacattttctggtgatacccaagaaacatatatcccagatttctgtggcagaagatgatgatgaaagtagtgttgaatatctcatgtaagagtattttactgcatatcaccagtctggaaaaggatcagaattcgaagtatggtttctcctgaatgcatatcgccacaccattgtaaagttgaaaaatcataatttccccaacttacaatttttgtccattgtccatctgtacaatggaccttactgcatgagtaagcttcttggacacttaatgattgttggcaagaaatgtgctgctgatctgggcctgaataagggttatcgaatggtggtgaatgaaggttcagatggtggacagtctgtctatcacgttcatctccatgttcttggaggtcggcaaatgcattggcctcctggttaagcacgttttggggataattttctcttctttaggcaatgattaagttaggcaatttccagtatgttaagtaacacacttatttttgcctgtgtatggagagattcaagaaataattttaaaaccgcatacataataaaagacattgttgcatggcaaaaaaaaaaaaaaaaaaaaaaaaaaaaaaaaaaaaaaaaaaaaaacctaaaaaaaacacataataattcaaaaactaaccccccaataaaaaaaaaaaatataatcaaaaaaacctttggggtcctttggcccactttcctttttaccttggcactttttttttttgggcccaaatttgggcccactgtgccataatccccttttgggggccgtttaaaaataatggtgcccttttatacaccgtggtactggg

SEQ ID NO: 313906 - DNA, 663 bp, Homo sapiens
tatatgtcgtgcttactattgttcctttttagggtttgctgaagatggcggtatataggctgaattggcaagggttatcgaatggtggtgaatgaaggttcagatggtggacagtctgtctatcacgttcatctccatgttcttggaggtcggcaaatgcattggcctcctggttaagcacgttttggggataattttctcttctttaggcaatgattaagttaggcaatttccagtatgttaagtaacacacttatttttgcctgtgtatggagagattcaagaaataattttaaaaccgcatacataataaaagacattgttgcatggcttatagtctctctgagtgttgcgtttgatttgttattttaaaaacatatttgttggaatatgtgaaggtgggtttataattttggatgtttcttgctttttcttcccaaggaggactcaacatatgaacatcgcattgttttaatggtgttactagtctttgaagacaaataatgagagtttataaatttagctttaacttcgaaatatctttccaggctaaaataggtccaacttagatttttaagctaattctcacattttctaagaacataggaaattgaccattttgggtttagaaacagtgctttatgttcagcccacattgcccct

SEQ ID NO: 313907 - DNA, 651 bp, Homo sapiens
aaaatacgccacaaggccactccaaaggttggttgggtctttttgagccgaaaatttgcgggttcctcccttcttccgagcctctcctctggccgccgcgcgggagagaggccgagatggcagatgagattgccaaggctcaggtcgctcggcctggtggcgacacgatctttgggaagatcatccgcaaggaaataccagccaaaatcatttttgaggatgaccggtgccttgctttccatgacatttcccctcaagcaccaacacattttctggtgatacccaagaaacatatatcccagatttctgtggcagaagatgatgatgaaagtcttcttggacacttaatgattgttggcaagaaatgtgctgctgatctgggcctgaataagggttatcgaatggtggtgaatgaaggttcagatggtggacagtctgtctatcacgttcatctccatgttcttggaggtcggcaaatgcattggcctcctggttaagcacgttttggggataattttctcttctttaggcaatgattaagttaggcaatttccagtatgttaagtaacacacttatttttgcctgtgtatggagagattcaagaaataattttaaaaccgcatacataataaaagacattgttgcatggc

SEQ ID NO: 313908 - DNA, 682 bp, Homo sapiens
  misc_feature (55)..(55): n is a, c, g, or t
acacagcatatgacagatgtactataaccaccaacatcacaaacacaaaaaaaanttttgtgccttgctttccatgacatttcccctcaagcaccaacacattttctggtgatacccaagaaacatatatcccagatttctgtggcagaagatgatgatgaaagtcttcttggacacttaatgattgttggcaagaaatgtgctgctgatctgggcctgaataagggttatcgaatggtggtgaatgaaggttcagatggtggacagtctgtctatcacgttcatctccatgttcttggaggtcggcaaatgcattggcctcctggttaagcacgttttggggataattttctcttctttaggcaatgattaagttaggcaatttccagtatgttaagtaacacacttatttttgcctgtgtatggagagattcaagaaataattttaaaaccgcatacataataaaagacattgttgcatggctaaaacaaaaaaaaaaaatcataatcgcgccaccgctattctctaacatcacactaataaatccaaaatataaataattttgggccctttttggccctcaacgggggacctttgccggccctttccctttatgggggggtgaaattatgacccctcgctaactgactccgctggccttcggcgatttcggttgggaaa

SEQ ID NO: 313909 - DNA, 986 bp, Homo sapiens
aacggcattccccaggagacaagaaaggaggatagaaaaacgacttaggaatctccttggagctcaagaccaggaacttccccaagccggaggtccctgaggcgctctagcgcgctggccgcactcgcagcccaggtcgccagtgcgcacgcgcaagattaggtggggcgccagagccggggcacctgcgcaggcttggctgcgccctctcgcgccgcacgctctgcgggttcctcccttcttccgagcctctcctctggccgccgcgcgggagagaggccgagatggcagatgagattgccaaggctcaggtcgctcggcctggtggcgacacgatctttgggaagatcatccgcaaggaaataccagccaaaatcatttttgaggatgaccggtgccttgctttccatgacatttcccctcaagcaccaacacattttctggtgatacccaagaaacatatatcccagatttctgtggcagaagatgatgatgaaagtcttcttggacacttaatgattgttggcaagaaatgtgctgctgatctgggcctgaataagggttatcgaatggtggtgaatgaaggttcagatggtggacagtctgtctatcacgttcatctccatgttcttggaggtcggcaaatgcattggcctcctggttaagcacgttttggggataattttctcttctttaggcaatgattaagttaggcaatttccagtatgttaagtaacacacttatttttgcctgtgtatggagagattcaagaaataattttaaaaccgcatacataataaaagacattgttgcatggctaaaaaaaaacaactcttagctcaaaccaatttaccccaggataaaggtataaggccaattggaaaaattgaaactctgggcgcaaataagatatagtacccgtaaaggtagtatgaattttttaccccaggccttaatataatcaagggacctatcctcctttcct

SEQ ID NO: 313910 - DNA, 1119 bp, Homo sapiens
aacggcattccccaggagacaagaaaggaggatagaaaaacgacttaggaatctccttggagctcaagaccaggaacttccccaagccggaggtccctgaggcgctctagcgcgctggccgcactcgcagcccaggtcgccagtgcgcacgcgcaagattaggtggggcgccagagccggggcacctgcgcaggcttggctgcgccctctcgcgccgcacgctctgcgggttcctcccttcttccgagcctctcctctggccgccgcgcgggagagaggccgagatggcagatgagattgccaaggctcaggtcgctcggcctggtggcgacacgatctttgggaagatcatccgcaaggaaataccagccaaaatcatttttgaggatgaccggtgccttgctttccatgacatttcccctcaagcaccaacacattttctggtgatacccaagaaacatatatcccagatttctgtggcagaagatgatgatgaaagtcttcttggacacttaatgattgttggcaagaaatgtgctgctgatctgggcctgaataagggttatcgaatggtggtgaatgaaggttcagatggtggacagtctgtctatcacgttcatctccatgttcttggaggtcggcaaatgcattggcctcctggttaagcacgttttggggataattttctcttctttaggcaatgattaagttaggcaatttccagtatgttaagtaacacacttatttttgcctgtgtatggagagattcaagaaataattttaaaaccgcatacataataaaagacattgttgcatggctaaaaaaaaaaaaaaaaaatcgagatagttctctctctctcgtgcgtggaccgggtcatcctggagggtgcgactcccgcggagatgtgtgacccggttccctgggcccagctacgcgggaggtggttcaagaactggttccgaggcttaacttgggggcgctttgggccccgtggggttggttttggccccgattggcgtgatcctggacggtactccttcagggcgttacaaggtttttattaccacttaagaaggcttggtgcctgggtgtgtctcccctaacttgttggtacactg

SEQ ID NO: 313911 - DNA, 1074 bp, Homo sapiens
aacggcattccccaggagacaagaaaggaggatagaaaaacgacttaggaatctccttggagctcaagaccaggaacttccccaagccggaggtccctgaggcgctctagcgcgctggccgcactcgcagcccaggtcgccagtgcgcacgcgcaagattaggtggggcgccagagccggggcacctgcgcaggcttggctgcgccctctcgcgccgcacgctctgcgggttcctcccttcttccgagcctctcctctggccgccgcgcgggagagaggccgagatggcagatgagattgccaaggctcaggtcgctcggcctggtggcgacacgatctttgggaagatcatccgcaaggaaataccagccaaaatcatttttgaggatgaccggtgccttgctttccatgacatttcccctcaagcaccaacacattttctggtgatacccaagaaacatatatcccagatttctgtggcagaagatgatgatgaaagtcttcttggacacttaatgattgttggcaagaaatgtgctgctgatctgggcctgaataagggttatcgaatggtggtgaatgaaggttcagatggtggacagtctgtctatcacgttcatctccatgttcttggaggtcggcaaatgcattggcctcctggttaagcacgttttggggataattttctcttctttaggcaatgattaagttaggcaatttccagtatgttaagtaacacacttatttttgcctgtgtatggagagattcaagaaataattttaaaaccgcatacataataaaagacattgttgcatggcaaaaaaaaaaaaaaaaaaaaaaaaaaaaaaaaaaaaaaaaaaaaaacctaaaaaaaacacataataattcaaaaactaaccccccaataaaaaaaaaaaatataatcaaaaaaacctttggggtcctttggcccactttcctttttaccttggcactttttttttttgggcccaaatttgggcccactgtgccataatccccttttgggggccgtttaaaaataatggtgcccttttatacaccgtggtactggg

SEQ ID NO: 313912 - DNA, 819 bp, Homo sapiens
aacggcattccccaggagacaagaaaggaggatagaaaaacgacttaggaatctccttggagctcaagaccaggaacttccccaagccggaggtccctgaggcgctctagcgcgctggccgcactcgcagcccaggtcgccagtgcgcacgcgcaagattaggtggggcgccagagccggggcacctgcgcaggcttggctgcgccctctcgcgccgcacgctctgcgggttcctcccttcttccgagcctctcctctggccgccgcgcgggagagaggccgagatggcagatgagattgccaaggctcaggtcgctcggcctggtggcgacacgatctttgggaagatcatccgcaaggaaataccagccaaaatcatttttgaggatgaccggtgccttgctttccatgacatttcccctcaagcaccaacacattttctggtgatacccaagaaacatatatcccagatttctgtggcagaagatgatgatgaaagtcttcttggacacttaatgattgttggcaagaaatgtgctgctgatctgggcctgaataagggttatcgaatggtggtgaatgaaggttcagatggtggacagtctgtctatcacgttcatctccatgttcttggaggtcggcaaatgcattggcctcctggttaagcacgttttggggataattttctcttctttaggcaatgattaagttaggcaatttccagtatgttaagtaacacacttatttttgcctgtgtatggagagattcaagaaataattttaaaaccgcatacataataaaagacattgttgcatggc

SEQ ID NO: 313913 - DNA, 363 bp, Homo sapiens
tggaaacgcccctgtaccccagaaacttcctgatcagtccctggtcagtgtatatcatgcttcctgtgacatgacatcaacttttcagtgacttccactggttttggcccagctcgaagagcctgacacctctgcagggaattctaccagggagaagagaaagtagtcactgcttccagtttttttaaggagttggccaagagccagcaccaggcatcagaggaaggcagctgactgcactcggccacatcccaaaagtgcctggaaggggagggaggaagcaggcgcttcagaaggcactactgtgtgtcaggactcatgctaggaacgctgtaacagggagcagtgatggagtccttgagg

SEQ ID NO: 313914 - DNA, 1770 bp, Homo sapiens
gacaacccagaatctgatcaccaggacataggaatggccccatcagatttcttgagccattttgtcacttggaagaaaatagtgtacctttgtatttatttaagagtgctcaaggcctaatagcaataaacaggtctagccaagaaattacaagctattctgttagctgggagtgctctctataagctgattaaggtactgataggaactctttgttattcatgttggttggggattagaaatttgtttttgtacatttatttcaaatgaggaggaggtcattttttctctcaaaaaatgagtatttattattgtcttactgatttctttgattatatacctctcctcctcagttcactcttgttttttttctttctctttggcttttgcttttgctctctctcacttctttcttattttgttgcattggtagagtgttgtatggctagcattgtattgtatgtaattaattttgcacaaaagcaaacatttagcatagtaggttaattttgtttgtttttatgaccatgccaaaataatattctgggctggtggagaacaaaggactgttctttaggactgaaacttgattttgctcatagtaagtaaaaaaaaacaaaaaacacacacactcacagatgttgtttcgtaagtgttataagcactggatataaatgggtattttttatcacttctgactaatgtgaaactgttgtacgaaaactacatgaacaaaagtcatctgtttcgactcgtgtgggcttgcctcacagttgccggatttgagtcatttttatgtcttgttatttcatttatttatgcaaaatacatgtgtgtatgaacactttgttttagctccagctctgcctcagtactggggttcatttacttttagccatgttcttaaaaatgaaaggctattcaggaatgatctgattgtaaacgtctttttcattggatcaaacagtaatgctgtatttgaatctaaattttgtgtataagcagtttatttattagccaagtttggctctaaatatccatggaaattaagaatgacaatcatagggatcaattcattttattttcagtggggcttaaacaaagtttatatgactttaccatctcattttagatttttctaattgtgtaaatataacatagaaatagaatttatttttggttcatgaatacttagtgagatataagttatgtatttcctttttgttctctatccatagatgttggtccaaactgaaagttgatgagtcactgtgcctctcggggtagtgagttatcagctacagtgagagagcagtgtttggcctgcagctgggacagcaaaacgtttcaccagggttctcatgcagttcagaacccactgtccacagatccagacatttcccttttttcttacagaaagttgatgattggacatactaaatttccactacagttaggagacagtcagtttgctttgggagtctacataaatcttctaagatagttctgtgaccatttaatagcaagaagcatgaatgccactacaaaggcaaaaatccacctctgagatcggccgttaataaacgtcccgtcatgtcagtttagattcaagaatgttaagcaactttgtttttgcggtgctccctatttcatagtatcttcaaatcaaaaataaaaattatctccattttgttaaagaacttacagggtcagggttctccttgtcacttagaattgggacactgccaggcaatcctctcccaaaaaaaa

SEQ ID NO: 313915 - DNA, 477 bp, Homo sapiens
tgaatttatttgattcttctgtatttgatacagaaatctcatcagatcagtttaatgaacattattctgcaagaaatctaaatcctctgtcatcagagcaagagattgaaaagaccaagtgttttcggaatgaggggaaaaaaggtcatcatgagctagaaaacctgggaaggattcaccgaagaggtaaaattgaattaggactttacagtttgtgaatgctctcgtccccatcctcatccatggcgaaatcttcgcccccagcctcgtgaagatctagcacgtccgccatctcgccttcgatcgagatctcgtctgtgccgctcagacactagatactcaacatatactatatgctaggccatgcaagatgtagagaataccagaataagaaaataaaaattgatttctacatgatacattaagtgcaagaaatatccctctggcaaattaaagaaagtaaaggtatagtgaata

SEQ ID NO: 313916 - DNA, 487 bp, Homo sapiens
agggggcggaatctctaacccacccaagacccggttcctcgattcccatcctaacgaccgaggaaaaaagagtaaattttcctattatagcattctctagcaccttccccgcttcccaccagccgtctccactgtcctcaccgtccccagcctcgtgaagatctagcacgtccgccatctcgccttcgatcgagatctcgtctgtgccgctcagacactaggggaaactgtcgcagaggggaaaggtcgccagtcaagctggccaatcaaaggctaactgtgaatccctccctctgcacggtaaaaacacgcaaattggggcgggcctagtgcggacccacaccgaaagtgtttctgtggccaaaaaaaacagatcgcaagctaaatcatccatcttaggagatgctgttgaactgggcaaagaataatgggagaaaaacagctgggtcctaaataacagagggaaaccaactttcaataaagtatt

SEQ ID NO: 313917 - DNA, 419 bp, Homo sapiens
aacacgatgttgcaggtagaagagtacaagttaagacaggatgccttaattaaagaagaggcctttactcctgttttcttccattctcacccctctgtttctgccagaattgtgacagcagggcagaaaatgggcttttcgtgcagagttgacaagatacagggtagtgaagacaagaatcttctttcacatgctaagaaactcctgactatacttctgaagtagtaattggaatgacagcttttctggctgaagtacaatttttttgttttaaaaatacaaatggtccctctcattttctattcccagttctttcactcacatgctcacacttacagttatacagtgttcacacatacatttttcattgttttctcatttgaaataaaatgttatgagaaattttcaccataagcaaa

SEQ ID NO: 313918 - DNA, 834 bp, Homo sapiens
  misc_feature (558)..(558): n is a, c, g, or t
gacagccagagggacgagctagcccgacgatggcccaggggacattgatccgtgtgaccccagagcagcccacccatgccgtgtgtgtgctgggcaccttgactcagcttgacatctgcagctctgcccctgaggactgcacgtccttcagcatcaacgcctccccaggggtggtcgtggatattgcccacagccctccagccaagaagaaatccacaggttcctccacatggcccctggaccctggggtagaggtgaccctgacgatgaaagcggccagtggtagcacaggcgaccagaaggttcagatttcatactacggacccaagactccaccagtcaaagctctactctacctcaccgcggtggatggagtctcaccctgtcacccaggctggagtgcaatggcatgatctcgctcactgcaacctgcgtctccaggttcaagcgatcctctgcttcagcgtccctagtagctgggactacaggcgcttgccaccacgcctggctaatttttgtatttttagtagagatggagtttcaccatgttggccaggntggtctcgaacttctgacctcaggtgatctgcctgcctcaggctcccaaagtgctcggattactggcatgaaccactgcgccaggccctctatctttttgatcctcaaatatctctaacaaaaagtagataatgacactgtttatacaagaatatagatagtgttcctcaaattccattatttatatctcatcttcaccattttgccatatcaatgatccacctatactcatatttatgtaatgttcttctttaaataaaatccattcttaaactt

SEQ ID NO: 313919 - DNA, 1377 bp, Homo sapiens
gacagccagagggacgagctagcccgacgatggcccaggggacattgatccgtgtgaccccagagcagcccacccatgccgtgtgtgtgctgggcaccttgactcagcttgacatctgcagctctgcccctgaggactgcacgtccttcagcatcaacgcctccccaggggtggtcgtggatattgcccacagccctccagccaagaagaaatccacaggttcctccacatggcccctggaccctggggtagaggtgaccctgacgatgaaagcggccagtggtagcacaggcgaccagaaggttcagatttcatactacggacccaagactccaccagtcaaagctctactctacctcaccgcggtggaaatctccctgtgcgcagacatcacccgcaccggcaaagtgaagccaaccagagctgtgaaagatcagaggacctggacctggggcccttgtggacagggtgccatcctgctggtgaactgtgacagagacaatctcgaatcttctgccatggactgcgaggatgatgaagtgcttgacagcgaagacctgcaggacatgtcgctgatgaccctgagcacgaagacccccaaggacttcttcacaaaccatacactggtgctccacgtggccaggtctgagatggacaaagtgagggtgtttcaggccacacggggcaaactgtcctccaagtgcagcgtagtcttgggtcccaagtggccctctcactacctgatggtccccggtggaaagcacaacatggacttctacgtggaggccctcgctttcccggacaccgacttcccggggctcattaccctcaccatctccctgctggacacgtccaacctggagctccccgaggctgtggtgttccaagacagcgtggtcttccgcgtggcgccctggatcatgacccccaacacccagcccccgcaggaggtgtacgcgtgcagtatttttgaaaatgaggacttcctgaagtcagtgactactctggccatgaaagccaagtgcaagctgaccatctgccctgaggaggagaacatggatgaccagtggatgcaggatgaaatggagatcggctacatccaagccccacacaaaacgctgcccgtggtcttcgactctccaaggaacagaggcctgaaggagtttcccatcaaacgagtgatggtacctgcatggggtggggagggggcacagctgccgaaaccctcttgtcttgagactccctccttttagcctgccttccccgcccgcgcctgtagctgagtagcccagtgcaaggaggtggaattcctaccaaagtgggagcatgtaggcggggccttgtacgcgtatcaagccccgctgtccacgttagtgt

SEQ ID NO: 313920 - DNA, 1692 bp, Homo sapiens
gacagccagagggacgagctagcccgacgatggcccaggggacattgatccgtgtgaccccagagcagcccacccatgccgtgtgtgtgctgggcaccttgactcagcttgacatctgcagctctgcccctgaggactgcacgtccttcagcatcaacgcctccccaggggtggtcgtggatattgcccacagccctccagccaagaagaaatccacaggttcctccacatggcccctggaccctggggtagaggtgaccctgacgatgaaagcggccagtggtagcacaggcgaccagaaggttcagatttcatactacggacccaagactccaccagtcaaagctctactctacctcaccgcggtggaaatctccctgtgcgcagacatcacccgcaccggcaaagtgaagccaaccagagctgtgaaagatcagaggacctggacctggggcccttgtggacagggtgccatcctgctggtgaactgtgacagagacaatctcgaatcttctgccatggactgcgaggatgatgaagtgcttgacagcgaagacctgcaggacatgtcgctgatgaccctgagcacgaagacccccaaggacttcttcacaaaccatacactggtgctccacgtggccaggtctgagatggacaaagtgagggtgtttcaggccacacggggcaaactgtcctccaagtgcagcgtagtcttgggtcccaagtggccctctcactacctgatggtccccggtggaaagcacaacatggacttctacgtggaggccctcgctttcccggacaccgacttcccggggctcattaccctcaccatctccctgctggacacgtccaacctggagctccccgaggctgtggtgttccaagacagcgtggtcttccgcgtggcgccctggatcatgacccccaacacccagcccccgcaggaggtgtacgcgtgcagtatttttgaaaatgaggacttcctgaagtcagtgactactctggccatgaaagccaagtgcaagctgaccatctgccctgaggaggagaacatggatgaccagtggatgcaggatgaaatggagatcggctacatccaagccccacacaaaacgctgcccgtggtcttcgactctccaaggaacagaggcctgaaggagtttcccatcaaacgagtgatggtacctgcatggggtggggagggggcacagctgccgaaaccctcttgtcttgagactccctccttttagcctgccttccccgcccgcgcctgtagctgagtagcccagtgcaaggaggtggaattcctaccaaagtgggagcatgtaggcggggccttgttatttttttattaccaagataagatctggctcttcatttcccaaaacccttgtcacccgtgagctcagcttgatctccaggtaaccctgccgaggaggtggctcaggcttggacctccctgtgctcttgaagaagctcttgctgcaaggcggaggtggggccggggctggaatctttcccaatgcccagctggaggctctgtcttatgggtggtgtttggtcttcaggggctccatctgggatatgggggattttgggatcagtggatcagtggtcatttcctgggtgtgactttatcagccacaggctgtccatgtggaggtgggaagtgacgtattgctgactcat

SEQ ID NO: 313921 - DNA, 1273 bp, Homo sapiens
cacatggctaacaagagatcaccgacttaggtcagactggctctaagccccatgtgtacccagaataccagcatctcatctaactcaagaggcagtgctttctgaggctaagctctgttctacttaccttagtgactctgtgcctcagtttcccccaataaaactagaatgacaattccttgatttctcaaatgttaggggataaaataaaggcattctagactcctgcatccctttctcagctgaaggagaaccctgacctttttgccaagccccttgtccttcagggacttccctgtagcccttgctgccgataacacccctttaaccctgccatgacagcaatgacagccggcagatgcaccaggccctgcaggacttcctcagtgcccagcaggtgcaggcccctgtgaagctctattctgactggctgtccgtgggccacgtggacgagttcctgagctttgtgccagcacccgacaggaagggcttccggctgctcctggccagccccaggtcctgctacaaactgttccaggagcagcagaatgagggccacggggaggccctgctgttcgaagggatcaagaaaaaaaaacagcagaaaataaagaacattctgtcaaacaagacattgagagaacataattcatttgtggagagatgcatcgactggaaccgcgagctgctgaagcgggagctgggcctggccgagagtgacatcattgacatcccgcagctcttcaagctcaaagagttctctaaggcggaagcttttttccccaacatggtgaacatgctggtgctagggaagcacctgggcatccccaagcccttcgggcccgtcatcaacggccgctgctgcctggaggagaaggtgtgttccctgctggagccactgggcctccagtgcaccttcatcaacgacttcttcacctaccacatcaggcatggggaggtgcactgcggcaccaacgtgcgcagaaagcccttctccttcaagtggtggaacatggtgccctgagcccatcttccctggcgtcctctccctcctggccagatgtcgctgggtcctctgcagtgtggcaagcaagagctcttgtgaatattgtggctccctgggggcggccagccctcccagcagtggcttgctttcttctcctgtgatgtcccagtttcccactctgaagatcccaacatggtcctagcactgcacactcagttctgctctaagaagctgcaataaagtttttttaagtcactttgtacatga

SEQ ID NO: 313922 - DNA, 827 bp, Homo sapiens
gacagccagagggacgagctagcccgacgatggcccaggggacattgatccgtgtgaccccagagcagcccacccatgccgtgtgtgtgctgggcaccttgactcagcttgacatctgcagctctgcccctgaggactgcacgtccttcagcatcaacgcctccccaggggtggtcgtggatattgcccacagccctccagccaagaagaaatccacaggttcctccacatggcccctggaccctggggtagaggtgaccctgacgatgaaagcggccagtggtagcacaggcgaccagaaggttcagatttcatactacggacccaagactccaccagtcaaagctctactctacctcaccgcggtggaaatctccctgtgcgcagacatcacccgcaccggcaaagtgaagccaaccagagctgtgaaagatcagaggacctggacctggggcccttgtggacagggtgccatcctgctggtgaactgtgacagagacaatctcgaatcttctgccatggactgcgaggatgatgaagtgcttgacagcgaagacctgcaggacatgtcgctgatgaccctgagcacgaagacccccaaggacttcttcacaaaccatacactggtgctccacgtggccaggtctgagatggacaaagtgagggtgtttcaggccacacaatgagccccgggaagtcggtgtccgggaaagcgagggcctccacgtagaagtccatgttgtgctttccaccggggaccatcaggtagtgagagggccacttggacccaagactacgctgcacttggagacagttcccctttggca

SEQ ID NO: 313923 - DNA, 256 bp, Homo sapiens
acgggtggaaggggtacccactagttcctgcctcataacttgttagatggattccatgagctaatgcctgctaagagcagatggaccggacgtgccaggagcctctgttcaggccacaggtgacccctgagccacctgtgtgtccctcccaatccttccaggctgagcttcaaattccagagcactaaggagctgcttttctgctctctctagtatttttgaaaatgaggacttcctgaagtcagtgactactctg

SEQ ID NO: 313924 - DNA, 160 bp, Homo sapiens
gaccatctgccctgaggaggagaacatggatgaccagtggatgcaggtatgtgccctgcggggcaggcagggtgactgtccctgagggccaagagacacttgggggacccgggctcctggggttcagcctggtgcctcactggccactcttccttagatg

SEQ ID NO: 313925 - DNA, 2270 bp, Homo sapiens
gacagccagagggacgagctagcccgacgatggcccaggggacattgatccgtgtgaccccagagcagcccacccatgccgtgtgtgtgctgggcaccttgactcagcttgacatctgcagctctgcccctgaggactgcacgtccttcagcatcaacgcctccccaggggtggtcgtggatattgcccacagccctccagccaagaagaaatccacaggttcctccacatggcccctggaccctggggtagaggtgaccctgacgatgaaagcggccagtggtagcacaggcgaccagaaggttcagatttcatactacggacccaagactccaccagtcaaagctctactctacctcaccgcggtggaaatctccctgtgcgcagacatcacccgcaccggcaaagtgaagccaaccagagctgtgaaagatcagaggacctggacctggggcccttgtggacagggtgccatcctgctggtgaactgtgacagagacaatctcgaatcttctgccatggactgcgaggatgatgaagtgcttgacagcgaagacctgcaggacatgtcgctgatgaccctgagcacgaagacccccaaggacttcttcacaaaccatacactggtgctccacgtggccaggtctgagatggacaaagtgagggtgtttcaggccacacggggcaaactgtcctccaagtgcagcgtagtcttgggtcccaagtggccctctcactacctgatggtccccggtggaaagcacaacatggacttctacgtggaggccctcgctttcccggacaccgacttcccggggctcattaccctcaccatctccctgctggacacgtccaacctggagctccccgaggctgtggtgttccaagacagcgtggtcttccgcgtggcgccctggatcatgacccccaacacccagcccccgcaggaggtgtacgcgtgcagtatttttgaaaatgaggacttcctgaagtcagtgactactctggccatgaaagccaagtgcaagctgaccatctgccctgaggaggagaacatggatgaccagtggatgcaggatgaaatggagatcggctacatccaagccccacacaaaacgctgcccgtggtcttcgactctccaaggaacagaggcctgaaggagtttcccatcaaacgagtgatgggtccagattttggctatgtaactcgagggccccaaacagggggtatcagtggactggactcctttgggaacctggaagtgagccccccagtcacagtcaggggcaaggaatacccgctgggcaggattctcttcggggacagctgttatcccagcaatgacagccggcagatgcaccaggccctgcaggacttcctcagtgcccagcaggtgcaggcccctgtgaagctctattctgactggctgtccgtgggccacgtggacgagttcctgagctttgtgccagcacccgacaggaagggcttccggctgctcctggccagccccaggtcctgctacaaactgttccaggagcagcagaatgagggccacggggaggccctgctgttcgaagggatcaagaaaaaaaaacagcagaaaataaagaacattctgtcaaacaagacattgagagaacataattcatttgtggagagatgcatcgactggaaccgcgagctgctgaagcgggagctgggcctggccgagagtgacatcattgacatcccgcagctcttcaagctcaaagagttctctaaggcggaagcttttttccccaacatggtgaacatgctggtgctagggaagcacctgggcatccccaagcccttcgggcccgtcatcaacggccgctgctgcctggaggagaaggtgtgttccctgctggagccactgggcctccagtgcaccttcatcaacgacttcttcacctaccacatcaggcatggggaggtgcactgcggcaccaacgtgcgcagaaagcccttctccttcaagtggtggaacatggtgccctgagcccatcttccctggcgtcctctccctcctggccagatgtcgctgggtcctctgcagtgtggcaagcaagagctcttgtgaatattgtggctccctgggggcggccagccctcccagcagtggcttgctttcttctcctgtgatgtcccagtttcccactctgaagatcccaacatggtcctagcactgcacactcagttctgctctaagaagctgcaataaagtttttttaagtcactttgtacatga

SEQ ID NO: 313926 - DNA, 558 bp, Homo sapiens
  misc_feature (533)..(533): n is a, c, g, or t
  misc_feature (543)..(543): n is a, c, g, or t
gacagccagagggacgagctagcccgacgatggcccaggggacattgatccgtgtgaccccagagcagcccacccatgccgtgtgtgtgctgggcaccttgactcagcttgacatctgcagctctgcccctgaggactgcacgtccttcagcatcaacgcctccccaggggtggtcgtggatattgcccacagccctccagccaagaagaaatccacaggttcctccacatggcccctggaccctggggtagaggtgaccctgacgatgaaagcggccagtggtagcacaggcgaccagaaggttcagatttcatactacggacccaagactccaccagtcaaagctctactctacctcaccgcggtggatggagtctcaccctgtcacccaggctggagtgcaatggcatgatctcgctcactgcaacctgcgtctccaggttcaagcgatcctctgcttcagcgtccctagtagctgggactacaggcgcttgccaccacgctgcttttgatttataggatgattacagtngcagtgctcnatctactcaggtctc

SEQ ID NO: 313927 - DNA, 2091 bp, Homo sapiens
gacagccagagggacgagctagcccgacgatggcccaggggacattgatccgtgtgaccccagagcagcccacccatgccgtgtgtgtgctgggcaccttgactcagcttgacatctgcagctctgcccctgaggactgcacgtccttcagcatcaacgcctccccaggggtggtcgtggatattgcccacagccctccagccaagaagaaatccacaggttcctccacatggcccctggaccctggggtagaggtgaccctgacgatgaaagcggccagtggtagcacaggcgaccagaaggttcagatttcatactacggacccaagactccaccagtcaaagctctactctacctcaccgcggtggaaatctccctgtgcgcagacatcacccgcaccggcaaagtgaagccaaccagagctgtgaaagatcagaggacctggacctggggcccttgtggacagggtgccatcctgctggtgaactgtgacagagacaatctcgaatcttctgccatggactgcgaggatgatgaagtgcttgacagcgaagacctgcaggacatgtcgctgatgaccctgagcacgaagacccccaaggacttcttcacaaaccatacactggtgctccacgtggccaggtctgagatggacaaagtgagggtgtttcaggccacacgagctccccgaggctgtggtgttccaagacagcgtggtcttccgcgtggcgccctggatcatgacccccaacacccagcccccgcaggaggtgtacgcgtgcagtatttttgaaaatgaggacttcctgaagtcagtgactactctggccatgaaagccaagtgcaagctgaccatctgccctgaggaggagaacatggatgaccagtggatgcaggatgaaatggagatcggctacatccaagccccacacaaaacgctgcccgtggtcttcgactctccaaggaacagaggcctgaaggagtttcccatcaaacgagtgatgggtccagattttggctatgtaactcgagggccccaaacagggggtatcagtggactggactcctttgggaacctggaagtgagccccccagtcacagtcaggggcaaggaatacccgctgggcaggattctcttcggggacagctgttatcccagcaatgacagccggcagatgcaccaggccctgcaggacttcctcagtgcccagcaggtgcaggcccctgtgaagctctattctgactggctgtccgtgggccacgtggacgagttcctgagctttgtgccagcacccgacaggaagggcttccggctgctcctggccagccccaggtcctgctacaaactgttccaggagcagcagaatgagggccacggggaggccctgctgttcgaagggatcaagaaaaaaaaacagcagaaaataaagaacattctgtcaaacaagacattgagagaacataattcatttgtggagagatgcatcgactggaaccgcgagctgctgaagcgggagctgggcctggccgagagtgacatcattgacatcccgcagctcttcaagctcaaagagttctctaaggcggaagcttttttccccaacatggtgaacatgctggtgctagggaagcacctgggcatccccaagcccttcgggcccgtcatcaacggccgctgctgcctggaggagaaggtgtgttccctgctggagccactgggcctccagtgcaccttcatcaacgacttcttcacctaccacatcaggcatggggaggtgcactgcggcaccaacgtgcgcagaaagcccttctccttcaagtggtggaacatggtgccctgagcccatcttccctggcgtcctctccctcctggccagatgtcgctgggtcctctgcagtgtggcaagcaagagctcttgtgaatattgtggctccctgggggcggccagccctcccagcagtggcttgctttcttctcctgtgatgtcccagtttcccactctgaagatcccaacatggtcctagcactgcacactcagttctgctctaagaagctgcaataaagtttttttaagtcactttgtacatga

SEQ ID NO: 313928 - DNA, 1225 bp, Homo sapiens
gacagccagagggacgagctagcccgacgatggcccaggggacattgatccgtgtgaccccagagcagcccacccatgccgtgtgtgtgctgggcaccttgactcagcttgacatctgcagctctgcccctgaggactgcacgtccttcagcatcaacgcctccccaggggtggtcgtggatattgcccacagccctccagccaagaagaaatccacaggttcctccacatggcccctggaccctggggtagaggtgaccctgacgatgaaagcggccagtggtagcacaggcgaccagaaggttcagatttcatactacggacccaagactccaccagtcaaagctctactctacctcaccgcggtggaaatctccctgtgcgcagacatcacccgcaccggcaaagtgaagccaaccagagctgtgaaagatcagaggacctggacctggggcccttgtggacagggtgccatcctgctggtgaactgtgacagagacaatctcgaatcttctgccatggactgcgaggatgatgaagtgcttgacagcgaagacctgcaggacatgtcgctgatgaccctgagcacgaagacccccaaggacttcttcacaaaccatacactggtgctccacgtggccaggtctgagatggacaaagtgagggtgtttcaggccacacatggacaaagtgagggtgtttcaggccacacgtaagtcatccccatctttgttcccctcctgccctggccaacggggcacaatcctgtcacacagctgtgtggcagataaatcctgagcacctactatgtgccaagttctaagaacagcagacgcagcagtgggcaagacagacgacatctcgtctactaccttccagttggaggacacagacaaaatgactcgttattgctccctgcttttctttctctctctctcacacacgcgcgcacacacacacacacacacacacacacacctcctggttatagactttgagtgcaagctgacagcatgtggcatgtaatcatttgttctgcaacatcctgctaatcagagacatcaggaacttctcagtgacccacgagcacctgcaactaagtaggtgccaggttgatcccaggcacggggcacagagccatgactgtgaccgagtccctgccctcgtgttgctttcatcttagtggctgggagaactataggtaaaataattacataaaacacct

SEQ ID NO: 313929 - DNA, 610 bp, Homo sapiens
tctgtgcctcagtttcccccaataaaactagaatgacaattccttgatttctcaaatgttaggggataaaataaaggcattctagactcctgcatccctttctcagctgaaggagaaccctgacctttttgccaagccccttgtccttcagggacttccctgtagcccttgctgccgataacacccctttaaccctgccatgacagcaatgacagccggcagatgcaccaggccctgcaggacttcctcagtgcccagcaggtgcaggcccctgtgaagctctattctgactggctgtccgtgggccacgtggacgagttcctgagctttgtgccagcacccgacaggaaggtacagtcttgggggctgcctcaggaagccatgcctccttcctgggtagaccctctgcctggggtgggagcaactttacttgtctatttctccttcacccttaggatggcagtagaggaggtggccagcttgggtccaagtccacactactcccaccctcagcagatccaccctcgttgggagctccaggggcaaagctgacttctaaccccagtgtttctgcctccagggcttccggctgctcctggccagccccagg

SEQ ID NO: 313930 - DNA, 271 bp, Homo sapiens
ttttttaattcttcagctaaaacagcggaagaggtgatttattatatggttgttacactcggccacaaataaacacagaaatagtccagaatgtcacaggtccagggcagaggaccaacatgatagaataagaagcagaaaccccccagcagtggggtaagattgcgcgcttcatcccctcaaaatgcagttcagccccactccctctccatgtccccgtacatcgttagaagcttgaattcgagcagtagtagtagtagtaggcggccgc

SEQ ID NO: 313931 - DNA, 6179 bp, Homo sapiens
ccacgcgtccggagctggaggaggcggcgggcgcgagacccggaatgcgcagggcccccgcctcgccccccccagcccgggccgcggcccccgccttccccgcagtcgtcccgcactcggtgcccgccccccgaggccggcggctgctcccactcggggccgttgctgcttgtgccgtgagcgccgcccagccattgtccccgtcgctccgtcagccgcgccggaccgcgcaccaggaggcgagagcgcgcatggggagcctctgttgatgccgccgccgcgccgccctccgaggctgcgtcccgggaagcccggctccccgagcgctccggcctggcccggtgccccggacctgagtgcgtccccatggaggcgcccgggctggcccaggcggccgcggcggagagcgactcccgcaaggtggcggaggagacccccgacggggcgcccgcgctctgccccagccctgaggcgctgtcgccggagccgcctgtgtacagcctgcaggactttgacacgctggccaccgtgggcactgggacgttcgggcgggtgcacctggtgaaggagaagacagccaagcatttcttcgccctcaaggtgatgagcattcccgacgtcatccgcctaaagcaggagcaacacgtacacaatgagaagtctgtcctgaaggaagtcagccacccgttcctcatcaggctgttctggacgtggcatgacgagcgcttcctctacatgctcatggagtacgtgccgggcggcgagctcttcagctacctgcgcaaccgggggcgcttctccagcaccacggggctcttctactctgcagagatcatctgtgccatcgagtacctgcactccaaagagatcgtctacagggacttgaagccagagaacatcctgctggatagggatggccacattaagctcacggactttgggttcgccaagaagctggtagacaggacttggaccctctgtggaacacccgagtacctagcccccgaagtcattcagagcaagggccacggaagggccgtggactggtgggccctcggcatcctgatattcgagatgctttcggggtttcctccgttttttgatgacaacccgtttggcatttatcagaaaattcttgcaggcaaaatagatttccccagacatttggatttccatgtaaaagacctcattaagaaactgctcgtggttgacagaacaaggcgattaggaaacatgaagaacggggcgaatgatgtgaagcatcatcggtggttccgctccgtggactgggaagctgttccgcagagaaaactgaagcctcccatcgtgcccaagatagctggtgacggcgacacttccaacttcgaaacttaccctgagaatgactgggacacagccgcgcccgtgccgcagaaggatttagaaatcttcaagaatttctgaggacaggagctcacatctggaagtcttcccagttatgtgaagtggaaagccaattggctaaccaacaccattcgaaacagacaccaaatgtcacaattgctgactggggagaggaaccaacctgctgaaagacgtgaaacaggaagattggaatctgcctggaacaaagaactgcacctaagcagaccagaagcaaaatgtcttcttcacggcataaggacatctccacttttctctgtacctgtgtgtatagaaatagattagagcacagttgaaattcatggaactggcattatttaagcaactggaattccacactgtaggaaggttttgaaaattgtttggttgtagattttatcttatcctttagtgttgtgttcctactgtgatgtcttggtttttgtcatagacttaagtttataagtttgaactggacttgttcgattataaccacaaattgtgtgtgtgtgtgtgtgtgtgtgtgtgtgtgtgtgtgtgtgtgtatgcctgtgtgtatatatagaagtcattatggcagatgcacagaaattgtgcagtgatgtaaatgttcatactttacagagcctataatttttatttttcaatttgttttttcaaaaatctcttctcggggacaacatctgaagggtatgttgcatgcattaaaaaaaatcatctcacatgcattttatagttttggggaagaaaatatcatggggaggtctaccttcagtatctttagtgcttcttacctggtaacttgagactttaaaagaagaaacaaagaggggaagatatgggagcgaatttattccaagaatctacaatgacattgaagttgttggaggaatgtactgtatttaaaaaaaccttctgtgacacattcaaaaatttcatctgagctggatgcagtggcttgttcctatagtcccagcactttgggaggctgaggtgggtggattgcttgagcccaggagttggagaccagtctgggaaacgtggtgagacctcatctctacaaaatacaaaaaaattagccgggcatggtggcacgtgagtgtagtctcagctactcaggaggctgagatgagaggatcacttgagcctggggaggtccaggccgcagtgatccgagatcacaccactgcattccagcctgggtgacagagtgagaccctgtccaaaaaaaaaaaaaaaaaaaagaaggcaatggctttgtgcttttgaagatggattgaagagaacgtccaccttaaggctttaaaagacagtgaagctgggtgcggtggtgcactcctgtaaccctgggactttgggaagctgaggcaggaagattgagcctaggagttcgagaccgacctgggcagcatagcgagaccccatctctatataaaaaaaaagatgttaaaacagtgaaattacagaaacagaacatagccaccctttttcatcagtgaccttttcttcacgtggaggtcaactcagtaggtgagaataattagtaggttcagcagaataaactctttacaattaataactcagtggaaaatgatgttcagatggtgaaatgtggaaatgttttagacaactctattttcagcctgtgcttctcactcaccatcctgttgggattaacagttgagggccatcgctgcctaaacatttagcgtgcggtttcccatcagttttaccgtgaatgtgaaaaggtgaaactggtgctgacttcggcagcaggtatactaaaattggaatgacacagaggagattagcatggccccctgcgcgaggaagatctgcagattcatgcagcattccatatttttttaagaaaaggttacactgtgcaccgacatgtggagctagaaggaaaagcttttaagtctcatgtttgctgactataaaaataaatcatagtaataatattgaacattctactttaaaaattattaataaaaccataaatgaaacacttgagcacactttaaaaagtacataaatccatgagtccatatgcctatttttaggttgtctgttttattatccaggatttcatactcagatgagaattagcatcaggaaagcctgaaatgccttaattgtgaactgatatgcaggaaaatgaaatatgcaagcacattggtgaccttgttctttacagacgtcgtgatcagcctccagccatacagaacaaatgagaaattagaagcgattccaagaacgtgtgatggtgtgaaacccactttggaccatcacacacatttcagcatttgaagtgacacaagctacctggtaactgcccatggcggggtcatagtttaaatggcccaatgtcatgtagaggttaatttaatcaaaatgagctataaacatggagcaatcactgtataattttaaaatagtttacctggccaggcatggtcgctcacgcctgtaatcccagcactttgggaggccgaggcaggtggatcacctgaggtcaggagttcgagaccagcctggccaacatggcaaaacccccgtctctactaaaatacaaaaattaggtgtggtggcgggcacctgtaatcctggctactcgggaggctgaggcaggagaatcgcttgaacccgggaggcagaggctgcagtgagccgagatcgtgccactgcactccagcctgggccacagagcaagactccgtctcaaaacataaaaataaaaaaaatacaaatagctgacccgggtgggcattccaaaatgtccgcatggacgatcacgaaacaatcacggtgcgaaatgtccgcatggatgatcacgaaacaatcacggtgcggaatgtccgtatggatgatcatgacaaacaatcactgcgcaaaatgtggaggaaaattcattaccataatcacaacatttgtatcagaaaaacattacaaatttactttgcttcatgtaattttacgagttggcaatattttcttaaattggaatactctaagagaataggacatggatatgttacaagaagaagtgtattggggcaagtcttgtttttctgaagggaaatgccaccggcctgctttcataggcattgataaagccaggaaggaaataaagtcacaaccaaatagtatacactgtctctactgaattcttctaattccttcgcaacagaagtctaaatcctgcttagcctaaacatatctatagccagcgatgggcaaattatatttgctgtcagcatgatagaataagaagcagaaaccccccagcagtggggtaagattgcgcgcttcatcccctcaaaatgcagttcagccccactccctctccatgcccatcaaacaactgcacaatcacttgttactgaatttcccattcagcgttttgtttctttctgtccatacttaaagaccaaatcatttgtttgctttgaagaaaaagcaaaaacaagaacaaaaacaccaaatcatttgaaatcactgtccattaaaaaaaatcaccagtggaactaaacagttgagtggtttgggatgtgttcgccatttctgtgtttgacctacatggcctctaattctttggaccattgtaactgtgaaactatggcttaatactgttaaagaccccaaggctccactctgtagccaggtgcacctcaggctgcacaaataccccaccagaatgtcacaatcattcattgctccagctactgagtgaacagggtgcaagacagcactggcttgggttgtatttttgcagccagttaactttgcatcaggtctacacagtccttgcagcctttgatttctccagttgtagagatttgaaatggggtgcccgggttcctctcgtttttccttcaatctacctagcatgcattttacacacattggaggagtcgtatgcactgtttttctgttgctgatggaggcaagcaggccttctaattagtctaacttaaacggatgggattcacttaacaaaagcaagaagaaaagcacacgaacaggtgtcttaatgcatttggatagtttctttgcggggtgtgtgtgtgtgtgtgtgtgtgtgtgtgtgtgtgtgtgtgtgtgtcttggtgaaggtgaggggctgtattttcaccaagccttttcataatcaagtttgctttgcaaaccttatggccttgcaccccgcagaacagtcccttcctaatagcagggatgctctgtcatggttttctgtaaattatcgtgtgttgggaagttctgttgaggcttagtttgatcttccatggtggacacgtctgttctgtatgtaaaaggcattacaattgtgttttagcagatgagacttgaagcctttccacagtccttgtgctctgagatggctgttgagctctgctcaactgtcgtagctgaattctttctttgcgctgaacactgggcagcctcaccatgttgccaacgtgcttctggggcccctgtcactgccgccggatgccgcgcacacaggcagagtgccttggcaggtttgtgcaccccttggcgagccagaactgggaaccccgcggggtgaccccttctcatggggggtcggggaggggagtgcctatttttaatcctgtctgtttgttgcacaatggaaatcactgtgatttgtacatatgccctaggaaaattttactgctgtctaatttatgtaataatactgttgattccaggtttgtttaataaaactttgtatcttttcagaagtctgagtttcatctgcttctgtctcc

SEQ ID NO: 313932 - DNA, 6000 bp, Homo sapiens
ccacgcgtccggagctggaggaggcggcgggcgcgagacccggaatgcgcagggcccccgcctcgccccccccagcccgggccgcggcccccgccttccccgcagtcgtcccgcactcggtgcccgccccccgaggccggcggctgctcccactcggggccgttgctgcttgtgccgtgagcgccgcccagccattgtccccgtcgctccgtcagccgcgccggaccgcgcaccaggaggcgagagcgcgcatggggagcctctgttgatgccgccgccgcgccgccctccgaggctgcgtcccgggaagcccggctccccgagcgctccggcctggcccggtgccccggacctgagtgcgtccccatggaggcgcccgggctggcccaggcggccgcggcggagagcgactcccgcaaggtggcggaggagacccccgacggggcgcccgcgctctgccccagccctgaggcgctgtcgccggagccgcctgtgtacagcctgcaggactttgacacgctggccaccgtgggcactgggacgttcgggcgggtgcacctggtgaaggagaagacagccaagcatttcttcgccctcaaggtgatgagcattcccgacgtcatccgcctaaagcaggagcaacacgtacacaatgagaagtctgtcctgaaggaagtcagccacccgttcctcatcaggctgttctggacgtggcatgacgagcgcttcctctacatgctcatggagtacgtgccgggcggcgagctcttcagctacctgcgcaaccgggggcgcttctccagcaccacggggctcttctactctgcagagatcatctgtgccatcgagtacctgcactccaaagagatcgtctacagggacttgaagccagagaacatcctgctggatagggatggccacattaagctcacggactttgggttcgccaagaagctggtagacaggacttggaccctctgtggaacacccgagtacctagcccccgaagtcattcagagcaagggccacggaagggccgtggactggtgggccctcggcatcctgatattcgagatgctttcggggtttcctccgttttttgatgacaacccgtttggcatttatcagaaaattcttgcaggcaaaatagatttccccagacatttggatttccatgtaaaagacctcattaagaaactgctcgtggttgacagaacaaggcgattaggaaacatgaagaacggggcgaatgatgtgaagcatcatcggtggttccgctccgtggactgggaagctgttccgcagagaaaactgaagcctcccatcgtgcccaagatagctggtgacggcgacacttccaacttcgaaacttaccctgagaatgactgggacacagccgcgcccgtgccgcagaaggatttagaaatcttcaagaatttctgaggacaggagctcacatctggaagaaacaggaagattggaatctgcctggaacaaagaactgcacctaagcagaccagaagcaaaatgtcttcttcacggcataaggacatctccacttttctctgtacctgtgtgtatagaaatagattagagcacagttgaaattcatggaactggcattatttaagcaactggaattccacactgtaggaaggttttgaaaattgtttggttgtagattttatcttatcctttagtgttgtgttcctactgtgatgtcttggtttttgtcatagacttaagtttataagtttgaactggacttgttcgattataaccacaaattgtgtgtgtgtgtgtgtgtgtgtgtgtgtgtgtgtgtgtgtgtgtatgcctgtgtgtatatatagaagtcattatggcagatgcacagaaattgtgcagtgatgtaaatgttcatactttacagagcctataatttttatttttcaatttgttttttcaaaaatctcttctcggggacaacatctgaagggtatgttgcatgcattaaaaaaaatcatctcacatgcattttatagttttggggaagaaaatatcatggggaggtctaccttcagtatctttagtgcttcttacctggtaacttgagactttaaaagaagaaacaaagaggggaagatatgggagcgaatttattccaagaatctacaatgacattgaagttgttggaggaatgtactgtatttaaaaaaaccttctgtgacacattcaaaaatttcatctgagctggatgcagtggcttgttcctatagtcccagcactttgggaggctgaggtgggtggattgcttgagcccaggagttggagaccagtctgggaaacgtggtgagacctcatctctacaaaatacaaaaaaattagccgggcatggtggcacgtgagtgtagtctcagctactcaggaggctgagatgagaggatcacttgagcctggggaggtccaggccgcagtgatccgagatcacaccactgcattccagcctgggtgacagagtgagaccctgtccaaaaaaaaaaaaaaaaaaaagaaggcaatggctttgtgcttttgaagatggattgaagagaacgtccaccttaaggctttaaaagacagtgaagctgggtgcggtggtgcactcctgtaaccctgggactttgggaagctgaggcaggaagattgagcctaggagttcgagaccgacctgggcagcatagcgagaccccatctctatataaaaaaaaagatgttaaaacagtgaaattacagaaacagaacatagccaccctttttcatcagtgaccttttcttcacgtggaggtcaactcagtaggtgagaataattagtaggttcagcagaataaactctttacaattaataactcagtggaaaatgatgttcagatggtgaaatgtggaaatgttttagacaactctattttcagcctgtgcttctcactcaccatcctgttgggattaacagttgagggccatcgctgcctaaacatttagcgtgcggtttcccatcagttttaccgtgaatgtgaaaaggtgaaactggtgctgacttcggcagcaggtatactaaaattggaatgacacagaggagattagcatggccccctgcgcgaggaagatctgcagattcatgcagcattccatatttttttaagaaaaggttacactgtgcaccgacatgtggagctagaaggaaaagcttttaagtctcatgtttgctgactataaaaataaatcatagtaataatattgaacattctactttaaaaattattaataaaaccataaatgaaacacttgagcacactttaaaaagtacataaatccatgagtccatatgcctatttttaggttgtctgttttattatccaggatttcatactcagatgagaattagcatcaggaaagcctgaaatgccttaattgtgaactgatatgcaggaaaatgaaatatgcaagcacattggtgaccttgttctttacagacgtcgtgatcagcctccagccatacagaacaaatgagaaattagaagcgattccaagaacgtgtgatggtgtgaaacccactttggaccatcacacacatttcagcatttgaagtgacacaagctacctggtaactgcccatggcggggtcatagtttaaatggcccaatgtcatgtagaggttaatttaatcaaaatgagctataaacatggagcaatcactgtataattttaaaatagtttacctggccaggcatggtcgctcacgcctgtaatcccagcactttgggaggccgaggcaggtggatcacctgaggtcaggagttcgagaccagcctggccaacatggcaaaacccccgtctctactaaaatacaaaaattaggtgtggtggcgggcacctgtaatcctggctactcgggaggctgaggcaggagaatcgcttgaacccgggaggcagaggctgcagtgagccgagatcgtgccactgcactccagcctgggccacagagcaagactccgtctcaaaacataaaaataaaaaaaatacaaatagctgacccgggtgggcattccaaaatgtccgcatggacgatcacgaaacaatcacggtgcgaaatgtccgcatggatgatcacgaaacaatcacggtgcggaatgtccgtatggatgatcatgacaaacaatcactgcgcaaaatgtggaggaaaattcattaccataatcacaacatttgtatcagaaaaacattacaaatttactttgcttcatgtaattttacgagttggcaatattttcttaaattggaatactctaagagaataggacatggatatgttacaagaagaagtgtattggggcaagtcttgtttttctgaagggaaatgccaccggcctgctttcataggcattgataaagccaggaaggaaataaagtcacaaccaaatagtatacactgtctctactgaattcttctaattccttcgcaacagaagtctaaatcctgcttagcctaaacatatctatagccagcgatgggcaaattatatttgctgtcagcatgatagaataagaagcagaaaccccccagcagtggggtaagattgcgcgcttcatcccctcaaaatgcagttcagccccactccctctccatgcccatcaaacaactgcacaatcacttgttactgaatttcccattcagcgttttgtttctttctgtccatacttaaagaccaaatcatttgtttgctttgaagaaaaagcaaaaacaagaacaaaaacaccaaatcatttgaaatcactgtgtttgacctacatggcctctaattctttggaccattgtaactgtgaaactatggcttaatactgttaaagaccccaaggctccactctgtagccaggtgcacctcaggctgcacaaataccccaccagaatgtcacaatcattcattgctccagctactgagtgaacagggtgcaagacagcactggcttgggttgtatttttgcagccagttaactttgcatcaggtctacacagtccttgcagcctttgatttctccagttgtagagatttgaaatggggtgcccgggttcctctcgtttttccttcaatctacctagcatgcattttacacacattggaggagtcgtatgcactgtttttctgttgctgatggaggcaagcaggccttctaattagtctaacttaaacggatgggattcacttaacaaaagcaagaagaaaagcacacgaacaggtgtcttaatgcatttggatagtttctttgcggggtgtgtgtgtgtgtgtgtgtgtgtgtgtgtgtgtgtgtgtgtgtgtcttggtgaaggtgaggggctgtattttcaccaagccttttcataatcaagtttgctttgcaaaccttatggccttgcaccccgcagaacagtcccttcctaatagcagggatgctctgtcatggttttctgtaaattatcgtgtgttgggaagttctgttgaggcttagtttgatcttccatggtggacacgtctgttctgtatgtaaaaggcattacaattgtgttttagcagatgagacttgaagcctttccacagtccttgtgctctgagatggctgttgagctctgctcaactgtcgtagctgaattctttctttgcgctgaacactgggcagcctcaccatgttgccaacgtgcttctggggcccctgtcactgccgccggatgccgcgcacacaggcagagtgccttggcaggtttgtgcaccccttggcgagccagaactgggaaccccgcggggtgaccccttctcatggggggtcggggaggggagtgcctatttttaatcctgtctgtttgttgcacaatggaaatcactgtgatttgtacatatgccctaggaaaattttactgctgtctaatttatgtaataatactgttgattccaggtttgtttaataaaactttgtatcttttcagaagtctgagtttcatctgcttctgtctcc

SEQ ID NO: 313933 - DNA, 1864 bp, Homo sapiens
ccacgcgtccggagctggaggaggcggcgggcgcgagacccggaatgcgcagggcccccgcctcgccccccccagcccgggccgcggcccccgccttccccgcagtcgtcccgcactcggtgcccgccccccgaggccggcggctgctcccactcggggccgttgctgcttgtgccgtgagcgccgcccagccattgtccccgtcgctccgtcagccgcgccggaccgcgcaccaggaggcgagagcgcgcatggggagcctctgttgatgccgccgccgcgccgccctccgaggctgcgtcccgggaagcccggctccccgagcgctccggcctggcccggtgccccggacctgagtgcgtccccatggaggcgcccgggctggcccaggcggccgcggcggagagcgactcccgcaaggtggcggaggagacccccgacggggcgcccgcgctctgccccagccctgaggcgctgtcgccggagccgcctgtgtacagcctgcaggactttgacacgctggccaccgtgggcactgggacgttcgggcgggtgcacctggtgaaggagaagacagccaagcatttcttcgccctcaaggtgatgagcattcccgacgtcatccgcctaaagcaggagcaacacgtacacaatgagaagtctgtcctgaaggaagtcagccacccgttcctcatcaggctgttctggacgtggcatgacgagcgcttcctctacatgctcatggagtacgtgccgggcggcgagctcttcagctacctgcgcaaccgggggcgcttctccagcaccacggggctcttctactctgcagagatcatctgtgccatcgagtacctgcactccaaagagatcgtctacagggacttgaagccagagaacatcctgctggatagggatggccacattaagctcacggactttgggttcgccaagaagctggtagacaggacttggaccctctgtggaacacccgagtacctagcccccgaagtcattcagagcaagggccacggaagggccgtggactggtgggccctcggcatcctgatattcgagatgctttcggggtttcctccgttttttgatgacaacccgtttggcatttatcagaaaattcttgcaggcaaaatagatttccccagacatttggatttccatgtaaaagacctcattaagaaactgctcgtggttgacagaacaaggcgattaggaaacatgaagaacggggcgaatgatgtgaagcatcatcggtggttccgctccgtggactgggaagctgttccgcagagaaaactgaagcctcccatcgtgcccaagatagctggtgacggcgacacttccaacttcgaaacttaccctgagaatgactgggacacagccgcgcccgtgccgcagaaggatttagaaatcttcaagaatttctgaggacaggagctcacatctggaagtcttcccagttatgtgaagtggaaagccaattggctaaccaacaccattcgaaacagacaccaaatgtcacaattgctgactggggagaggaaccaacctgctgaaagacgtggtgaatgagagccctccatcctgggcaggtgtttacatggatgtaccaagaggaaagctggatacaaattgaaataatagacaacaaaatgatagaggaataggtggctatgacctcgagaagataacctgtctccatggcatggcttcacctctcagtgtgtgatgaacgctttcacagtggtgactggtttgtattaacatgagagcgtgtaactttaccaacttcataaacgctcatgaaatccagttgcgggttttaaaaatcataagatgttcctgaatg

SEQ ID NO: 313934 - DNA, 6066 bp, Homo sapiens
ccacgcgtccggagctggaggaggcggcgggcgcgagacccggaatgcgcagggcccccgcctcgccccccccagcccgggccgcggcccccgccttccccgcagtcgtcccgcactcggtgcccgccccccgaggccggcggctgctcccactcggggccgttgctgcttgtgccgtgagcgccgcccagccattgtccccgtcgctccgtcagccgcgccggaccgcgcaccaggaggcgagagcgcgcatggggagcctctgttgatgccgccgccgcgccgccctccgaggctgcgtcccgggaagcccggctccccgagcgctccggcctggcccggtgccccggacctgagtgcgtccccatggaggcgcccgggctggcccaggcggccgcggcggagagcgactcccgcaaggtggcggaggagacccccgacggggcgcccgcgctctgccccagccctgaggcgctgtcgccggagccgcctgtgtacagcctgcaggactttgacacgctggccaccgtgggcactgggacgttcgggcgggtgcacctggtgaaggagaagacagccaagcatttcttcgccctcaaggtgatgagcattcccgacgtcatccgcctaaagcaggagcaacacgtacacaatgagaagtctgtcctgaaggaagtcagccacccgttcctcatcaggctgttctggacgtggcatgacgagcgcttcctctacatgctcatggagtacgtgccgggcggcgagctcttcagctacctgcgcaaccgggggcgcttctccagcaccacggggctcttctactctgcagagatcatctgtgccatcgagtacctgcactccaaagagatcgtctacagggacttgaagccagagaacatcctgctggatagggatggccacattaagctcacggactttgggttcgccaagaagctggtagacaggacttggaccctctgtggaacacccgagtacctagcccccgaagtcattcagagcaagggccacggaagggccgtggactggtgggccctcggcatcctgatattcgagatgctttcggggtttcctccgttttttgatgacaacccgtttggcatttatcagaaaattcttgcaggcaaaatagatttccccagacatttggatttccatgtaaaagacctcattaagaaactgctcgtggttgacagaacaaggcgattaggaaacatgaagaacggggcgaatgatgtgaagcatcatcggtggttccgctccgtggactgggaagctgttccgcagagaaaactgaagcctcccatcgtgcccaagatagctggtgacggcgacacttccaacttcgaaacttaccctgagaatgactgggacacagccgcgcccgtgccgcagaaggatttagaaatcttcaagaatttctgaggacaggagctcacatctggaagaaacaggaagattggaatctgcctggaacaaagaactgcacctaagcagaccagaagcaaaatgtcttcttcacggcataaggacatctccacttttctctgtacctgtgtgtatagaaatagattagagcacagttgaaattcatggaactggcattatttaagcaactggaattccacactgtaggaaggttttgaaaattgtttggttgtagattttatcttatcctttagtgttgtgttcctactgtgatgtcttggtttttgtcatagacttaagtttataagtttgaactggacttgttcgattataaccacaaattgtgtgtgtgtgtgtgtgtgtgtgtgtgtgtgtgtgtgtgtgtgtatgcctgtgtgtatatatagaagtcattatggcagatgcacagaaattgtgcagtgatgtaaatgttcatactttacagagcctataatttttatttttcaatttgttttttcaaaaatctcttctcggggacaacatctgaagggtatgttgcatgcattaaaaaaaatcatctcacatgcattttatagttttggggaagaaaatatcatggggaggtctaccttcagtatctttagtgcttcttacctggtaacttgagactttaaaagaagaaacaaagaggggaagatatgggagcgaatttattccaagaatctacaatgacattgaagttgttggaggaatgtactgtatttaaaaaaaccttctgtgacacattcaaaaatttcatctgagctggatgcagtggcttgttcctatagtcccagcactttgggaggctgaggtgggtggattgcttgagcccaggagttggagaccagtctgggaaacgtggtgagacctcatctctacaaaatacaaaaaaattagccgggcatggtggcacgtgagtgtagtctcagctactcaggaggctgagatgagaggatcacttgagcctggggaggtccaggccgcagtgatccgagatcacaccactgcattccagcctgggtgacagagtgagaccctgtccaaaaaaaaaaaaaaaaaaaagaaggcaatggctttgtgcttttgaagatggattgaagagaacgtccaccttaaggctttaaaagacagtgaagctgggtgcggtggtgcactcctgtaaccctgggactttgggaagctgaggcaggaagattgagcctaggagttcgagaccgacctgggcagcatagcgagaccccatctctatataaaaaaaaagatgttaaaacagtgaaattacagaaacagaacatagccaccctttttcatcagtgaccttttcttcacgtggaggtcaactcagtaggtgagaataattagtaggttcagcagaataaactctttacaattaataactcagtggaaaatgatgttcagatggtgaaatgtggaaatgttttagacaactctattttcagcctgtgcttctcactcaccatcctgttgggattaacagttgagggccatcgctgcctaaacatttagcgtgcggtttcccatcagttttaccgtgaatgtgaaaaggtgaaactggtgctgacttcggcagcaggtatactaaaattggaatgacacagaggagattagcatggccccctgcgcgaggaagatctgcagattcatgcagcattccatatttttttaagaaaaggttacactgtgcaccgacatgtggagctagaaggaaaagcttttaagtctcatgtttgctgactataaaaataaatcatagtaataatattgaacattctactttaaaaattattaataaaaccataaatgaaacacttgagcacactttaaaaagtacataaatccatgagtccatatgcctatttttaggttgtctgttttattatccaggatttcatactcagatgagaattagcatcaggaaagcctgaaatgccttaattgtgaactgatatgcaggaaaatgaaatatgcaagcacattggtgaccttgttctttacagacgtcgtgatcagcctccagccatacagaacaaatgagaaattagaagcgattccaagaacgtgtgatggtgtgaaacccactttggaccatcacacacatttcagcatttgaagtgacacaagctacctggtaactgcccatggcggggtcatagtttaaatggcccaatgtcatgtagaggttaatttaatcaaaatgagctataaacatggagcaatcactgtataattttaaaatagtttacctggccaggcatggtcgctcacgcctgtaatcccagcactttgggaggccgaggcaggtggatcacctgaggtcaggagttcgagaccagcctggccaacatggcaaaacccccgtctctactaaaatacaaaaattaggtgtggtggcgggcacctgtaatcctggctactcgggaggctgaggcaggagaatcgcttgaacccgggaggcagaggctgcagtgagccgagatcgtgccactgcactccagcctgggccacagagcaagactccgtctcaaaacataaaaataaaaaaaatacaaatagctgacccgggtgggcattccaaaatgtccgcatggacgatcacgaaacaatcacggtgcgaaatgtccgcatggatgatcacgaaacaatcacggtgcggaatgtccgtatggatgatcatgacaaacaatcactgcgcaaaatgtggaggaaaattcattaccataatcacaacatttgtatcagaaaaacattacaaatttactttgcttcatgtaattttacgagttggcaatattttcttaaattggaatactctaagagaataggacatggatatgttacaagaagaagtgtattggggcaagtcttgtttttctgaagggaaatgccaccggcctgctttcataggcattgataaagccaggaaggaaataaagtcacaaccaaatagtatacactgtctctactgaattcttctaattccttcgcaacagaagtctaaatcctgcttagcctaaacatatctatagccagcgatgggcaaattatatttgctgtcagcatgatagaataagaagcagaaaccccccagcagtggggtaagattgcgcgcttcatcccctcaaaatgcagttcagccccactccctctccatgcccatcaaacaactgcacaatcacttgttactgaatttcccattcagcgttttgtttctttctgtccatacttaaagaccaaatcatttgtttgctttgaagaaaaagcaaaaacaagaacaaaaacaccaaatcatttgaaatcactgtccattaaaaaaaatcaccagtggaactaaacagttgagtggtttgggatgtgttcgccatttctgtgtttgacctacatggcctctaattctttggaccattgtaactgtgaaactatggcttaatactgttaaagaccccaaggctccactctgtagccaggtgcacctcaggctgcacaaataccccaccagaatgtcacaatcattcattgctccagctactgagtgaacagggtgcaagacagcactggcttgggttgtatttttgcagccagttaactttgcatcaggtctacacagtccttgcagcctttgatttctccagttgtagagatttgaaatggggtgcccgggttcctctcgtttttccttcaatctacctagcatgcattttacacacattggaggagtcgtatgcactgtttttctgttgctgatggaggcaagcaggccttctaattagtctaacttaaacggatgggattcacttaacaaaagcaagaagaaaagcacacgaacaggtgtcttaatgcatttggatagtttctttgcggggtgtgtgtgtgtgtgtgtgtgtgtgtgtgtgtgtgtgtgtgtgtgtcttggtgaaggtgaggggctgtattttcaccaagccttttcataatcaagtttgctttgcaaaccttatggccttgcaccccgcagaacagtcccttcctaatagcagggatgctctgtcatggttttctgtaaattatcgtgtgttgggaagttctgttgaggcttagtttgatcttccatggtggacacgtctgttctgtatgtaaaaggcattacaattgtgttttagcagatgagacttgaagcctttccacagtccttgtgctctgagatggctgttgagctctgctcaactgtcgtagctgaattctttctttgcgctgaacactgggcagcctcaccatgttgccaacgtgcttctggggcccctgtcactgccgccggatgccgcgcacacaggcagagtgccttggcaggtttgtgcaccccttggcgagccagaactgggaaccccgcggggtgaccccttctcatggggggtcggggaggggagtgcctatttttaatcctgtctgtttgttgcacaatggaaatcactgtgatttgtacatatgccctaggaaaattttactgctgtctaatttatgtaataatactgttgattccaggtttgtttaataaaactttgtatcttttcagaagtctgagtttcatctgcttctgtctcc

SEQ ID NO: 313935 - DNA, 6008 bp, Homo sapiens
ccacgcgtccggagctggaggaggcggcgggcgcgagacccggaatgcgcagggcccccgcctcgccccccccagcccgggccgcggcccccgccttccccgcagtcgtcccgcactcggtgcccgccccccgaggccggcggctgctcccactcggggccgttgctgcttgtgccgtgagcgccgcccagccattgtccccgtcgctccgtcagccgcgccggaccgcgcaccaggaggcgagagcgcgcatggggagcctctgttgatgccgccgccgcgccgccctccgaggctgcgtcccgggaagcccggctccccgagcgctccggcctggcccggtgccccggacctgagtgcgtccccatggaggcgcccgggctggcccaggcggccgcggcggagagcgactcccgcaaggtggcggaggagacccccgacggggcgcccgcgctctgccccagccctgaggcgctgtcgccggagccgcctgtgtacagcctgcaggactttgacacgctggccaccgtgggcactgggacgttcgggcgggtgcacctggtgaaggagaagacagccaagcatttcttcgccctcaaggtgatgagcattcccgacgtcatccgcctaaagcaggagcaacacgtacacaatgagaagtctgtcctgaaggaagtcagccacccgttcctcatcaggctgttctggacgtggcatgacgagcgcttcctctacatgctcatggagtacgtgccgggcggcgagctcttcagctacctgcgcaaccgggggcgcttctccagcaccacggggctcttctactctgcagagatcatctgtgccatcgagtacctgcactccaaagagatcgtctacagggacttgaagccagagaacatcctgctggatagggatggccacattaagctcacggactttgggttcgccaagaagctggtagacaggacttggaccctctgtggaacacccgagtacctagcccccgaagtcattcagagcaagggccacggaagggccgtggactggtgggccctcggcatcctgatattcgagatgctttcggggtttcctccgttttttgatgacaacccgtttggcatttatcagaaaattcttgcaggcaaaatagatttccccagacatttggatttccatgtaaaagacctcattaagaaactgctcgtggttgacagaacaaggcgattaggaaacatgaagaacggggcgaatgatgtgaagcatcatcggtggttccgctccgtggactgggaagctgttccgcagagaaaactgaagcctcccatcgtgcccaagatagctggtgacggcgacacttccaacttcgaaacttaccctgagaatgactgggacacagccgcgcccgtgccgcagaaggatttagaaatcttcaagaatttctgaggacaggagctcacatctggaagaaacaggaagattggaatctgcctggaacaaagaactgcacctaagcagaccagaagcaaaatgtcttcttcacggcataaggacatctccacttttctctgtacctgtgtgtatagaaatagattagagcacagttgaaattcatggaactggcattatttaagcaactggaattccacactgtaggaaggttttgaaaattgtttggttgtagattttatcttatcctttagtgttgtgttcctactgtgatgtcttggtttttgtcatagacttaagtttataagtttgaactggacttgttcgattataaccacaaattgtgtgtgtgtgtgtgtgtgtgtgtgtgtgtgtgtgtgtgtgtgtatgcctgtgtgtatatatagaagtcattatggcagatgcacagaaattgtgcagtgatgtaaatgttcatactttacagagcctataatttttatttttcaatttgttttttcaaaaatctcttctcggggacaacatctgaagggtatgttgcatgcattaaaaaaaatcatctcacatgcattttatagttttggggaagaaaatatcatggggaggtctaccttcagtatctttagtgcttcttacctggtaacttgagactttaaaagaagaaacaaagaggggaagatatgggagcgaatttattccaagaatctacaatgacattgaagttgttggaggaatgtactgtatttaaaaaaaccttctgtgacacattcaaaaatttcatctgagctggatgcagtggcttgttcctatagtcccagcactttgggaggctgaggtgggtggattgcttgagcccaggagttggagaccagtctgggaaacgtggtgagacctcatctctacaaaatacaaaaaaattagccgggcatggtggcacgtgagtgtagtctcagctactcaggaggctgagatgagaggatcacttgagcctggggaggtccaggccgcagtgatccgagatcacaccactgcattccagcctgggtgacagagtgagaccctgtccaaaaaaaaaaaaaaaaaaaagaaggcaatggctttgtgcttttgaagatggattgaagagaacgtccaccttaaggctttaaaagacagtgaagctgggtgcggtggtgcactcctgtaaccctgggactttgggaagctgaggcaggaagattgagcctaggagttcgagaccgacctgggcagcatagcgagaccccatctctatataaaaaaaaagatgttaaaacagtgaaattacagaaacagaacatagccaccctttttcatcagtgaccttttcttcacgtggaggtcaactcagtaggtgagaataattagtaggttcagcagaataaactctttacaattaataactcagtggaaaatgatgttcagatggtgaaatgtggaaatgttttagacaactctattttcagcctgtgcttctcactcaccatcctgttgggattaacagttgagggccatcgctgcctaaacatttagcgtgcggtttcccatcagttttaccgtgaatgtgaaaaggtgaaactggtgctgacttcggcagcaggtatactaaaattggaatgacacagaggagattagcatggccccctgcgcgaggaagatctgcagattcatgcagcattccatatttttttaagaaaaggttacactgtgcaccgacatgtggagctagaaggaaaagcttttaagtctcatgtttgctgactataaaaataaatcatagtaataatattgaacattctactttaaaaattattaataaaaccataaatgaaacacttgagcacactttaaaaagtacataaatccatgagtccatatgcctatttttaggttgtctgttttattatccaggatttcatactcagatgagaattagcatcaggaaagcctgaaatgccttaattgtgaactgatatgcaggaaaatgaaatatgcaagcacattggtgaccttgttctttacagacgtcgtgatcagcctccagccatacagaacaaatgagaaattagaagcgattccaagaacgtgtgatggtgtgaaacccactttggaccatcacacacatttcagcatttgaagtgacacaagctacctggtaactgcccatggcggggtcatagtttaaatggcccaatgtcatgtagaggttaatttaatcaaaatgagctataaacatggagcaatcactgtataattttaaaatagtttacctggccaggcatggtcgctcacgcctgtaatcccagcactttgggaggccgaggcaggtggatcacctgaggtcaggagttcgagaccagcctggccaacatggcaaaacccccgtctctactaaaatacaaaaattaggtgtggtggcgggcacctgtaatcctggctactcgggaggctgaggcaggagaatcgcttgaacccgggaggcagaggctgcagtgagccgagatcgtgccactgcactccagcctgggccacagagcaagactccgtctcaaaacataaaaataaaaaaaatacaaatagctgacccgggtgggcattccaaaatgtccgcatggacgatcacgaaacaatcacggtgcgaaatgtccgcatggatgatcacgaaacaatcacggtgcggaatgtccgtatggatgatcatgacaaacaatcactgcgcaaaatgtggaggaaaattcattaccataatcacaacatttgtatcagaaaaacattacaaatttactttgcttcatgtaattttacgagttggcaatattttcttaaattggaatactctaagagaataggacatggatatgttacaagaagaagtgtattggggcaagtcttgtttttctgaagggaaatgccaccggcctgctttcataggcattgataaagccaggaaggaaataaagtcacaaccaaatagtatacactgtctctactgaattcttctaattccttcgcaacagaagtctaaatcctgcttagcctaaacatatctatagccagcgatgggcaaattatatttgctgtcagcatgatagaataagaagcagaaaccccccagcagtggggtaagattgcgcgcttcatcccctcaaaatgcagttcagccccactccctctccatgcccatcaaacaactgcacaatcacttgttactgaatttcccattcagcgttttgtttctttctgtccatacttaaagaccaaatcattttgtccattaaaaaaaatcaccagtggaactaaacagttgagtggtttgggatgtgttcgccatttctgtgtttgacctacatggcctctaattctttggaccattgtaactgtgaaactatggcttaatactgttaaagaccccaaggctccactctgtagccaggtgcacctcaggctgcacaaataccccaccagaatgtcacaatcattcattgctccagctactgagtgaacagggtgcaagacagcactggcttgggttgtatttttgcagccagttaactttgcatcaggtctacacagtccttgcagcctttgatttctccagttgtagagatttgaaatggggtgcccgggttcctctcgtttttccttcaatctacctagcatgcattttacacacattggaggagtcgtatgcactgtttttctgttgctgatggaggcaagcaggccttctaattagtctaacttaaacggatgggattcacttaacaaaagcaagaagaaaagcacacgaacaggtgtcttaatgcatttggatagtttctttgcggggtgtgtgtgtgtgtgtgtgtgtgtgtgtgtgtgtgtgtgtgtgtgtcttggtgaaggtgaggggctgtattttcaccaagccttttcataatcaagtttgctttgcaaaccttatggccttgcaccccgcagaacagtcccttcctaatagcagggatgctctgtcatggttttctgtaaattatcgtgtgttgggaagttctgttgaggcttagtttgatcttccatggtggacacgtctgttctgtatgtaaaaggcattacaattgtgttttagcagatgagacttgaagcctttccacagtccttgtgctctgagatggctgttgagctctgctcaactgtcgtagctgaattctttctttgcgctgaacactgggcagcctcaccatgttgccaacgtgcttctggggcccctgtcactgccgccggatgccgcgcacacaggcagagtgccttggcaggtttgtgcaccccttggcgagccagaactgggaaccccgcggggtgaccccttctcatggggggtcggggaggggagtgcctatttttaatcctgtctgtttgttgcacaatggaaatcactgtgatttgtacatatgccctaggaaaattttactgctgtctaatttatgtaataatactgttgattccaggtttgtttaataaaactttgtatcttttcagaagtctgagtttcatctgcttctgtctcc

SEQ ID NO: 313936 - DNA, 5486 bp, Homo sapiens
ccacgcgtccggagctggaggaggcggcgggcgcgagacccggaatgcgcagggcccccgcctcgccccccccagcccgggccgcggcccccgccttccccgcagtcgtcccgcactcggtgcccgccccccgaggccggcggctgctcccactcggggccgttgctgcttgtgccgtgagcgccgcccagccattgtccccgtcgctccgtcagccgcgccggaccgcgcaccaggaggcgagagcgcgcatggggagcctctgttgatgccgccgccgcgccgccctccgaggctgcgtcccgggaagcccggctccccgagcgctccggcctggcccggtgccccggacctgagtgcgtccccatggaggcgcccgggctggcccaggcggccgcggcggagagcgactcccgcaaggtggcggaggagacccccgacggggcgcccgcgctctgccccagccctgaggcgctgtcgccggagccgcctgtgtacagcctgcaggactttgacacgctggccaccgtgggcactgggacgttcgggcgggtgcacctggtgaaggagaagacagccaagcatttcttcgccctcaaggtgatgagcattcccgacgtcatccgcctaaagcaggagcaacacgtacacaatgagaagtctgtcctgaaggaagtcagccacccgttcctcatcaggctgttctggacgtggcatgacgagcgcttcctctacatgctcatggagtacgtgccgggcggcgagctcttcagctacctgcgcaaccgggggcgcttctccagcaccacggggctcttctactctgcagagatcatctgtgccatcgagtacctgcactccaaagagatcgtctacagggacttgaagccagagaacatcctgctggatagggatggccacattaagctcacggactttgggttcgccaagaagctggtagacaggacttggaccctctgtggaacacccgagtacctagcccccgaagtcattcagagcaagggccacggaagggccgtggactggtgggccctcggcatcctgatattcgagatgctttcggggtttcctccgttttttgatgacaacccgtttggcatttatcagaaaattcttgcaggcaaaatagatttccccagacatttggatttccatgtaaaagacctcattaagaaactgctcgtggttgacagaacaaggcgattaggaaacatgaagaacggggcgaatgatgtgaagcatcatcggtggttccgctccgtggactgggaagctgttccgcagagaaaactgaagcctcccatcgtgcccaagatagctggtgacggcgacacttccaacttcgaaacttaccctgagaatgactgggacacagccgcgcccgtgccgcagaaggatttagaaatcttcaagaatttctgaggacaggagctcacatctggaagaaacaggaagattggaatctgcctggaacaaagaactgcacctaagcagaccagaagcaaaatgtcttcttcacggcataaggacatctccacttttctctgtacctgtgtgtatagaaatagattagagcacagttgaaattcatggaactggcattatttaagcaactggaattccacactgtaggaaggttttgaaaattgtttggttgtagattttatcttatcctttagtgttgtgttcctactgtgatgtcttggtttttgtcatagacttaagtttataagtttgaactggacttgttcgattataaccacaaattgtgtgtgtgtgtgtgtgtgtgtgtgtgtgtgtgtgtgtgtgtgtatgcctgtgtgtatatatagaagtcattatggcagatgcacagaaattgtgcagtgatgtaaatgttcatactttacagagcctataatttttatttttcaatttgttttttcaaaaatctcttctcggggacaacatctgaagggtatgttgcatgcattaaaaaaaatcatctcacatgcattttatagttttggggaagaaaatatcatggggaggtctaccttcagtatctttagtgcttcttacctggtaacttgagactttaaaagaagaaacaaagaggggaagatatgggagcgaatttattccaagaatctacaatgacattgaagttgttggaggaatgtactgtatttaaaaaaaccttctgtgacacattcaaaaatttcatctgagctggatgcagtggcttgttcctatagtcccagcactttgggaggctgaggtgggtggattgcttgagcccaggagttggagaccagtctgggaaacgtggtgagacctcatctctacaaaatacaaaaaaattagccgggcatggtggcacgtgagtgtagtctcagctactcaggaggctgagatgagaggatcacttgagcctggggaggtccaggccgcagtgatccgagatcacaccactgcattccagcctgggtgacagagtgagaccctgtccaaaaaaaaaaaaaaaaaaaagaaggcaatggctttgtgcttttgaagatggattgaagagaacgtccaccttaaggctttaaaagacagtgaagctgggtgcggtggtgcactcctgtaaccctgggactttgggaagctgaggcaggaagattgagcctaggagttcgagaccgacctgggcagcatagcgagaccccatctctatataaaaaaaaagatgttaaaacagtgaaattacagaaacagaacatagccaccctttttcatcagtgaccttttcttcacgtggaggtcaactcagtaggtgagaataattagtaggttcagcagaataaactctttacaattaataactcagtggaaaatgatgttcagatggtgaaatgtggaaatgttttagacaactctattttcagcctgtgcttctcactcaccatcctgttgggattaacagttgagggccatcgctgcctaaacatttagcgtgcggtttcccatcagttttaccgtgaatgtgaaaaggtgaaactggtgctgacttcggcagcaggtatactaaaattggaatgacacagaggagattagcatggccccctgcgcgaggaagatctgcagattcatgcagcattccatatttttttaagaaaaggttacactgtgcaccgacatgtggagctagaaggaaaagcttttaagtctcatgtttgctgactataaaaataaatcatagtaataatattgaacattctactttaaaaattattaataaaaccataaatgaaacacttgagcacactttaaaaagtacataaatccatgagtccatatgcctatttttaggttgtctgttttattatccaggatttcatactcagatgagaattagcatcaggaaagcctgaaatgccttaattgtgaactgatatgcaggaaaatgaaatatgcaagcacattggtgaccttgttctttacagacgtcgtgatcagcctccagccatacagaacaaatgagaaattagaagcgattccaagaacgtgtgatggtgtgaaacccactttggaccatcacacacatttcagcatttgaagtgacacaagctacctggtaactgcccatggcggggtcatagtttaaatggcccaatgtcatgtagaggttaatttaatcaaaatgagctataaacatggagcaatcactgtataattttaaaatagtttacctggccaggcatggtcgctcacgcctgtaatcccagcactttgggaggccgaggcaggtggatcacctgaggtcaggagttcgagaccagcctggccaacatggcaaaacccccgtctctactaaaatacaaaaattaggtgtggtggcgggcacctgtaatcctggctactcgggaggctgaggcaggagaatcgcttgaacccgggaggcagaggctgcagtgagccgagatcgtgccactgcactccagcctgggccacagagcaagactccgtctcaaaacataaaaataaaaaaaatacaaatagctgacccgggtgggcattccaaaatgtccgcatggacgatcacgaaacaatcacggtgcgaaatgtccgcatggatgatcacgaaacaatcacggtgcggaatgtccgtatggatgatcatgacaaacaatcactgcgcaaaatgtggaggaaaattcattaccataatcacaacatttgtatcagaaaaacattacaaatttactttgcttcatgtaattttacgagttggcaatattttcttaaattggaatactctaagagaataggacatggatatgttacaagaagaagtgtattggggcaagtcttgtttttctgaagggaaatgccaccggcctgctttcataggcattgataaagccaggaaggaaataaagtcacaaccaaatagtatacactgtctctactgaattcttctaattccttcgcaacagaagtctaaatcctgcttagcctaaacatatctatagccagcgatgggcaaattatatttgctgtcagcatgatagaataagaagcagaaaccccccagcagtggggtaagattgcgcgcttcatcccctcaaaatgcagttcagccccactccctctccatgcccatcaaacaactgcacaatcacttgttactgaatttcccattcagcgttttgtttctttctgtccatacttaaagaccaaatcatttgtttgctttgaagaaaaagcaaaaacaagaacaaaaacaccaaatcatttgaaatcactgtccattaaaaaaaatcaccagtggaactaaacagttgagtggtttgggatgtgttcgccatttctgtgtttgacctacatggcctctaattctttggaccattgtaactgtgaaactatggcttaatactgttaaagaccccaaggctccactctgtagccaggtgcacctcaggctgcacaaataccccaccagaatgtcacaatcattcattgctccagctactgagtgaacagggtgcaagacagcactggcttgggttgtatttttgcagccagttaactttgcatcaggtctacacagtccttgcagcctttgatttctccagttgtagagatttgaaatggggtgcccgggttcctctcgtttttccttcaatctacctagcatgcattttacacacattggaggagtcgtatgcactgtttttctgttgctgatggaggcaagcaggccttctaattagtctaacttaaacggatgggattcacttaacaaaagcaagaagaaaagcacacgaacaggtgtcttaatgcatttggatagtttctttgcggggtgtgtgtgtgtgtgtgtgtgtgtgtgtgtgtgtgctgggagaaggcagagtacagtgcgcactgctctgtgtgtgtgtgtgtgtgtgtgtgtgtgtgtgtgtgtggagaatacagagagaaaggagagacgcgcg

SEQ ID NO: 313937 - DNA, 669 bp, Homo sapiens
atcagactggatgtcccgctcgtttgacacgagcgggatggagatctggacgggagcggtcagtgtcttccttcttcttcttcttgctgctgcccgcttggtgtctcgcttgctgcatcggtttctgctcctctcactcttgctgcggctgcgactgcgactgcggctctcctctagctttcttcctaccccattcccggcttccctcctcctcccctgcagcctggttaggtggatacctgccctgacatgtgaggcaagctaaggcctggagggtcagatgggagaccaggtcccaagggagcaagacctcgcgaagcgcagcagccccggcccttcccccgttttgaacatgtgtaaccgacagtctgcctgggccacagccctctcaccctggtactgcatgcacgcaatgctagctgcccctttcccgtcctgggcaccccgagtctcccccgaccccgggtcccaggtatgctcccacctccacctgccccactcaccacctctgctagttccagacacctccacgcccacctggtcctctcccatcgcccacaaaagggggggcacgagggacgagcttagctgagctgggaggagcagggtgagggtgggcgacccaggattccccctccccttcccaaataaagatgagggtactaaagt

SEQ ID NO: 313938 - DNA, 336 bp, Homo sapiens
gagacggcgcctgcctttgggcctcaggcctcgtcttttttgctgcttctgcatgaccttccctctcttctcatctctcttcctcctttcaccctcttgagacatcctcctccaggccatgcgggctgcacaggaccaaggactagagggtgttaggggattgtgggggaaggggtagcacagggtggtcacacatggacacagccacacagataggcacgagcacatcaacacacgggagatacacagatgcagacacggatacacgtgtgtgcagacagcacagggacacgcatgcaggaatgtgcagctacacgtgggcacacgtgatcctga

SEQ ID NO: 313939 - DNA, 453 bp, Homo sapiens
ggggtcgcgccaggggccgtaaacacgggcccaggaagtggggcaggagggggggcgccgcagctgcgcggccgctccctcctagccggcccttgaggggggtccagcccacgcctgggcctgacccgggccgccccatccctacagggctcctcgcacctaccccagcaactcaaattcaccacctcggactcctgcgaccgcatcaaagacgaatttcagctactgcaagctcagtaccacaggtgagctgggggactgggggtccctgcgtcccgagaatgtgagtccccccatttcttctgcgcagatggcaaggctgaggcctggagattgggaaaataatatatgctagactctgacctaatcacttgacaaatactgaattcatttattttaaacagccccattttgtagaggagaaaaccgaggcacaaaaatagttaaataatt

SEQ ID NO: 313940 - DNA, 1416 bp, Homo sapiens
aatcggaacaaacttaggctaggtacgaggctggggtgcggcggcggccccgggagctgccgatcggcgccgggacaaaggcgcggccgcccggcgcccccagcagcccgagccggggcgcacagccggggcgcagcccgcgccccccgccgcgattgacatgatgtttccacaaagcaggcattcgggctcctcgcacctaccccagcaactcaaattcaccacctcggactcctgcgaccgcatcaaagacgaatttcagctactgcaagctcagtaccacagcctcaagctcgaatgtgacaagttggccagtgagaagtcagagatgcagcgtcactatgtgatgtactacgagatgtcctacggcttgaacatcgagatgcacaaacaggctgagatcgtcaaaaggctgaacgggatttgtgcccaggtcctgccctacctctcccaagagcaccagcagcaggtcttgggagccattgagagggccaagcaggtcaccgctcccgagctgaactctatcatccgacagcagctccaagcccaccagctgtcccagctgcaggccctggccctgcccttgaccccactacccgtggggctgcagccgccttcgctgccggcggtcagcgcaggcaccggcctcctctcgctgtccgcgctgggttcccaggcccacctctccaaggaagacaagaacgggcacgatggtgacacccaccaggaggatgatggcgagaagtcggattagcagggggccgggacggggaggttgggaggggggacagaggggagacagaggcacggagagaaaggaatgtttagcacaagacacagcggagctcgggattggctaaactcccatagtatttatggtggccgccggcgggggccccagcccagcttgcaggccacctctagctttcttcctaccccattcccggcttccctcctcctcccctgcagcctggttaggtggatacctgccctgacatgtgaggcaagctaaggcctggagggtcagatgggagaccaggtcccaagggagcaagacctcgcgaagcgcagcagccccggcccttcccccgttttgaacatgtgtaaccgacagtctgcctgggccacagccctctcaccctggtactgcatgcacgcaatgctagctgcccctttcccgtcctgggcaccccgagtctcccccgaccccgggtcccaggtatgctcccacctccacctgccccactcaccacctctgctagttccagacacctccacgcccacctggtcctctcccatcgcccacaaaagggggggcacgagggacgagcttagctgagctgggaggagcagggtgagggtgggcgacccaggattccccctccccttcccaaataaagatgagggtactaaagt

SEQ ID NO: 313941 - DNA, 1698 bp, Homo sapiens
aatcggaacaaacttaggctaggtacgaggctggggtgcggcggcggccccgggagctgccgatcggcgccgggacaaaggcgcggccgcccggcgcccccagcagcccgagccggggcgcacagccggggcgcagcccgcgccccccgccgcgattgacatgatgtttccacaaagcaggcattcgggctcctcgcacctaccccagcaactcaaattcaccacctcggactcctgcgaccgcatcaaagacgaatttcagctactgcaagctcagtaccacagcctcaagctcgaatgtgacaagttggccagtgagaagtcagagatgcagcgtcactatgtgatgtactacgagatgtcctacggcttgaacatcgagatgcacaaacaggctgagatcgtcaaaaggctgaacgggatttgtgcccaggtcctgccctacctctcccaagagcaccagcagcaggtcttgggagccattgagagggccaagcaggtcaccgctcccgagctgaactctatcatccgacagcagctccaagcccaccagctgtcccagctgcaggccctggccctgcccttgaccccactacccgtggggctgcagccgccttcgctgccggcggtcagcgcaggcaccggcctcctctcgctgtccgcgctgggttcccaggcccacctctccaaggaagacaagaacgggcacgatggtgacacccaccaggaggatgatggcgagaagtcggattagcagggggccgggacggggaggttgggaggggggacagaggggagacagaggcacggagagaaaggaatgtttagcacaagacacagcggagctcgggattggctaaactcccatagtatttatggtggccgccggcgggggccccagcccagcttgcaggccacctctagctttcttcctaccccattcccggcttccctcctcctcccctgcagcctggttaggtggatacctgccctgacatgtgaggcaagctaaggcctggagggtcagatgggagaccaggtcccaagggagcaagacctcgcgaagcgcagcagccccggcccttcccccgttttgaacatgtgtaaccgacagtctgcctgggccacagccctctcaccctggtactgcatgcacgcaatgctagctgcccctttcccgtcctgggcaccccgagtctcccccgaccccgggtcccaggtatgctcccacctccacctgccccactcaccacctctgctagttccagacacctccacgcccacctggtcctctcccatcgcccacaaaagggggggcacgagggacgagcttagctgagctgggaggagcagggtgagggtgggcgacccaggattccccctccccttcccaaataaagatgagggtactaaagttgtcttggtttttattttattattatttttttctttttccagtatactagcttgtcttttaagaaaggggatattaaaaaaaaaaaaagacaaaagtgtttttaaaaaaaagcaacacccacacctgtgtctgtatatagtcagcttatctcgtgttcaatcgtctgatctctacagagagaagtggaaaatgctgtatcaagggtgggcttagctgtgcctttccaataaagatgtgagaagcttcaaaaaaaaaaggcgccgctcgcgatctagaactag

SEQ ID NO: 313942 - DNA, 1401 bp, Homo sapiens
ccagaagctatgtatagtacgagctcggtgtaacatcggcagagggcgatcttcgctgtacaaaggcgcggccgcccggcgcccccagcagcccgagccggggcgcacagccggggcgcagcccgcgccccccgccgcgattgacatgatgtttccacaaagcaggcattcgggctcctcgcacctaccccagcaactcaaattcaccacctcggactcctgcgaccgcatcaaagacgaatttcagctactgcaagctcagtaccacagcctcaagctcgaatgtgacaagttggccagtgagaagtcagagatgcagcgtcactatgtgatgtactacgagatgtcctacggcttgaacatcgagatgcacaaacaggctgagatcgtcaaaaggctgaacgggatttgtgcccaggtcctgccctacctctcccaagagcaccagcagcaggtcttgggagccattgagagggccaagcaggtcaccgctcccgagctgaactctatcatccgacagcagctccaagcccaccagctgtcccagctgcaggccctggccctgcccttgaccccactacccgtggggctgcagccgccttcgctgccggcggtcagcgcaggcaccggcctcctctcgctgtccgcgctgggttcccaggcccacctctccaaggaagacaagaacgggcacgatggtgacacccaccaggaggatgatggcgagaagtcggattagcagggggccgggacggggaggttgggaggggggacagaggggagacagaggcacggagagaaaggaatgtttagcacaagacacagcggagctcgggattggctaaactcccatagtatttatggtggccgccggcgggggccccagcccagcttgcaggccacctctagctttcttcctaccccattcccggcttccctcctcctcccctgcagcctggttaggtggatacctgccctgacatgtgaggcaagctaaggcctggagggtcagatgggagaccaggtcccaagggagcaagacctcgcgaagcgcagcagccccggcccttcccccgttttgaacatgtgtaaccgacagtctgcctgggccacagccctctcaccctggtactgcatgcacgcaatgctagctgcccctttcccgtcctgggcaccccgagtctcccccgaccccgggtcccaggtatgctcccacctccacctgccccactcaccacctctgctagttccagacacctccacgcccacctggtcctctcccatcgcccacaaaagggggggcacgagggacgagcttagctgagctgggaggagcagggtgagggtgggcgacccaggattccccctccccttcccaaataaagatgagggtactaaagt

SEQ ID NO: 313943 - DNA, 2195 bp, Homo sapiens
aatcggaacaaacttaggctaggtacgaggctggggtgcggcggcggccccgggagctgccgatcggcgccgggacaaaggcgcggccgcccggcgcccccagcagcccgagccggggcgcacagccggggcgcagcccgcgccccccgccgcgattgacatgatgtttccacaaagcaggcattcgggctcctcgcacctaccccagcaactcaaattcaccacctcggactcctgcgaccgcatcaaagacgaatttcagctactgcaagctcagtaccacagcctcaagctcgaatgtgacaagttggccagtgagaagtcagagatgcagcgtcactatgtgatgtactacgagatgtcctacggcttgaacatcgagatgcacaaacaggctgagatcgtcaaaaggctgaacgggatttgtgcccaggtcctgccctacctctcccaagagcaccagcagcaggtcttgggagccattgagagggccaagcaggtcaccgctcccgagctgaactctatcatccgacagcagctccaagcccaccagctgtcccagctgcaggccctggccctgcccttgaccccactacccgtggggctgcagccgccttcgctgccggcggtcagcgcaggcaccggcctcctctcgctgtccgcgctgggttcccaggcccacctctccaaggaagacaagaacgggcacgatggtgacacccaccaggaggatgatggcgagaagtcggattagcagggggccgggacggggaggttgggaggggggacagaggggagacagaggcacggagagaaaggaatgtttagcacaagacacagcggagctcgggattggctaaactcccatagtatttatggtggccgccggcgggggccccagcccagcttgcaggccacctctagctttcttcctaccccattcccggcttccctcctcctcccctgcagcctggttaggtggatacctgccctgacatgtgaggcaagctaaggcctggagggtcagatgggagaccaggtcccaagggagcaagacctcgcgaagcgcagcagccccggcccttcccccgttttgaacatgtgtaaccgacagtctgcctgggccacagccctctcaccctggtactgcatgcacgcaatgctagctgcccctttcccgtcctgggcaccccgagtctcccccgaccccgggtcccaggtatgctcccacctccacctgccccactcaccacctctgctagttccagacacctccacgcccacctggtcctctcccatcgcccacaaaagggggggcacgagggacgagcttagctgagctgggaggagcagggtgagggtgggcgacccaggattccccctccccttcccaaataaagatgagggtactaaagttgtcttggtttttattttattattatttttttctttttccagtatactagcttgtcttttaagaaaggggatattaaaaaaaaaaaaagacaaaagtgtttttaaaaaaaagcaacacccacacctgtgtctgtatatagtcagcttatctcgtgttcaatcgtctgatctctacagagagaagtggaaaatgctgtatcaagggtgggcttagctgtgcctttccaataaagatgtgagaagcttcaaaaaaaaaaaaaaaaaaaaaaaaaaaaaaaaaaaaaaaaaaaaaaaaaaaaaaaaaaaaaaaaaacaaaaaaaaaaaaaaaaaaaaaaaaaaaaaaaaaaaaaaaaaaaaaaaaaaaaaaaaaaaaaaaaaaaaaaaaaaaaataaaaataagagcgcaaacgaaaaaaaaatcaccacagagagaaggcacagacaggaattaaagagaaaagccaggcgggcggcgtgctggacacaaaaataagcggtcaccaccgactgatggcgacaggcatatcatatatacaacacaacaacaagacgatgtgtgtgtcgcaacaggtaacaaacagtacacggcccatacgaagaatgaggaacaaaaaacattctgaaaacaacgagagaacactagtgtgacgggaggcagagacacacacacactcagctgtggggagggaggaagcaacacaactatgtggaggaacagaccacagccagcaagagaagaagaaacacccagcatgcggggggaggaagactgacgaaa

SEQ ID NO: 313944 - DNA, 1694 bp, Homo sapiens
aatcggaacaaacttaggctaggtacgaggctggggtgcggcggcggccccgggagctgccgatcggcgccgggacaaaggcgcggccgcccggcgcccccagcagcccgagccggggcgcacagccggggcgcagcccgcgccccccgccgcgattgacatgatgtttccacaaagcaggcattcgggctcctcgcacctaccccagcaactcaaattcaccacctcggactcctgcgaccgcatcaaagacgaatttcagctactgcaagctcagtaccacagcctcaagctcgaatgtgacaagttggccagtgagaagtcagagatgcagcgtcactatgtgatgtactacgagatgtcctacggcttgaacatcgagatgcacaaacaggctgagatcgtcaaaaggctgaacgggatttgtgcccaggtcctgccctacctctcccaagagcaccagcagcaggtcttgggagccattgagagggccaagcaggtcaccgctcccgagctgaactctatcatccgacagcagctccaagcccaccagctgtcccagctgcaggccctggccctgcccttgaccccactacccgtggggctgcagccgccttcgctgccggcggtcagcgcaggcaccggcctcctctcgctgtccgcgctgggttcccaggcccacctctccaaggaagacaagaacgggcacgatggtgacacccaccaggaggatgatggcgagaagtcggattagcagggggccgggacggggaggttgggaggggggacagaggggagacagaggcacggagagaaaggaatgtttagcacaagacacagcggagctcgggattggctaaactcccatagtatttatggtggccgccggcgggggccccagcccagcttgcaggccacctctagctttcttcctaccccattcccggcttccctcctcctcccctgcagcctggttaggtggatacctgccctgacatgtgaggcaagctaaggcctggagggtcagatgggagaccaggtcccaagggagcaagacctcgcgaagcgcagcagccccggcccttcccccgttttgaacatgtgtaaccgacagtctgcctgggccacagccctctcaccctggtactgcatgcacgcaatgctagctgcccctttcccgtcctgggcaccccgagtctcccccgaccccgggtcccaggtatgctcccacctccacctgccccactcaccacctctgctagttccagacacctccacgcccacctggtcctctcccatcgcccacaaaagggggggcacgagggacgagcttagctgagctgggaggagcagggtgagggtgggcgacccaggattccccctccccttcccaaataaagatgagggtactaaagtaaaaaaaaaaacaaaaaaaaaaaaaccggggggacaaaggggggggggggaaaaaaggggaacagaatggggcacggggccaacacgggtccgaggaccccaagtttcctggcacacggggggaaaccgggggacccaaaagggcgcgaaaactcgaaacccgggactgagaacctccacacacaagagaaaaaaacaaaaaggagaagggaacaacaaagacacacaaaactcgagaaaaacacacgaagagaaaacacacaaaaccaaagaaggag

SEQ ID NO: 313945 - DNA, 1595 bp, Homo sapiens
ctgatggcatcttcaaagctgaactgaatgagtttcttactcgggagctggctgaagatggctactctggagttgaggcattcgggctcctcgcacctaccccagcaactcaaattcaccacctcggactcctgcgaccgcatcaaagacgaatttcagctactgcaagctcagtaccacagcctcaagctcgaatgtgacaagttggccagtgagaagtcagagatgcagcgtcactatgtgatgtactacgagatgtcctacggcttgaacatcgagatgcacaaacaggctgagatcgtcaaaaggctgaacgggatttgtgcccaggtcctgccctacctctcccaagagcaccagcagcaggtcttgggagccattgagagggccaagcaggtcaccgctcccgagctgaactctatcatccgacagcagctccaagcccaccagctgtcccagctgcaggccctggccctgcccttgaccccactacccgtggggctgcagccgccttcgctgccggcggtcagcgcaggcaccggcctcctctcgctgtccgcgctgggttcccaggcccacctctccaaggaagacaagaacgggcacgatggtgacacccaccaggaggatgatggcgagaagtcggattagcagggggccgggacggggaggttgggaggggggacagaggggagacagaggcacggagagaaaggaatgtttagcacaagacacagcggagctcgggattggctaaactcccatagtatttatggtggccgccggcgggggccccagcccagcttgcaggccacctctagctttcttcctaccccattcccggcttccctcctcctcccctgcagcctggttaggtggatacctgccctgacatgtgaggcaagctaaggcctggagggtcagatgggagaccaggtcccaagggagcaagacctcgcgaagcgcagcagccccggcccttcccccgttttgaacatgtgtaaccgacagtctgcctgggccacagccctctcaccctggtactgcatgcacgcaatgctagctgcccctttcccgtcctgggcaccccgagtctcccccgaccccgggtcccaggtatgctcccacctccacctgccccactcaccacctctgctagttccagacacctccacgcccacctggtcctctcccatcgcccacaaaagggggggcacgagggacgagcttagctgagctgggaggagcagggtgagggtgggcgacccaggattccccctccccttcccaaataaagatgagggtactaaagttgtcttggtttttattttattattatttttttctttttccagtatactagcttgtcttttaagaaaggggatattaaaaaaaaaaaaagacaaaagtgtttttaaaaaaaagcaacacccacacctgtgtctgtatatagtcagcttatctcgtgttcaatcgtctgatctctacagagagaagtggaaaatgctgtatcaagggtgggcttagctgtgcctttccaataaagatgtgagaagcttcaaaaaaaaaaggcgccgctcgcgatctagaactag

SEQ ID NO: 313946 - DNA, 1560 bp, Homo sapiens
tcttctcctggattgttaaggattccaagtaactcttatttggcattcgggctcctcgcacctaccccagcaactcaaattcaccacctcggactcctgcgaccgcatcaaagacgaatttcagctactgcaagctcagtaccacagcctcaagctcgaatgtgacaagttggccagtgagaagtcagagatgcagcgtcactatgtgatgtactacgagatgtcctacggcttgaacatcgagatgcacaaacaggctgagatcgtcaaaaggctgaacgggatttgtgcccaggtcctgccctacctctcccaagagcaccagcagcaggtcttgggagccattgagagggccaagcaggtcaccgctcccgagctgaactctatcatccgacagcagctccaagcccaccagctgtcccagctgcaggccctggccctgcccttgaccccactacccgtggggctgcagccgccttcgctgccggcggtcagcgcaggcaccggcctcctctcgctgtccgcgctgggttcccaggcccacctctccaaggaagacaagaacgggcacgatggtgacacccaccaggaggatgatggcgagaagtcggattagcagggggccgggacggggaggttgggaggggggacagaggggagacagaggcacggagagaaaggaatgtttagcacaagacacagcggagctcgggattggctaaactcccatagtatttatggtggccgccggcgggggccccagcccagcttgcaggccacctctagctttcttcctaccccattcccggcttccctcctcctcccctgcagcctggttaggtggatacctgccctgacatgtgaggcaagctaaggcctggagggtcagatgggagaccaggtcccaagggagcaagacctcgcgaagcgcagcagccccggcccttcccccgttttgaacatgtgtaaccgacagtctgcctgggccacagccctctcaccctggtactgcatgcacgcaatgctagctgcccctttcccgtcctgggcaccccgagtctcccccgaccccgggtcccaggtatgctcccacctccacctgccccactcaccacctctgctagttccagacacctccacgcccacctggtcctctcccatcgcccacaaaagggggggcacgagggacgagcttagctgagctgggaggagcagggtgagggtgggcgacccaggattccccctccccttcccaaataaagatgagggtactaaagttgtcttggtttttattttattattatttttttctttttccagtatactagcttgtcttttaagaaaggggatattaaaaaaaaaaaaagacaaaagtgtttttaaaaaaaagcaacacccacacctgtgtctgtatatagtcagcttatctcgtgttcaatcgtctgatctctacagagagaagtggaaaatgctgtatcaagggtgggcttagctgtgcctttccaataaagatgtgagaagcttcaaaaaaaaaaggcgccgctcgcgatctagaactag

SEQ ID NO: 313947 - DNA, 2092 bp, Homo sapiens
aatcggaacaaacttaggctaggtacgaggctggggtgcggcggcggccccgggagctgccgatcggcgccgggacaaaggcgcggccgcccggcgcccccagcagcccgagccggggcgcacagccggggcgcagcccgcgccccccgccgcgattgacatgatgtttccacaaagcaggcattcgggctcctcgcacctaccccagcaactcaaattcaccacctcggactcctgcgaccgcatcaaagacgaatttcagctactgcaagctcagtaccacagcctcaagctcgaatgtgacaagttggccagtgagaagtcagagatgcagcgtcactatgtgatgtactacgagatgtcctacggcttgaacatcgagatgcacaaacaggctgagatcgtcaaaaggctgaacgggatttgtgcccaggtcctgccctacctctcccaagagcaccagcagcaggtcttgggagccattgagagggccaagcaggtcaccgctcccgagctgaactctatcatccgacagcagctccaagcccaccagctgtcccagctgcaggccctggccctgcccttgaccccactacccgtggggctgcagccgccttcgctgccggcggtcagcgcaggcaccggcctcctctcgctgtccgcgctgggttcccaggcccacctctccaaggaagacaagaacgggcacgatggtgacacccaccaggaggatgatggcgagaagtcggattagcagggggccgggacggggaggttgggaggggggacagaggggagacagaggcacggagagaaaggaatgtttagcacaagacacagcggagctcgggattggctaaactcccatagtatttatggtggccgccggcgggggccccagcccagcttgcaggccacctctagctttcttcctaccccattcccggcttccctcctcctcccctgcagcctggttaggtggatacctgccctgacatgtgaggcaagctaaggcctggagggtcagatgggagaccaggtcccaagggagcaagacctcgcgaagcgcagcagccccggcccttcccccgttttgaacatgtgtaaccgacagtctgcctgggccacagccctctcaccctggtactgcatgcacgcaatgctagctgcccctttcccgtcctgggcaccccgagtctcccccgaccccgggtcccaggtatgctcccacctccacctgccccactcaccacctctgctagttccagacaattccccctccccttcccaaataaagatgagggtactaaagttgtcttggtttttattttattattatttttttctttttccagtatactagcttgtcttttaagaaaggggatattaaaaaaaaaaaaagacaaaagtgtttttaaaaaaaagcaacacccacacctgtgtctgtatatagtcagcttatctcgtgttcaatcgtctgatctctacagagagaagtggaaaatgctgtatcaagggtgggcttagctgtgcctttccaataaagatgtgagaagcttcaaaaaaaaaaaaaaaaaaaaaaaaaaaaaaaaaaaaaaaaaaaaaaaaaaaaaaaaaaaaaaaaaacaaaaaaaaaaaaaaaaaaaaaaaaaaaaaaaaaaaaaaaaaaaaaaaaaaaaaaaaaaaaaaaaaaaaaaaaaaaaataaaaataagagcgcaaacgaaaaaaaaatcaccacagagagaaggcacagacaggaattaaagagaaaagccaggcgggcggcgtgctggacacaaaaataagcggtcaccaccgactgatggcgacaggcatatcatatatacaacacaacaacaagacgatgtgtgtgtcgcaacaggtaacaaacagtacacggcccatacgaagaatgaggaacaaaaaacattctgaaaacaacgagagaacactagtgtgacgggaggcagagacacacacacactcagctgtggggagggaggaagcaacacaactatgtggaggaacagaccacagccagcaagagaagaagaaacacccagcatgcggggggaggaagactgacgaaa

SEQ ID NO: 313948 - DNA, 1309 bp, Homo sapiens
aatcggaacaaacttaggctaggtacgaggctggggtgcggcggcggccccgggagctgccgatcggcgccgggacaaaggcgcggccgcccggcgcccccagcagcccgagccggggcgcacagccggggcgcagcccgcgccccccgccgcgattgacatgatgtttccacaaagcaggcattcgggctcctcgcacctaccccagcaactcaaattcaccacctcggactcctgcgaccgcatcaaagacgaatttcagctactgcaagctcagtaccacagcctcaagctcgaatgtgacaagttggccagtgagaagtcagagatgcagcgtcactatgtgatgtactacgagatgtcctacggcttgaacatcgagatgcacaaacaggctgagatcgtcaaaaggctgaacgggatttgtgcccaggtcctgccctacctctcccaagagcaccagcagcaggtcttgggagccattgagagggccaagcaggtcaccgctcccgagctgaactctatcatccgacagcagctccaagcccaccagctgtcccagctgcaggccctggccctgcccttgaccccactacccgtggggctgcagccgccttcgctgccggcggtcagcgcaggcaccggcctcctctcgctgtccgcgctgggttcccaggcccacctctccaaggaagacaagaacgggcacgatggtgacacccaccaggaggatgatggcgagaagtcggattagcagggggccgggacggggaggttgggaggggggacagaggggagacagaggcacggagagaaaggaatgtttagcacaagacacagcggagctcgggattggctaaactcccatagtatttatggtggccgccggcgggggccccagcccagcttgcaggccacctctagctttcttcctaccccattcccggcttccctcctcctcccctgcagcctggttaggtggatacctgccctgacatgtgaggcaagctaaggcctggagggtcagatgggagaccaggtcccaagggagcaagacctcgcgaagcgcagcagccccggcccttcccccgttttgaacatgtgtaaccgacagtctgcctgggccacagccctctcaccctggtactgcatgcacgcaatgctagctgcccctttcccgtcctgggcaccccgagtctcccccgaccccgggtcccaggtatgctcccacctccactactctgcatgccatgcactccacactactgcctccacaccatcctctgcctgtgatcctcaagaacgctac

SEQ ID NO: 313949 - DNA, 2145 bp, Homo sapiens
  misc_feature (140)..(140): n is a, c, g, or t
  misc_feature (201)..(201): n is a, c, g, or t
  misc_feature (411)..(411): n is a, c, g, or t
  misc_feature (413)..(413): n is a, c, g, or t
aggatcacgatgtccgtgctccagcgcggggcgggggggggacaagtgagccaggcaagaagaatggattggccctagagtacgggttctccaaatgtaacctcggccctacagatctctgagactatgtcagggggttngtgagattttataacaaaattaagatgttagtacaatatcgtgtttcgccgccgggcgcgnttgacatgatgtttccacaaagcaggcattcgggctcctcgcacctaccccagcaactcaaattcaccacctcggactcctgcgaccgcatcaaagacgaatttcagctactgcaagctcagtaccacagcctcaagctcgaatgtgacaagttggccagtgagaagtcagagatgcagcgtcactatgtgatgtactacgagattcctncngcttgaacatcgagatgcacaaacaggctgagatcgtcaaaaggctgaacgcggcggcggccccgggagctgccgatcggcgccgggacaaaggcgcggccgcccggcgcccccagcagcccgagccggggcgcacagccggggcgcagcccgcgccccccgccgcgattgacatgatgtttccacaaagcaggcattcgggctcctcgcacctaccccagcaactcaaattcaccacctcggactcctgcgaccgcatcaaagacgaatttcagctactgcaagctcagtaccacagcctcaagctcgaatgtgacaagttggccagtgagaagtcagagatgcagcgtcactatgtgatggtaacgtcactccgcccccagtactacgagatgtcctacggcttgaacatcgagatgcacaaacaggctgagatcgtcaaaaggctgaacgggatttgtgcccaggtcctgccctacctctcccaagagcaccagcagcaggtcttgggagccattgagagggccaagcaggtcaccgctcccgagctgaactctatcatccgacagcagctccaagcccaccagctgtcccagctgcaggccctggccctgcccttgaccccactacccgtggggctgcagccgccttcgctgccggcggtcagcgcaggcaccggcctcctctcgctgtccgcgctgggttcccaggcccacctctccaaggaagacaagaacgggcacgatggtgacacccaccaggaggatgatggcgagaagtcggattagcagggggccgggacggggaggttgggaggggggacagaggggagacagaggcacggagagaaaggaatgtttagcacaagacacagcggagctcgggattggctaaactcccatagtatttatggtggccgccggcgggggccccagcccagcttgcaggccacctctagctttcttcctaccccattcccggcttccctcctcctcccctgcagcctggttaggtggatacctgccctgacatgtgaggcaagctaaggcctggagggtcagatgggagaccaggtcccaagggagcaagacctcgcgaagcgcagcagccccggcccttcccccgttttgaacatgtgtaaccgacagtctgcctgggccacagccctctcaccctggtactgcatgcacgcaatgctagctgcccctttcccgtcctgggcaccccgagtctcccccgaccccgggtcccaggtatgctcccacctccacctgccccactcaccacctctgctagttccagacacctccacgcccacctggtcctctcccatcgcccacaaaagggggggcacgagggacgagcttagctgagctgggaggagcagggtgagggtgggcgacccaggattccccctccccttcccaaataaagatgagggtactaaagttgtcttggtttttattttattattatttttttctttttccagtatactagcttgtcttttaagaaaggggatattaaaaaaaaaaaaagacaaaagtgtttttaaaaaaaagcaacacccacacctgtgtctgtatatagtcagcttatctcgtgttcaatcgtctgatctctacagagagaagtggaaaatgctgtatcaagggtgggcttagctgtgcctttccaataaagatgtgagaagcttcaaaaaaaaaaggcgccgctcgcgatctagaactag

SEQ ID NO: 313950 - DNA, 1429 bp, Homo sapiens
tggacgtctttacacagcctgtcaatcgtctcttggcctggtactccttgatgaaggatggacctgtggcatccttcactgggacagtatcgtttgtcacctcaggggctcgcccagtgctggaagctgagatcgtcaaaaggctgaacgggatttgtgcccaggtcctgccctacctctcccaagagcaccagcagcaggtcttgggagccattgagagggccaagcaggtcaccgctcccgagctgaactctatcatccgacagcagctccaagcccaccagctgtcccagctgcaggccctggccctgcccttgaccccactacccgtggggctgcagccgccttcgctgccggcggtcagcgcaggcaccggcctcctctcgctgtccgcgctgggttcccaggcccacctctccaaggaagacaagaacgggcacgatggtgacacccaccaggaggatgatggcgagaagtcggattagcagggggccgggacggggaggttgggaggggggacagaggggagacagaggcacggagagaaaggaatgtttagcacaagacacagcggagctcgggattggctaaactcccatagtatttatggtggccgccggcgggggccccagcccagcttgcaggccacctctagctttcttcctaccccattcccggcttccctcctcctcccctgcagcctggttaggtggatacctgccctgacatgtgaggcaagctaaggcctggagggtcagatgggagaccaggtcccaagggagcaagacctcgcgaagcgcagcagccccggcccttcccccgttttgaacatgtgtaaccgacagtctgcctgggccacagccctctcaccctggtactgcatgcacgcaatgctagctgcccctttcccgtcctgggcaccccgagtctcccccgaccccgggtcccaggtatgctcccacctccacctgccccactcaccacctctgctagttccagacacctccacgcccacctggtcctctcccatcgcccacaaaagggggggcacgagggacgagcttagctgagctgggaggagcagggtgagggtgggcgacccaggattccccctccccttcccaaataaagatgagggtactaaagttgtcttggtttttattttattattatttttttctttttccagtatactagcttgtcttttaagaaaggggatattaaaaaaaaaaaaagacaaaagtgtttttaaaaaaaagcaacacccacacctgtgtctgtatatagtcagcttatctcgtgttcaatcgtctgatctctacagagagaagtggaaaatgctgtatcaagggtgggcttagctgtgcctttccaataaagatgtgagaagcttcaaaaaaaaaaggcgccgctcgcgatctagaactag

SEQ ID NO: 313951 - DNA, 1467 bp, Homo sapiens
aatcggaacaaacttaggctaggtacgaggctggggtgcggcggcggccccgggagctgccgatcggcgccgggacaaaggcgcggccgcccggcgcccccagcagcccgagccggggcgcacagccggggcgcagcccgcgccccccgccgcgattgacatgatgtttccacaaagcaggcattcgggctcctcgcacctaccccagcaactcaaattcaccacctcggactcctgcgaccgcatcaaagacgaatttcagctactgcaagctcagtaccacagcctcaagctcgaatgtgacaagttggccagtgagaagtcagagatgcagcgtcactatgtgatgtactacgagatgtcctacggcttgaacatcgagatgcacaaacaggctgagatcgtcaaaaggctgaacgggatttgtgcccaggtcctgccctacctctcccaagagcaccagcagcaggtcttgggagccattgagagggccaagcaggtcaccgctcccgagctgaactctatcatccgacagcagctccaagcccaccagctgtcccagctgcaggccctggccctgcccttgaccccactacccgtggggctgcagccgccttcgctgccggcggtcagcgcaggcaccggcctcctctcgctgtccgcgctgggttcccaggcccacctctccaaggaagacaagaacgggcacgatggtgacacccaccaggaggatgatggcgagaagtcggattagcagggggccgggacggggaggttgggaggggggacagaggggagacagaggcacggagagaaaggaatgtttagcacaagacacagcggagctcgggattggctaaactcccatagtatttatggtggccgccggcgggggccccagcccagcttgcaggccacctctagctttcttcctaccccattcccggcttccctcctcctcccctgcagcctggttaggtggatacctgccctgacatgtgaggcaagctaaggcctggagggtcagatgggagaccaggtcccaagggagcaagacctcgcgaagcgcagcagccccggcccttcccccgttttgaacatgtgtaaccgacagtctgcctggcgagggacgagcttagctgagctgggaggagcagggtgagggtgggcgacccaggattccccctccccttcccaaataaagatgagggtactaaagttgtcttggtttttattttattattatttttttctttttccagtatactagcttgtcttttaagaaaggggatattaaaaaaaaaaaaagacaaaagtgtttttaaaaaaaagcaacacccacacctgtgtctgtatatagtcagcttatctcgtgttcaatcgtctgatctctacagagagaagtggaaaatgctgtatcaagggtgggcttagctgtgcctttccaataaagatgtgagaagcttc

SEQ ID NO: 313952 - DNA, 1501 bp, Homo sapiens
aatcggaacaaacttaggctaggtacgaggctggggtgcggcggcggccccgggagctgccgatcggcgccgggacaaaggcgcggccgcccggcgcccccagcagcccgagccggggcgcacagccggggcgcagcccgcgccccccgccgcgattgacatgatgtttccacaaagcaggcattcgggctcctcgcacctaccccagcaactcaaattcaccacctcggactcctgcgaccgcatcaaagacgaatttcagctactgcaagctcagtaccacagcctcaagctcgaatgtgacaagttggccagtgagaagtcagagatgcagcgtcactatgtgatgtactacgagatgtcctacggcttgaacatcgagatgcacaaacaggctgagatcgtcaaaaggctgaacgggatttgtgcccaggtcctgccctacctctcccaagagcaccagcagcaggtcttgggagccattgagagggccaagcaggtcaccgctcccgagctgaactctatcatccgacagcagctccaagcccaccagctgtcccagctgcaggccctggccctgcccttgaccccactacccgtggggctgcagccgccttcgctgccggcggtcagcgcaggcaccggcctcctctcgctgtccgcgctgggttcccaggcccacctctccaaggaagacaagaacgggcacgatggtgacacccaccaggaggatgatggcgagaagtcggattagcagggggccgggacggggaggttgggaggggggacagaggggagacagaggcacggagagaaaggaatgtttagcacaagacacagcggagctcgggattggctaaactcccatagtatttatggtggccgccggcgggggccccagcccagcttgcaggccacctctagctttcttcctaccccattcccggcttccctcctcctcccctgcagcctggttaggtggatacctgccctgacatgtgaggcaagctaaggcctggagggtcagatgggagaccaggctgccccactcaccacctctgctagttccagacacctccacgcccacctggtcctctcccatcgcccacaaaagggggggcacgagggacgagcttagctgagctgggaggagcagggtgagggtgggcgacccaggattccccctccccttcccaaataaagatgagggtactaaagttgtcttggtttttattttattattatttttttctttttccagtatactagcttgtcttttaagaaaggggatattaaaaaaaaaaaaagacaaaagtgtttttaaaaaaaagcaacacccacacctgtgtctgtatatagtcagcttatctcgtgttcaatcgtctgatctctacagagagaagtggaaaatgctgtatcaagggtgggcttagctgtgcctttccaataaagatgtgagaagcttcaaaaaaaaaaggcgccgctcgcgatctagaactag

SEQ ID NO: 313953 - DNA, 1893 bp, Homo sapiens
  misc_feature (140)..(140): n is a, c, g, or t
  misc_feature (201)..(201): n is a, c, g, or t
  misc_feature (411)..(411): n is a, c, g, or t
  misc_feature (413)..(413): n is a, c, g, or t
aggatcacgatgtccgtgctccagcgcggggcgggggggggacaagtgagccaggcaagaagaatggattggccctagagtacgggttctccaaatgtaacctcggccctacagatctctgagactatgtcagggggttngtgagattttataacaaaattaagatgttagtacaatatcgtgtttcgccgccgggcgcgnttgacatgatgtttccacaaagcaggcattcgggctcctcgcacctaccccagcaactcaaattcaccacctcggactcctgcgaccgcatcaaagacgaatttcagctactgcaagctcagtaccacagcctcaagctcgaatgtgacaagttggccagtgagaagtcagagatgcagcgtcactatgtgatgtactacgagattcctncngcttgaacatcgagatgcacaaacaggctgagatcgtcaaaaggctgaacgcggcggcggccccgggagctgccgatcggcgccgggacaaaggcgcggccgcccggcgcccccagcagcccgagccggggcgcacagccggggcgcagcccgcgccccccgccgcgattgacatgatgtttccacaaagcaggcattcgggctcctcgcacctaccccagcaactcaaattcaccacccaccagcagcaggtcttgggagccattgagagggccaagcaggtcaccgctcccgagctgaactctatcatccgacagcagctccaagcccaccagctgtcccagctgcaggccctggccctgcccttgaccccactacccgtggggctgcagccgccttcgctgccggcggtcagcgcaggcaccggcctcctctcgctgtccgcgctgggttcccaggcccacctctccaaggaagacaagaacgggcacgatggtgacacccaccaggaggatgatggcgagaagtcggattagcagggggccgggacggggaggttgggaggggggacagaggggagacagaggcacggagagaaaggaatgtttagcacaagacacagcggagctcgggattggctaaactcccatagtatttatggtggccgccggcgggggccccagcccagcttgcaggccacctctagctttcttcctaccccattcccggcttccctcctcctcccctgcagcctggttaggtggatacctgccctgacatgtgaggcaagctaaggcctggagggtcagatgggagaccaggtcccaagggagcaagacctcgcgaagcgcagcagccccggcccttcccccgttttgaacatgtgtaaccgacagtctgcctgggccacagccctctcaccctggtactgcatgcacgcaatgctagctgcccctttcccgtcctgggcaccccgagtctcccccgaccccgggtcccaggtatgctcccacctccacctgccccactcaccacctctgctagttccagacacctccacgcccacctggtcctctcccatcgcccacaaaagggggggcacgagggacgagcttagctgagctgggaggagcagggtgagggtgggcgacccaggattccccctccccttcccaaataaagatgagggtactaaagttgtcttggtttttattttattattatttttttctttttccagtatactagcttgtcttttaagaaaggggatattaaaaaaaaaaaaagacaaaagtgtttttaaaaaaaagcaacacccacacctgtgtctgtatatagtcagcttatctcgtgttcaatcgtctgatctctacagagagaagtggaaaatgctgtatcaagggtgggcttagctgtgcctttccaataaagatgtgagaagcttcaaaaaaaaaaggcgccgctcgcgatctagaactag

SEQ ID NO: 313954 - DNA, 1447 bp, Homo sapiens
aatcggaacaaacttaggctaggtacgaggctggggtgcggcggcggccccgggagctgccgatcggcgccgggacaaaggcgcggccgcccggcgcccccagcagcccgagccggggcgcacagccggggcgcagcccgcgccccccgccgcgattgacatgatgtttccacaaagcaggcattcgggctcctcgcacctaccccagcaactcaaattcaccacctcggactcctgcgaccgcatcaaagacgaatttcagctactgcaagctcagtaccacagcctcaagctcgaatgtgacaagttggccagtgagaagtcagagatgcagcgtcactatgtgatgtactacgagatgtcctacggcttgaacatcgagatgcacaaacaggctgagatcgtcaaaaggctgaacgggatttgtgcccaggtcctgccctacctctcccaagagcaccagcagcaggtcttgggagccattgagagggccaagcaggtcaccgctcccgagctgaactctatcatccgacagcagctccaagcccaccagctgtcccagctgcaggccctggccctgcccttgaccccactacccgtggggctgcagccgccttcgctgccggcggtcagcgcaggcaccggcctcctctcgctgtccgcgctgggttcccaggcccacctctccaaggaagacaagaacgggcacgatggtgacacccaccaggaggatgatggcgagaagtcggattagcagggggccgggacggggaggttgggaggggggacagaggggagacagaggcacggagagaaaggaatgtttagcacaagacacagcggagctcgggattggctaaactcccatagtatttatggtggccgccggcgggggccccagcccagcttgcaggccacctctagctttcttcctaccccattcccggcttccctcctcctcccctgcagcctggttaggtggatacctgccccactcaccacctctgctagttccagacacctccacgcccacctggtcctctcccatcgcccacaaaagggggggcacgagggacgagcttagctgagctgggaggagcagggtgagggtgggcgacccaggattccccctccccttcccaaataaagatgagggtactaaagttgtcttggtttttattttattattatttttttctttttccagtatactagcttgtcttttaagaaaggggatattaaaaaaaaaaaaagacaaaagtgtttttaaaaaaaagcaacacccacacctgtgtctgtatatagtcagcttatctcgtgttcaatcgtctgatctctacagagagaagtggaaaatgctgtatcaagggtgggcttagctgtgcctttccaataaagatgtgagaagcttcaaaaaaaaaaggcgccgctcgcgatctagaactag

SEQ ID NO: 313955 - DNA, 1412 bp, Homo sapiens
aatcggaacaaacttaggctaggtacgaggctggggtgcggcggcggccccgggagctgccgatcggcgccgggacaaaggcgcggccgcccggcgcccccagcagcccgagccggggcgcacagccggggcgcagcccgcgccccccgccgcgattgacatgatgtttccacaaagcaggcattcgggctcctcgcacctaccccagcaactcaaattcaccacctcggactcctgcgaccgcatcaaagacgaatttcagctactgcaagctcagtaccacagcctcaagctcgaatgtgacaagttggccagtgagaagtcagagatgcagcgtcactatgtgatgtactacgagatgtcctacggcttgaacatcgagatgcacaaacaggctgagatcgtcaaaaggctgaacgggatttgtgcccaggtcctgccctacctctcccaagagcaccagcagcaggtcttgggagccattgagagggccaagcaggtcaccgctcccgagctgaactctatcatccgacagcagctccaagcccaccagctgtcccagctgcaggccctggccctgcccttgaccccactacccgtggggctgcagccgccttcgctgccggcggtcagcgcaggcaccggcctcctctcgctgtccgcgctgggttcccaggcccacctctccaaggaagacaagaacgggcacgatggtgacacccaccaggaggatgatggcgagaagtcggattagcagggggccgggacggggaggttgggaggggggacagaggggagacagaggcacggagagaaaggaatgtttagcacaagacacagcggagctcgggattggctaaactcccatagtatttatggtggccgccggcgggggccccagcccagcttgcaggccacctctagctttcttcctaccccattcccggcttccctcctcctcccctgcagcctggttaggtggatacctgccccactcaccacctctgctagttccagacacctccacgcccacctggtcctctcccatcgcccacaaaagggggggcacgagggacgagcttagctgagctgggaggagcagggtgagggtgggcgacccaggattccccctccccttcccaaataaagatgagggtactaaagttgtcttggtttttattttattattatttttttctttttccagtatactagcttgtcttttaagaaaggggatattaaaaaaaaaaaaagacaaaagtgtttttaaaaaaaagcaacacccacacctgtgtctgtatatagtcagcttatctcgtgttcaatcgtctgatctctacagagagaagtggaaaatgctgtatcaagggtgggcttagctgtgcctttccaataaagatgtgagaagcttc

SEQ ID NO: 313956 - DNA, 1085 bp, Homo sapiens
aatcggaacaaacttaggctaggtacgaggctggggtgcggcggcggccccgggagctgccgatcggcgccgggacaaaggcgcggccgcccggcgcccccagcagcccgagccggggcgcacagccggggcgcagcccgcgccccccgccgcgattgacatgatgtttccacaaagcaggcattcgggctcctcgcacctaccccagcaactcaaattcaccacctcggactcctgcgaccgcatcaaagacgaatttcagctactgcaagctcagtaccacagcctcaagctcgaatgtgacaagttggccagtgagaagtcagagatgcagcgtcactatgtgatgtactacgagatgtcctacggcttgaacatcgagatgcacaaacaggctgagatcgtcaaaaggctgaacgggatttgtgcccaggtcctgccctacctctcccaagagcaccagcagcaggtcttgggagccattgagagggccaagcaggtcaccgctcccgagctgaactctatcatccgacagcagctccaagcccaccagctgtcccagctgcaggccctggccctgcccttgaccccactacccgtggggctgcagccgccttcgctgccggcggtcagcgcaggcaccggcctcctctcgctgtccgcgctgggttcccaggcccacctctccaaggaagacaagaacgggcacgatggtgacacccaccaggaggatgatggcgagaagtcggattagcagggggccgggacggggaggttgggaggggggacagaggggagacagaggcacggagagaaaggaatgtttagcacaagacacagcggagctcgggattggctaaactcccatagtatttatggtggccgccggcgggggccccagcccagcttgcaggccacctctagctttcttcctaccccattcccggcttccctcctcctcccctgcagcctggttaggtggatacctgccctgacatgtgaggcaagctaaggcctggagggtcagatgggagaccaggttacacggagcagacctctctcgtaaagtaagctcggtagacgca

SEQ ID NO: 313957 - DNA, 1616 bp, Homo sapiens
  misc_feature (140)..(140): n is a, c, g, or t
  misc_feature (201)..(201): n is a, c, g, or t
  misc_feature (411)..(411): n is a, c, g, or t
  misc_feature (413)..(413): n is a, c, g, or t
aggatcacgatgtccgtgctccagcgcggggcgggggggggacaagtgagccaggcaagaagaatggattggccctagagtacgggttctccaaatgtaacctcggccctacagatctctgagactatgtcagggggttngtgagattttataacaaaattaagatgttagtacaatatcgtgtttcgccgccgggcgcgnttgacatgatgtttccacaaagcaggcattcgggctcctcgcacctaccccagcaactcaaattcaccacctcggactcctgcgaccgcatcaaagacgaatttcagctactgcaagctcagtaccacagcctcaagctcgaatgtgacaagttggccagtgagaagtcagagatgcagcgtcactatgtgatgtactacgagattcctncngcttgaacatcgagatgcacaaacaggctgagatcgtcaaaaggctgaacgcggcggcggccccgggagctgccgatcggcgccgggacaaaggcgcggccgcccggcgcccccagcagcccgagccggggcgcacagccggggcgcagcccgcgccccccgccgcgattgacatgatgtttccacaaagcaggcattcgggctcctcgcacctaccccagcaactcaaattcaccacctcggactcctgcgaccgcatcaaagacgaatttcagctactgcaagctcagtaccacagcctcaagctcgaatgtgacaagttggccagtgagaagtcagagatgcagcgtcactatgtgatgtactacgagatgtcctacggcttgaacatcgagatgcacaaacaggctgagatcgtcaaaaggctgaacgggatttgtgcccaggtcctgccctacctctcccaagagcaccagcagcaggtcttgggagccattgagagggccaagcaggtcaccgctcccgagctgaactctatcatccgatcccaagggagcaagacctcgcgaagcgcagcagccccggcccttcccccgttttgaacatgtgtaaccgacagtctgcctgggccacagccctctcaccctggtactgcatgcacgcaatgctagctgcccctttcccgtcctgggcaccccgagtctcccccgaccccgggtcccaggtatgctcccacctccacctgccccactcaccacctctgctagttccagacacctccacgcccacctggtcctctcccatcgcccacaaaagggggggcacgagggacgagcttagctgagctgggaggagcagggtgagggtgggcgacccaggattccccctccccttcccaaataaagatgagggtactaaagttgtcttggtttttattttattattatttttttctttttccagtatactagcttgtcttttaagaaaggggatattaaaaaaaaaaaaagacaaaagtgtttttaaaaaaaagcaacacccacacctgtgtctgtatatagtcagcttatctcgtgttcaatcgtctgatctctacagagagaagtggaaaatgctgtatcaagggtgggcttagctgtgcctttccaataaagatgtgagaagcttcaaaaaaaaaaggcgccgctcgcgatctagaactag

SEQ ID NO: 313958 - DNA, 951 bp, Homo sapiens
atcagactggatgtcccgctcgtttgacacgagcgggatggagatctggacgggagcggtcagtgtcttccttcttcttcttcttgctgctgcccgcttggtgtctcgcttgctgcatcggtttctgctcctctcactcttgctgcggctgcgactgcgactgcggctctcctctagctttcttcctaccccattcccggcttccctcctcctcccctgcagcctggttaggtggatacctgccctgacatgtgaggcaagctaaggcctggagggtcagatgggagaccaggtcccaagggagcaagacctcgcgaagcgcagcagccccggcccttcccccgttttgaacatgtgtaaccgacagtctgcctgggccacagccctctcaccctggtactgcatgcacgcaatgctagctgcccctttcccgtcctgggcaccccgagtctcccccgaccccgggtcccaggtatgctcccacctccacctgccccactcaccacctctgctagttccagacacctccacgcccacctggtcctctcccatcgcccacaaaagggggggcacgagggacgagcttagctgagctgggaggagcagggtgagggtgggcgacccaggattccccctccccttcccaaataaagatgagggtactaaagttgtcttggtttttattttattattatttttttctttttccagtatactagcttgtcttttaagaaaggggatattaaaaaaaaaaaaagacaaaagtgtttttaaaaaaaagcaacacccacacctgtgtctgtatatagtcagcttatctcgtgttcaatcgtctgatctctacagagagaagtggaaaatgctgtatcaagggtgggcttagctgtgcctttccaataaagatgtgagaagcttcaaaaaaaaaaggcgccgctcgcgatctagaactag

SEQ ID NO: 313959 - DNA, 1352 bp, Homo sapiens
  misc_feature (140)..(140): n is a, c, g, or t
  misc_feature (201)..(201): n is a, c, g, or t
  misc_feature (411)..(411): n is a, c, g, or t
  misc_feature (413)..(413): n is a, c, g, or t
aggatcacgatgtccgtgctccagcgcggggcgggggggggacaagtgagccaggcaagaagaatggattggccctagagtacgggttctccaaatgtaacctcggccctacagatctctgagactatgtcagggggttngtgagattttataacaaaattaagatgttagtacaatatcgtgtttcgccgccgggcgcgnttgacatgatgtttccacaaagcaggcattcgggctcctcgcacctaccccagcaactcaaattcaccacctcggactcctgcgaccgcatcaaagacgaatttcagctactgcaagctcagtaccacagcctcaagctcgaatgtgacaagttggccagtgagaagtcagagatgcagcgtcactatgtgatgtactacgagattcctncngcttgaacatcgagatgcacaaacaggctgagatcgtcaaaaggctgaacgcggcggcggccccgggagctgccgatcggcgccgggacaaaggcgcggccgcccggcgcccccagcagcccgagccggggcgcacagccggggcgcagcccgcgccccccgccgcgattgacatgatgtttccacaaagcaggcattcgtcccctgcagcctggttaggtggatacctgccctgacatgtgaggcaagctaaggcctggagggtcagatgggagaccaggtcccaagggagcaagacctcgcgaagcgcagcagccccggcccttcccccgttttgaacatgtgtaaccgacagtctgcctgggccacagccctctcaccctggtactgcatgcacgcaatgctagctgcccctttcccgtcctgggcaccccgagtctcccccgaccccgggtcccaggtatgctcccacctccacctgccccactcaccacctctgctagttccagacacctccacgcccacctggtcctctcccatcgcccacaaaagggggggcacgagggacgagcttagctgagctgggaggagcagggtgagggtgggcgacccaggattccccctccccttcccaaataaagatgagggtactaaagttgtcttggtttttattttattattatttttttctttttccagtatactagcttgtcttttaagaaaggggatattaaaaaaaaaaaaagacaaaagtgtttttaaaaaaaagcaacacccacacctgtgtctgtatatagtcagcttatctcgtgttcaatcgtctgatctctacagagagaagtggaaaatgctgtatcaagggtgggcttagctgtgcctttccaataaagatgtgagaagcttcaaaaaaaaaaggcgccgctcgcgatctagaactag

SEQ ID NO: 313960 - DNA, 1267 bp, Homo sapiens
  misc_feature (140)..(140): n is a, c, g, or t
  misc_feature (201)..(201): n is a, c, g, or t
  misc_feature (411)..(411): n is a, c, g, or t
  misc_feature (413)..(413): n is a, c, g, or t
aggatcacgatgtccgtgctccagcgcggggcgggggggggacaagtgagccaggcaagaagaatggattggccctagagtacgggttctccaaatgtaacctcggccctacagatctctgagactatgtcagggggttngtgagattttataacaaaattaagatgttagtacaatatcgtgtttcgccgccgggcgcgnttgacatgatgtttccacaaagcaggcattcgggctcctcgcacctaccccagcaactcaaattcaccacctcggactcctgcgaccgcatcaaagacgaatttcagctactgcaagctcagtaccacagcctcaagctcgaatgtgacaagttggccagtgagaagtcagagatgcagcgtcactatgtgatgtactacgagattcctncngcttgaacatcgagatgcacaaacaggctgagatcgtcaaaaggctgaacgcggcggcggccccgggagctgccgatcggcgccgggacaaaggcgcggccgcccggcgcccccagcagcccgagccggggcgcacagccggggcgcagcccgcgccccccgccgcgattgacatgatgtttccacaaagcaggcattcgggctcctcgcacctaccccagcaactcaaattcaccaccttcccccgttttgaacatgtgtaaccgacagtctgcctgggccacagccctctcaccctggtactgcatgcacgcaatgctagctgcccctttcccgtcctgggcaccccgagtctcccccgaccccgggtcccaggtatgctcccacctccacctgccccactcaccacctctgctagttccagacacctccacgcccacctggtcctctcccatcgcccacaaaagggggggcacgagggacgagcttagctgagctgggaggagcagggtgagggtgggcgacccaggattccccctccccttcccaaataaagatgagggtactaaagttgtcttggtttttattttattattatttttttctttttccagtatactagcttgtcttttaagaaaggggatattaaaaaaaaaaaaagacaaaagtgtttttaaaaaaaagcaacacccacacctgtgtctgtatatagtcagcttatctcgtgttcaatcgtctgatctctacagagagaagtggaaaatgctgtatcaagggtgggcttagctgtgcctttccaataaagatgtgagaagcttcaaaaaaaaaaggcgccgctcgcgatctagaactag

SEQ ID NO: 313961 - DNA, 623 bp, Homo sapiens
caggcagactgtcggttacacatgttcaaaacgggggaagggccgggggccacagccctctcaccctggtactgcatgcacgcaatgctagctgcccctttcccgtcctgggcaccccgagtctcccccgaccccgggtcccaggtatgctcccacctccacctgccccactcaccacctctgctagttccagacacctccacgcccacctggtcctctcccatcgcccacaaaagggggggcacgagggacgagcttagctgagctgggaggagcagggtgagggtgggcgacccaggattccccctccccttcccaaataaagatgagggtactaaagttgtcttggtttttattttattattatttttttctttttccagtatactagcttgtcttttaagaaaggggatattaaaaaaaaaaaaagacaaaagtgtttttaaaaaaaagcaacacccacacctgtgtctgtatatagtcagcttatctcgtgttcaatcgtctgatctctacagagagaagtggaaaatgctgtatcaagggtgggcttagctgtgcctttccaataaagatgtgagaagcttcaaaaaaaaaaggcgccgctcgcgatctagaactag

SEQ ID NO: 313962 - DNA, 974 bp, Homo sapiens
  misc_feature (140)..(140): n is a, c, g, or t
  misc_feature (201)..(201): n is a, c, g, or t
  misc_feature (411)..(411): n is a, c, g, or t
  misc_feature (413)..(413): n is a, c, g, or t
aggatcacgatgtccgtgctccagcgcggggcgggggggggacaagtgagccaggcaagaagaatggattggccctagagtacgggttctccaaatgtaacctcggccctacagatctctgagactatgtcagggggttngtgagattttataacaaaattaagatgttagtacaatatcgtgtttcgccgccgggcgcgnttgacatgatgtttccacaaagcaggcattcgggctcctcgcacctaccccagcaactcaaattcaccacctcggactcctgcgaccgcatcaaagacgaatttcagctactgcaagctcagtaccacagcctcaagctcgaatgtgacaagttggccagtgagaagtcagagatgcagcgtcactatgtgatgtactacgagattcctncngcttgaacatcgagatgcacaaacaggctgagatcgtcaaaaggctgaacgcggcggcggccccgggagctgccgatcggcgccgggacaaaggcgcggccgcccggcgcccccagcagcccgagccggggcgcacagccggggcgcagcccgcgccccccgccgcgattgacatgatgtttccacaaagcaggcattcgggctcctcgcacctaccccagcaactcaaattcaccacctcggactcctgcgaccgcatcaaagacgaatttcagctactgcaagctcagtaccacagcctcaagctcgaatgtgacaagttggccagtgagaagtcagagatgcagcgtcactatgtgatgtactacgagatgtcctacggcttgaacatcgagatgcacaaacaggctgagatcgtcaaaaggctgaacgggatttgtgcccaggtcctgccctacctctcccaagagcaccagcagcaggtcttgggagccattgagagggccaagcaggtcaccgctcccgagctgaactctatcatccgaagtatgtatggggacc

SEQ ID NO: 313963 - DNA, 1038 bp, Homo sapiens
  misc_feature (140)..(140): n is a, c, g, or t
  misc_feature (201)..(201): n is a, c, g, or t
  misc_feature (411)..(411): n is a, c, g, or t
  misc_feature (413)..(413): n is a, c, g, or t
aggatcacgatgtccgtgctccagcgcggggcgggggggggacaagtgagccaggcaagaagaatggattggccctagagtacgggttctccaaatgtaacctcggccctacagatctctgagactatgtcagggggttngtgagattttataacaaaattaagatgttagtacaatatcgtgtttcgccgccgggcgcgnttgacatgatgtttccacaaagcaggcattcgggctcctcgcacctaccccagcaactcaaattcaccacctcggactcctgcgaccgcatcaaagacgaatttcagctactgcaagctcagtaccacagcctcaagctcgaatgtgacaagttggccagtgagaagtcagagatgcagcgtcactatgtgatgtactacgagattcctncngcttgaacatcgagatgcacaaacaggctgagatcgtcaaaaggctgaacgcggcggcggccccgggagctgccgatcggcgccgggacaaaggcgcggccgcccggcgcccccagcagcccgagccggggcgcacagccggggcgcagcccgcgccccccgccgcgattgacatgatgtttccacaaagcaggcattcgggctcctcgcacctaccccagcaactcaaattcaccacctcggactcctgcgaccgcatcaaagacgaatttcagctactgcaagctcagtaccacagcctcaagctcgaatgtgacaagttggccagtgagaagtcagagatgcagcgtcactatgtgatgtactacgagatgtcctacggcttgaacatcgagatgcacaaacaggctgagatcgtcaaaaggctgaacgggatttgtgcccaggtcctgccctacctctcccaagagcaccagcagcaggtcttgggagccattgagagggccaagcagcgcgccggggccgggcgcgcggggagggggcgcaggaagcgggcgaggccgggcgcgggaggcggcggcggccccgggagctgccgatcggcgccgggacaaaggcgcggccg

SEQ ID NO: 313964 - DNA, 1014 bp, Homo sapiens
  misc_feature (140)..(140): n is a, c, g, or t
  misc_feature (201)..(201): n is a, c, g, or t
  misc_feature (411)..(411): n is a, c, g, or t
  misc_feature (413)..(413): n is a, c, g, or t
aggatcacgatgtccgtgctccagcgcggggcgggggggggacaagtgagccaggcaagaagaatggattggccctagagtacgggttctccaaatgtaacctcggccctacagatctctgagactatgtcagggggttngtgagattttataacaaaattaagatgttagtacaatatcgtgtttcgccgccgggcgcgnttgacatgatgtttccacaaagcaggcattcgggctcctcgcacctaccccagcaactcaaattcaccacctcggactcctgcgaccgcatcaaagacgaatttcagctactgcaagctcagtaccacagcctcaagctcgaatgtgacaagttggccagtgagaagtcagagatgcagcgtcactatgtgatgtactacgagattcctncngcttgaacatcgagatgcacaaacaggctgagatcgtcaaaaggctgaacgcggcggcggccccgggagctgccgatcggcgccgggacaaaggcgcggccgcccggcgcccccagcagcccgagccggggcgcacagccggggcgcagcccgcgccccccgccgcgattgacatgatgtttccacaaagcaggcattcgggctcctcgcacctaccccagcaactcaaattcaccacctcggactcctgcgaccgcatcaaagacgaatttcagctactgcaagctcagtaccacagcctcaagctcgaatgtgacaagttggccagtgagaagtcagagatgcagcgtcactatgtgatggtaacgtcactccgcccccaggtccagtgttgggggcgggcgacagggccctccacatcccctccaccacgggcagctgctccctcaaccccggccacctcccctgggaagcgcgaggatcggggcctgttctccattcagccggcccctgctgggctgagcctgcctcgctagcctggcagatggccgaggcagtggccgaggtgccaaaccgccgggttgcagaccggccctgccag

SEQ ID NO: 313965 - DNA, 322 bp, Homo sapiens
  misc_feature (25)..(26): n is a, c, g, or t
  misc_feature (29)..(29): n is a, c, g, or t
actactactactaaattcgcggccnntcnctctgctagttccagacacctccacgcccacctggtcctctcccatcgcccacaaaagggggggcacgagggacgagcttagctgagctgggaggagcagggtgagggtgggcgacccaggattccccctccccttcccaaataaagatgagggtaccaaaaataaaaaaatttttaaagataattgtttttttctctgtccctaatatctttatatgtatagcatgtctctcctgataaagctgtcctgtgagcatcttaactgtttccccgtgttttcgagcgatcgggtc

SEQ ID NO: 313966 - DNA, 1367 bp, Homo sapiens
gtctgtctgtctgtctgtctgtctgtctgtgtctgtctgtctgtctgtctgtctgtctgtgtctgtctgtctgtctgtctgtctgtctgtgtctgtctgtctgtctgtctgtctgtctgtgtctgtctgtctgtctgtctgtctgtctgtgtctgtctgtctgtctgtctgtctgtctgtgtctgtctgtctgtctgtctgtctgtctgtgtctgtctgtctgtctgtctgtctgtctgtgtctgtctgtctgtctgtctgtctgtctgtgtctgtctgtctgtctgtctgtctgtctgtgtctgtctgtctgtctgtctgtctgtctgtgtctgtctgtctgtctgtctgtctgtctgtgtctgtctgtctgtctgtctgtctgtctgtgtctgtctgtctgtctgtctgtctgtctgtgtctgtctgtctgtctgtctgtctgtctgtgtctgtctgtctgtctgtctgtctgtctgtgtctgtctgtctgtctgtctgtctgtctctgctagttccagacacctccacgcccacctggtcctctcccatcgcccacaaaagggggggcacgagggacgagcttagctgagctgggaggagcagggtgagggtgggcgacccaggattccccctccccttcccaaataaagatgagggtaccaaagttgtcttggtttttattttattattatttttttctttttccagtatactagcttgtcttttaagaaaggggatattaaaaaaaaaaaagacaaaagtgtttttaaaaaaaagcaacacccacacctgtgtctgtatatagtcagcttatctcgtgttcaatcgtctgatctctacagagagaagtggaaaatgctgtatcaagggtgggcttagctgtgcctttccaataaagatgtgagaagcttcaaaaaaaaaaaaaaaaaaaaaaaaaaaaaaaaaaaaaaaaaaaaaaaaaaaaaaaaaaaaaaaataaaaataagagcgcaaacgaaaaaaaaatcaccacagagagaaggcacagacaggaattaaagagaaaagccaggcgggcggcgtgctggacacaaaaataagcggtcaccaccgactgatggcgacaggcatatcatatatacaacacaacaacaagacgatgtgtgtgtcgcaacaggtaacaaacagtacacggcccatacgaagaatgaggaacaaaaaacattctgaaaacaacgagagaacactagtgtgacgggaggcagagacacacacacactcagctgtggggagggaggaagcaacacaactatgtggaggaacagaccacagccagcaagagaagaagaaacacccagcatgcggggggaggaagactgacgaaa

SEQ ID NO: 313967 - DNA, 938 bp, Homo sapiens
gtctgtctgtctgtctgtctgtctgtctgtgtctgtctgtctgtctgtctgtctgtctgtgtctgtctgtctgtctgtctgtctgtctgtgtctgtctgtctgtctgtctgtctgtctgtgtctgtctgtctgtctgtctgtctgtctgtgtctgtctgtctgtctgtctgtctgtctgtgtctgtctgtctgtctgtctgtctgtctgtgtctgtctgtctgtctgtctgtctgtctgtgtctgtctgtctgtctgtctgtctgtctgtgtctgtctgtctgtctgtctgtctgtctgtgtctgtctgtctgtctgtctgtctgtctgtgtctgtctgtctgtctgtctgtctgtctgtgtctgtctgtctgtctgtctgtctgtctgtgtctgtctgtctgtctgtctgtctgtctgtgtctgtctgtctgtctgtctgtctgtctgtgtctgtctgtctgtctgtctgtctgtctgtgtctgtctgtctgtctgtctgtctgtctctgctagttccagacacctccacgcccacctggtcctctcccatcgcccacaaaagggggggcacgagggacgagcttagctgagctgggaggagcagggtgagggtgggcgacccaggattccccctccccttcccaaataaagatgagggtaccaaagttgtcttggtttttattttattattatttttttctttttccagtatactagcttgtcttttaagaaaggggatattaaaaaaaaaaaagacaaaagtgtttttaaaaaaaagcaacacccacacctgtgtctgtatatagtcagcttatctcgtgttcaatcgtctgatctctacagagagaagtggaaaatgctgtatcaagggtgggcttagctgtgcctttccaataaagatgtgagaagcttccaaaaaggaacaaaaaaaaaaaa

SEQ ID NO: 313968 - DNA, 733 bp, Homo sapiens
ccggtttcccttttttttttggccccgccacagaaaagataggatgtagtaagaaaagtcggagagagagagagagttccagggacagagaagggaacctagtagtcatcagctaaaaaaaagacaaaagtgtttttaaaaaaaagcaacacccacacctgtgtctgtatatagtcagcttatctcgtgttcaatcgtctgatctctacagagagaagtggaaaatgctgtatcaagggtgggcttagctgtgcctttccaataaagatgtgagaagcttcaaaaaaaaaaaaaaaaaaaaaaaaaaaaaaaaaaaaaaaaaaaaaaaaaaaaaaaaaaaaaaaataaaaataagagcgcaaacgaaaaaaaaatcaccacagagagaaggcacagacaggaattaaagagaaaagccaggcgggcggcgtgctggacacaaaaataagcggtcaccaccgactgatggcgacaggcatatcatatatacaacacaacaacaagacgatgtgtgtgtcgcaacaggtaacaaacagtacacggcccatacgaagaatgaggaacaaaaaacattctgaaaacaacgagagaacactagtgtgacgggaggcagagacacacacacactcagctgtggggagggaggaagcaacacaactatgtggaggaacagaccacagccagcaagagaagaagaaacacccagcatgcggggggaggaagactgacgaaa

SEQ ID NO: 313969 - DNA, 1842 bp, Homo sapiens
  misc_feature (140)..(140): n is a, c, g, or t
  misc_feature (201)..(201): n is a, c, g, or t
  misc_feature (411)..(411): n is a, c, g, or t
  misc_feature (413)..(413): n is a, c, g, or t
aggatcacgatgtccgtgctccagcgcggggcgggggggggacaagtgagccaggcaagaagaatggattggccctagagtacgggttctccaaatgtaacctcggccctacagatctctgagactatgtcagggggttngtgagattttataacaaaattaagatgttagtacaatatcgtgtttcgccgccgggcgcgnttgacatgatgtttccacaaagcaggcattcgggctcctcgcacctaccccagcaactcaaattcaccacctcggactcctgcgaccgcatcaaagacgaatttcagctactgcaagctcagtaccacagcctcaagctcgaatgtgacaagttggccagtgagaagtcagagatgcagcgtcactatgtgatgtactacgagattcctncngcttgaacatcgagatgcacaaacaggctgagatcgtcaaaaggctgaacgcggcggcggccccgggagctgccgatcggcgccgggacaaaggcgcggccgcccggcgcccccagcagcccgagccggggcgcacagccggggcgcagcccgcgccccccgccgcgattgacatgatgtttccacaaagcaggcattcgggctcctcgcacctaccccagcaactcaaattcaccacctcggactcctgcgaccgcatcaaagacgaatttcagctactgcaagctcagtaccacagcctcaagctcgaatgtgacaagttggccagtgagaagtcagagatgcagcgtcactatgtgatgtactacgagatgtcctacggcttgaacatcgagatgcacaaacaggctgagatcgtcaaaaggctgaacgggatttgtgcccaggtcctgccctacctctcccaagagcaccagcagcaggtcttgggagccattgagagggccaagcaggtcaccgctcccgagctgaactctatcatccgacagcagctccaagcccaccagctgtcccagctgcaggccctggccctgcccttgaccccactacccgtggggctgcagccgccttcgctgccggcggtcagcgcaggcaccggcctcctctcgctgtccgcgctgggttcccaggcccacctctccaaggaagacaagaacgggcacgatggtgacacccaccaggaggatgatggcgagaagtcggattagcagggggccgggacggggaggttgggaggggggacagaggggagacagaggcacggagagaaaggaatgtttagcacaagacacagcggagctcgggattggctaaactcccatagtatttatggtggccgccggcgggggccccagcccagcttgcaggccacctctagctttcttcctaccccattcccggcttccctcctcctcccctgcagcctggttaggtggatacctgccctgacatgtgaggcaagctaaggcctggagggtcagatgggagaccaggtcccaagggagcaagacctcgcgaagcgcagcagccccggcccttcccccgttttgaacatgtgtaaccgacagtctgcctgggccacagccctctcaccctggtactgcatgcacgcaatgctagctgcccctttcccgtcctgggcaccccgagtctcccccgaccccgggtcccaggtatgctcccacctccacctgccccactcaccacctctgctagttccagacacctccacgcccacctggtcctctcccatcgcccacaaaagggggggcacgagggacgagcttagctgagctgggaggagcagggtgagggtgggcgacccaggattccccctccccttcccaaataaagatgagggtactaaagt

SEQ ID NO: 313970 - DNA, 1663 bp, Homo sapiens
aatcggaacaaacttaggctaggtacgaggctggggtgcggcggcggccccgggagctgccgatcggcgccgggacaaaggcgcggccgcccggcgcccccagcagcccgagccggggcgcacagccggggcgcagcccgcgccccccgccgcgattgacatgatgtttccacaaagcaggcattcgggctcctcgcacctaccccagcaactcaaattcaccacctcggactcctgcgaccgcatcaaagacgaatttcagctactgcaagctcagtaccacagcctcaagctcgaatgtgacaagttggccagtgagaagtcagagatgcagcgtcactatgtgatgtactacgagatgtcctacggcttgaacatcgagatgcacaaacaggctgagatcgtcaaaaggctgaacgggatttgtgcccaggtcctgccctacctctcccaagagcaccagcagcaggtcttgggagccattgagagggccaagcaggtcaccgctcccgagctgaactctatcatccgacagcagctccaagcccaccagctgtcccagctgcaggccctggccctgcccttgaccccactacccgtggggctgcagccgccttcgctgccggcggtcagcgcaggcaccggcctcctctcgctgtccgcgctgggttcccaggcccacctctccaaggaagacaagaacgggcacgatggtgacacccaccaggaggatgatggcgagaagtcggattagcagggggccgggacggggaggttgggaggggggacagaggggagacagaggcacggagagaaaggaatgtttagcacaagacacagcggagctcgggattggctaaactcccatagtatttatggtggccgccggcgggggccccagcccagcttgcaggccacctctagctttcttcctaccccattcccggcttccctcctcctcccctgcagcctggttaggtggatacctgccctgacatgtgaggcaagctaaggcctggagggtcagatgggagaccaggtcccaagggagcaagacctcgcgaagcgcagcagccccggcccttcccccgttttgaacatgtgtaaccgacagtctgcctgggccacagccctctcaccctggtactgcatgcacgcaatgctagctgcccctttcccgtcctgggcaccccgagtctcccccgaccccgggtcccaggtatgctcccacctccacctgccccactcaccacctctgctagttccagacacctccacgcccacctggtcctctcccatcgcccacaaaagggggggcacgagggacgagcttagctgagctgggaggagcagggtgagggtgggcgacccaggattccccctccccttcccaaataaagatgagggtactaaagttgtcttggtttttattttattattatttttttctttttccagtatactagcttgtcttttaagaaaggggatattaaaaaaaaaaaaagacaaaagtgtttttaaaaaaaagcaacacccacacctgtgtctgtatatagtcagcttatctcgtgttcaatcgtctgatctctacagagagaagtggaaaatgctgtatcaagggtgggcttagctgtgcctttccaataaagatgtgagaagcttc

SEQ ID NO: 313971 - DNA, 2475 bp, Homo sapiens
aatcggaacaaacttaggctaggtacgaggctggggtgcggcggcggccccgggagctgccgatcggcgccgggacaaaggcgcggccgcccggcgcccccagcagcccgagccggggcgcacagccggggcgcagcccgcgccccccgccgcgattgacatgatgtttccacaaagcaggcattcgggctcctcgcacctaccccagcaactcaaattcaccacctcggactcctgcgaccgcatcaaagacgaatttcagctactgcaagctcagtaccacagcctcaagctcgaatgtgacaagttggccagtgagaagtcagagatgcagcgtcactatgtgatgtactacgagatgtcctacggcttgaacatcgagatgcacaaacaggctgagatcgtcaaaaggctgaacgggatttgtgcccaggtcctgccctacctctcccaagagcaccagcagcaggtcttgggagccattgagagggccaagcaggtcaccgctcccgagctgaactctatcatccgacagcagctccaagcccaccagctgtcccagctgcaggccctggccctgcccttgaccccactacccgtggggctgcagccgccttcgctgccggcggtcagcgcaggcaccggcctcctctcgctgtccgcgctgggttcccaggcccacctctccaaggaagacaagaacgggcacgatggtgacacccaccaggaggatgatggcgagaagtcggattagcagggggccgggacggggaggttgggaggggggacagaggggagacagaggcacggagagaaaggaatgtttagcacaagacacagcggagctcgggattggctaaactcccatagtatttatggtggccgccggcgggggccccagcccagcttgcaggccacctctagctttcttcctaccccattcccggcttccctcctcctcccctgcagcctggttaggtggatacctgccctgacatgtgaggcaagctaaggcctggagggtcagatgggagaccaggtcccaagggagcaagacctcgcgaagcgcagcagccccggcccttcccccgttttgaacatgtgtaaccgacagtctgcctgggccacagccctctcaccctggtactgcatgcacgcaatgctagctgcccctttcccgtcctgggcaccccgagtctcccccgaccccgggtcccaggtatgctcccacctccacctgccccactcaccacctctgctagttccagacacctccacgcccacctggtcctctcccatcgcccacaaaagggggggcacgagggacgagcttagctgagctgggaggagcagggtgagggtgggcgacccaggattccccctccccttcccaaataaagatgagggtactaaagttgtcttggtttttattttattattatttttttctttttccagtatactagcttgtcttttaagaaaggggatattaaaaaaaaaaaaagacaaaagtgtttttaaaaaaaagcaacacccacacctgtgtctgtatatagtcagcttatctcgtgttcaatcgtctgatctctacagagagaagtggaaaatgctgtatcaagggtgggcttagctgtgcctttccaataaagatgtgagaagcttcaaaaacacaaaaaccacacaccaaacaacaacttttgcgcgcccggccccggccctaggaaagctttcaaacaccattcgtgtggggcgcggggcgcccaggaggcgtaacgcagacccgttggggtcaacagcgtttgtccccaaggcgacaaccgcgcgaccagtaacatacggtgtcgggaacttccaccaaataaaaaaagcgccgggtgaacaaccggcgcgtgtctgcgaacaaaactcacgaaatggacaggcaactcgaagcgcacataacagcgcatctatcaacgcgggactcccacggagacggccggacatatacaattacgcccccgccgacgagtatcgccagacacaagcgaagcagccaccacagcaagccagacaccagaggacgacaagacaagagcaaggcgaacaacaaacgaggaaagtaacgagacagaacgagccgcagacgcggacagagagcctacgccagatagccgcgggaacgtacgcgcgggcaggagcagcagaagctggggaggagagagatcgcgcgacgcatgagagacggccgccgcagaccgaggacgtgaggacgacagcatagaacggggccagtcgagcagacgtacggtcacgcgccggcagcgaccggacgcatgacacactcctcagccgagacaccgggcacgccaggatgggcgccgacagagacagatgatgtgagtagagagagagattggaggacgggagcgagagagacggcagcggcgcgacggagcagaggcgtcagagactcggagaagggagtcgaagaat

SEQ ID NO: 313972 - DNA, 1732 bp, Homo sapiens
ggcggcattaccgctgcctttctgcataataggaatatcttatatgtgtcttcttgtctatatgtttctcttctctgtctctctagtccagagccaaggtcacagagcacgtccgtggcacgcgtccaggtcgtgccacagcagggccggcggcttcgacgcgggcagccgggtcccttttctttgacagatggggaaaccgaggcccggccggctgccggggctcctcgcacctaccccagcaactcaaattcaccacctcggactcctgcgaccgcatcaaagacgaatttcagctactgcaagctcagtaccacagcctcaagctcgaatgtgacaagttggccagtgagaagtcagagatgcagcgtcactatgtgatgtactacgagatgtcctacggcttgaacatcgagatgcacaaacaggctgagatcgtcaaaaggctgaacgggatttgtgcccaggtcctgccctacctctcccaagagcaccagcagcaggtcttgggagccattgagagggccaagcaggtcaccgctcccgagctgaactctatcatccgacagcagctccaagcccaccagctgtcccagctgcaggccctggccctgcccttgaccccactacccgtggggctgcagccgccttcgctgccggcggtcagcgcaggcaccggcctcctctcgctgtccgcgctgggttcccaggcccacctctccaaggaagacaagaacgggcacgatggtgacacccaccaggaggatgatggcgagaagtcggattagcagggggccgggacggggaggttgggaggggggacagaggggagacagaggcacggagagaaaggaatgtttagcacaagacacagcggagctcgggattggctaaactcccatagtatttatggtggccgccggcgggggccccagcccagcttgcaggccacctctagctttcttcctaccccattcccggcttccctcctcctcccctgcagcctggttaggtggatacctgccctgacatgtgaggcaagctaaggcctggagggtcagatgggagaccaggtcccaagggagcaagacctcgcgaagcgcagcagccccggcccttcccccgttttgaacatgtgtaaccgacagtctgcctgggccacagccctctcaccctggtactgcatgcacgcaatgctagctgcccctttcccgtcctgggcaccccgagtctcccccgaccccgggtcccaggtatgctcccacctccacctgccccactcaccacctctgctagttccagacacctccacgcccacctggtcctctcccatcgcccacaaaagggggggcacgagggacgagcttagctgagctgggaggagcagggtgagggtgggcgacccaggattccccctccccttcccaaataaagatgagggtactaaagttgtcttggtttttattttattattatttttttctttttccagtatactagcttgtcttttaagaaaggggatattaaaaaaaaaaaaagacaaaagtgtttttaaaaaaaagcaacacccacacctgtgtctgtatatagtcagcttatctcgtgttcaatcgtctgatctctacagagagaagtggaaaatgctgtatcaagggtgggcttagctgtgcctttccaataaagatgtgagaagcttcaaaaaaaaaaggcgccgctcgcgatctagaactag

SEQ ID NO: 313973 - DNA, 1744 bp, Homo sapiens
  misc_feature (140)..(140): n is a, c, g, or t
  misc_feature (201)..(201): n is a, c, g, or t
aggatcacgatgtccgtgctccagcgcggggcgggggggggacaagtgagccaggcaagaagaatggattggccctagagtacgggttctccaaatgtaacctcggccctacagatctctgagactatgtcagggggttngtgagattttataacaaaattaagatgttagtacaatatcgtgtttcgccgccgggcgcgnttgacatgatgtttccacaaagcaggcattcgggctcctcgcacctaccccagcaactcaaattcaccacctcggactcctgcgaccgcatcaaagacgaatttcagctactgcaagctcagtaccacagcctcaagctcgaatgtgacaagttggccagtgagaagtcagagatgcagcgtcactatgtgatgtactacgagatgtcctacggcttgaacatcgagatgcacaaacaggctgagatcgtcaaaaggctgaacgggatttgtgcccaggtcctgccctacctctcccaagagcaccagcagcaggtcttgggagccattgagagggccaagcaggtcaccgctcccgagctgaactctatcatccgacagcagctccaagcccaccagctgtcccagctgcaggccctggccctgcccttgaccccactacccgtggggctgcagccgccttcgctgccggcggtcagcgcaggcaccggcctcctctcgctgtccgcgctgggttcccaggcccacctctccaaggaagacaagaacgggcacgatggtgacacccaccaggaggatgatggcgagaagtcggattagcagggggccgggacggggaggttgggaggggggacagaggggagacagaggcacggagagaaaggaatgtttagcacaagacacagcggagctcgggattggctaaactcccatagtatttatggtggccgccggcgggggccccagcccagcttgcaggccacctctagctttcttcctaccccattcccggcttccctcctcctcccctgcagcctggttaggtggatacctgccctgacatgtgaggcaagctaaggcctggagggtcagatgggagaccaggtcccaagggagcaagacctcgcgaagcgcagcagccccggcccttcccccgttttgaacatgtgtaaccgacagtctgcctgggccacagccctctcaccctggtactgcatgcacgcaatgctagctgcccctttcccgtcctgggcaccccgagtctcccccgaccccgggtcccaggtatgctcccacctccacctgccccactcaccacctctgctagttccagacacctccacgcccacctggtcctctcccatcgcccacaaaagggggggcacgagggacgagcttagctgagctgggaggagcagggtgagggtgggcgacccaggattccccctccccttcccaaataaagatgagggtactaaagttgtcttggtttttattttattattatttttttctttttccagtatactagcttgtcttttaagaaaggggatattaaaaaaaaaaaaagacaaaagtgtttttaaaaaaaagcaacacccacacctgtgtctgtatatagtcagcttatctcgtgttcaatcgtctgatctctacagagagaagtggaaaatgctgtatcaagggtgggcttagctgtgcctttccaataaagatgtgagaagcttcaaaaaaaaaaggcgccgctcgcgatctagaactag

SEQ ID NO: 313974 - DNA, 1339 bp, Homo sapiens
aatcggaacaaacttaggctaggtacgaggctggggtgcggcggcggccccgggagctgccgatcggcgccgggacaaaggcgcggccgcccggcgcccccagcagcccgagccggggcgcacagccggggcgcagcccgcgccccccgccgcgattgacatgatgtttccacaaagcaggcattcgggctcctcgcacctaccccagcaactcaaattcaccacctcggactcctgcgaccgcatcaaagacgaatttcagctactgcaagctcagtaccacagcctcaagctcgaatgtgacaagttggccagtgagaagtcagagatgcagcgtcactatgtgatgtactacgagatgtcctacggcttgaacatcgagatgcacaaacaggctgagatcgtcaaaaggctgaacgggatttgtgcccaggtcctgccctacctctcccaagagcaccagcagcaggtcttgggagccattgagagggccaagcaggtcaccgctcccgagctgaactctatcatccgacagcagctccaagcccaccagctgtcccagctgcaggccctggccctgcccttgaccccactacccgtggggctgcagccgccttcgctgccggcggtcagcgcaggcaccggcctcctctcgctgtccgcgctgggttcccaggcccacctctccaaggaagacaagaacgggcacgatggtgacacccaccaggaggatgatggcgagaagtcggattagcagggggccgggacggggaggttgggaggggggacagaggggagacagaggcacggagagaaaggaatgtttagcacaagacacagcggagctcgggattggctaaactcccatagtatttatggtggccgccggcgggggccccagcccagcttgcaggccacctctagctttcttcctaccccattcccggcttccctcctcctcccctgcagcctggttaggtggatacctgccctgacatgtgaggcaagctaaggcctggagggtcagatgggagaccaggtcccaagggagcaagacctcgcgaagcgcagcagccccggcccttcccccgttttgaacatgtgtaaccgacagtctgcctgggccacagccctctcaccctggtactgcatgcacgcaatgctagctgcccctttcccgtcctgggcaccccgagtctcccccgaccccgggtcccaggtatgctcccacctccacctgccccactcaccacctctgctagttccagacacctccacgcccacctggtcctctcccatcgcccacaaaagggggggcaagaaaaaaaaaataaaacaa

SEQ ID NO: 313975 - DNA, 1293 bp, Homo sapiens
aatcggaacaaacttaggctaggtacgaggctggggtgcggcggcggccccgggagctgccgatcggcgccgggacaaaggcgcggccgcccggcgcccccagcagcccgagccggggcgcacagccggggcgcagcccgcgccccccgccgcgattgacatgatgtttccacaaagcaggcattcgggctcctcgcacctaccccagcaactcaaattcaccacctcggactcctgcgaccgcatcaaagacgaatttcagctactgcaagctcagtaccacagcctcaagctcgaatgtgacaagttggccagtgagaagtcagagatgcagcgtcactatgtgatgtactacgagatgtcctacggcttgaacatcgagatgcacaaacaggctgagatcgtcaaaaggctgaacgggatttgtgcccaggtcctgccctacctctcccaagagcaccagcagcaggtcttgggagccattgagagggccaagcaggtcaccgctcccgagctgaactctatcatccgacagcagctccaagcccaccagctgtcccagctgcaggccctggccctgcccttgaccccactacccgtggggctgcagccgccttcgctgccggcggtcagcgcaggcaccggcctcctctcgctgtccgcgctgggttcccaggcccacctctccaaggaagacaagaacgggcacgatggtgacacccaccaggaggatgatggcgagaagtcggattagcagggggccgggacggggaggttgggaggggggacagaggggagacagaggcacggagagaaaggaatgtttagcacaagacacagcggagctcgggattggctaaactcccatagtatttatggtggccgccggcgggggccccagcccagcttgcaggccacctctagctttcttcctaccccattcccggcttccctcctcctcccctgcagcctggttaggtggatacctgccctgacatgtgaggcaagctaaggcctggagggtcagatgggagaccaggtcccaagggagcaagacctcgcgaagcgcagcagccccggcccttcccccgttttgaacatgtgtaaccgacagtctgcctgggccacagccctctcaccctggtactgcatgcacgcaatgctagctgcccctttcccgtcctgggcaccccgagtctcccccgaccccgggtcccaggtatgctcccacctccacttgaccccactacccgtggggctgcagccgccttcactgccggcggtcagcgcagg

SEQ ID NO: 313976 - DNA, 1584 bp, Homo sapiens
aatcggaacaaacttaggctaggtacgaggctggggtgcggcggcggccccgggagctgccgatcggcgccgggacaaaggcgcggccgcccggcgcccccagcagcccgagccggggcgcacagccggggcgcagcccgcgccccccgccgcgattgacatgatgtttccacaaagcaggcattcgggctcctcgcacctaccccagcaactcaaattcaccacctcggactcctgcgaccgcatcaaagacgaatttcagctactgcaagctcagtaccacagcctcaagctcgaatgtgacaagttggccagtgagaagtcagagatgcagcgtcactatgtgatgtactacgagatgtcctacggcttgaacatcgagatgcacaaacaggctgagatcgtcaaaaggctgaacgggatttgtgcccaggtcctgccctacctctcccaagagcaccagcagcaggtcttgggagccattgagagggccaagcaggtcaccgctcccgagctgaactctatcatccgacagcagctccaagcccaccagctgtcccagctgcaggccctggccctgcccttgaccccactacccgtggggctgcagccgccttcgctgccggcggtcagcgcaggcaccggcctcctctcgctgtccgcgctgggttcccaggcccacctctccaaggaagacaagaacgggcacgatggtgacacccaccaggaggatgatggcgagaagtcggattagcagggggccgggacggggaggttgggaggggggacagaggggagacagaggcacggagagaaaggaatgtttagcacaagacacagcggagctcgggattggctaaactcccatagtatttatggtggccgccggcgggggccccagcccagcttgcaggccacctctagctttcttcctaccccattcccggcttccctcctcctcccctgcagcctggttaggtggatacctgccctgacatgtgaggcaagctaaggcctggagggtcagatgggagaccaggtcccaagggagcaagacctcgcgaagcgcagcagccccggcccttcccccgttttgaacatgtgtaaccgacagtctgcctggctgccccactcaccacctctgctagttccagacacctccacgcccacctggtcctctcccatcgcccacaaaagggggggcacgagggacgagcttagctgagctgggaggagcagggtgagggtgggcgacccaggattccccctccccttcccaaataaagatgagggtactaaagttgtcttggtttttattttattattatttttttctttttccagtatactagcttgtcttttaagaaaggggatattaaaaaaaaaaaaagacaaaagtgtttttaaaaaaaagcaacacccacacctgtgtctgtatatagtcagcttatctcgtgttcaatcgtctgatctctacagagagaagtggaaaatgctgtatcaagggtgggcttagctgtgcctttccaataaagatgtgagaagcttcaaaaaaaaaaggcgccgctcgcgatctagaactag

SEQ ID NO: 313977 - DNA, 1423 bp, Homo sapiens
  misc_feature (91)..(91): n is a, c, g, or t
  misc_feature (93)..(93): n is a, c, g, or t
cccgcgagaattcctgctgctcccgcgagaattcctgctgctaattcctgctgctcccgcgagaattcctgctgctcccgcgagattcctncngcttgaacatcgagatgcacaaacaggctgagatcgtcaaaaggctgaacgggatttgtgcccaggtcctgccctacctctcccaagagcaccagcagcaggtcttgggagccattgagagggccaagcaggtcaccgctcccgagctgaactctatcatccgacagcagctccaagcccaccagctgtcccagctgcaggccctggccctgcccttgaccccactacccgtggggctgcagccgccttcgctgccggcggtcagcgcaggcaccggcctcctctcgctgtccgcgctgggttcccaggcccacctctccaaggaagacaagaacgggcacgatggtgacacccaccaggaggatgatggcgagaagtcggattagcagggggccgggacggggaggttgggaggggggacagaggggagacagaggcacggagagaaaggaatgtttagcacaagacacagcggagctcgggattggctaaactcccatagtatttatggtggccgccggcgggggccccagcccagcttgcaggccacctctagctttcttcctaccccattcccggcttccctcctcctcccctgcagcctggttaggtggatacctgccctgacatgtgaggcaagctaaggcctggagggtcagatgggagaccaggtcccaagggagcaagacctcgcgaagcgcagcagccccggcccttcccccgttttgaacatgtgtaaccgacagtctgcctgggccacagccctctcaccctggtactgcatgcacgcaatgctagctgcccctttcccgtcctgggcaccccgagtctcccccgaccccgggtcccaggtatgctcccacctccacctgccccactcaccacctctgctagttccagacacctccacgcccacctggtcctctcccatcgcccacaaaagggggggcacgagggacgagcttagctgagctgggaggagcagggtgagggtgggcgacccaggattccccctccccttcccaaataaagatgagggtactaaagttgtcttggtttttattttattattatttttttctttttccagtatactagcttgtcttttaagaaaggggatattaaaaaaaaaaaaagacaaaagtgtttttaaaaaaaagcaacacccacacctgtgtctgtatatagtcagcttatctcgtgttcaatcgtctgatctctacagagagaagtggaaaatgctgtatcaagggtgggcttagctgtgcctttccaataaagatgtgagaagcttcaaaaaaaaaaggcgccgctcgcgatctagaactag

SEQ ID NO: 313978 - DNA, 1345 bp, Homo sapiens
aatcggaacaaacttaggctaggtacgaggctggggtgcggcggcggccccgggagctgccgatcggcgccgggacaaaggcgcggccgcccggcgcccccagcagcccgagccggggcgcacagccggggcgcagcccgcgccccccgccgcgattgacatgatgtttccacaaagcaggcattcgggctcctcgcacctaccccagcaactcaaattcaccacctcggactcctgcgaccgcatcaaagacgaatttcagctactgcaagctcagtaccacagcctcaagctcgaatgtgacaagttggccagtgagaagtcagagatgcagcgtcactatgtgatgtactacgagatgtcctacggcttgaacatcgagatgcacaaacaggctgagatcgtcaaaaggctgaacgggatttgtgcccaggtcctgccctacctctcccaagagcaccagcagcaggtcttgggagccattgagagggccaagcaggtcaccgctcccgagctgaactctatcatccgacagcagctccaagcccaccagctgtcccagctgcaggccctggccctgcccttgaccccactacccgtggggctgcagccgccttcgctgccggcggtcagcgcaggcaccggcctcctctcgctgtccgcgctgggttcccaggcccacctctccaaggaagacaagaacgggcacgatggtgacacccaccaggaggatgatggcgagaagtcggattagcagggggccgggacggggaggttgggaggggggacagaggggagacagaggcacggagagaaaggaatgtttagcacaagacacagcggagctcgggattggctaaactcccatagtatttatggtggccgccggcgggggccccagcccagcttgcaggccacctctagctttcttcctaccccattcccggcttccctcctcctcccctgcagcctggttaggtggatacctgccctgacatgtgaggcaagctaaggcctggagggtcagatgggagaccaggtcccaagggagcaagacctcgcgaagcgcagcagccccggcccttcccccgttttgaacatgtgtaaccgacagtctgcctggctgccccactcaccacctctgctagttccagacacctccacgcccacctggtcctctcccatcgcccacaaaagggggggcacgagggacgagcttagctgagctgggaggagcagggtgagggtgggcgacccaggggcgcaggaagcgggcgaggccgggcgcgggaggcggcggcggccccgggagctgccgatcggcgccgggacaaaggcgcggccg

SEQ ID NO: 313979 - DNA, 1119 bp, Homo sapiens
aatcggaacaaacttaggctaggtacgaggctggggtgcggcggcggccccgggagctgccgatcggcgccgggacaaaggcgcggccgcccggcgcccccagcagcccgagccggggcgcacagccggggcgcagcccgcgccccccgccgcgattgacatgatgtttccacaaagcaggcattcgggctcctcgcacctaccccagcaactcaaattcaccacctcggactcctgcgaccgcatcaaagacgaatttcagctactgcaagctcagtaccacagcctcaagctcgaatgtgacaagttggccagtgagaagtcagagatgcagcgtcactatgtgatgtactacgagatgtcctacggcttgaacatcgagatgcacaaacaggctgagatcgtcaaaaggctgaacgggatttgtgcccaggtcctgccctacctctcccaagagcaccagcagcaggtcttgggagccattgagagggccaagcaggtcaccgctcccgagctgaactctatcatccgacagcagctccaagcccaccagctgtcccagctgcaggccctggccctgcccttgaccccactacccgtggggctgcagccgccttcgctgccggcggtcagcgcaggcaccggcctcctctcgctgtccgcgctgggttcccaggcccacctctccaaggaagacaagaacgggcacgatggtgacacccaccaggaggatgatggcgagaagtcggattagcagggggccgggacggggaggttgggaggggggacagaggggagacagaggcacggagagaaaggaatgtttagcacaagacacagcggagctcgggattggctaaactcccatagtatttatggtggccgccggcgggggccccagcccagcttgcaggccacctctagctttcttcctaccccattcccggcttccctcctcctcccctgcagcctggttaggtggatacctgccctgacatgtgaggcaagctaaggcctggagggtcagatgggagaccaggtcccaagggagcaagacctcgcgaagcgcagcagccccggcccaccctgggaagattacagggatcctcatagaacagc

SEQ ID NO: 313980 - DNA, 1819 bp, Homo sapiens
  misc_feature (140)..(140): n is a, c, g, or t
  misc_feature (201)..(201): n is a, c, g, or t
  misc_feature (411)..(411): n is a, c, g, or t
  misc_feature (413)..(413): n is a, c, g, or t
aggatcacgatgtccgtgctccagcgcggggcgggggggggacaagtgagccaggcaagaagaatggattggccctagagtacgggttctccaaatgtaacctcggccctacagatctctgagactatgtcagggggttngtgagattttataacaaaattaagatgttagtacaatatcgtgtttcgccgccgggcgcgnttgacatgatgtttccacaaagcaggcattcgggctcctcgcacctaccccagcaactcaaattcaccacctcggactcctgcgaccgcatcaaagacgaatttcagctactgcaagctcagtaccacagcctcaagctcgaatgtgacaagttggccagtgagaagtcagagatgcagcgtcactatgtgatgtactacgagattcctncngcttgaacatcgagatgcacaaacaggctgagatcgtcaaaaggctgaacgcggcggcggccccgggagctgccgatcggcgccgggacaaaggcgcggccgcccggcgcccccagcagcccgagccggggcgcacagccggggcgcagcccgcgccccccgccgcgattgacatgatgtttccacaaagcaggcattcgggctcctcgcacctaccccagcaactcaaattcaccacctcggactcctgcgaccgcatcaaagacgaatttcagctactgcaagctcagtaccacagcctcaagctcgaatgtgacaagttggccagtgagaagtcagagatgcagcgtcactatgtgatgtactacgagatgtcctacggcttgaacatcgagatgcacaaacaggctgagatcgtcaaaaggctgaacgggatttgtgcccaggtcctgccctacctctcccaagagcaccagcagcaggtcttgggagccattgagagggccaagcaggcacggagagaaaggaatgtttagcacaagacacagcggagctcgggattggctaaactcccatagtatttatggtggccgccggcgggggccccagcccagcttgcaggccacctctagctttcttcctaccccattcccggcttccctcctcctcccctgcagcctggttaggtggatacctgccctgacatgtgaggcaagctaaggcctggagggtcagatgggagaccaggtcccaagggagcaagacctcgcgaagcgcagcagccccggcccttcccccgttttgaacatgtgtaaccgacagtctgcctgggccacagccctctcaccctggtactgcatgcacgcaatgctagctgcccctttcccgtcctgggcaccccgagtctcccccgaccccgggtcccaggtatgctcccacctccacctgccccactcaccacctctgctagttccagacacctccacgcccacctggtcctctcccatcgcccacaaaagggggggcacgagggacgagcttagctgagctgggaggagcagggtgagggtgggcgacccaggattccccctccccttcccaaataaagatgagggtactaaagttgtcttggtttttattttattattatttttttctttttccagtatactagcttgtcttttaagaaaggggatattaaaaaaaaaaaaagacaaaagtgtttttaaaaaaaagcaacacccacacctgtgtctgtatatagtcagcttatctcgtgttcaatcgtctgatctctacagagagaagtggaaaatgctgtatcaagggtgggcttagctgtgcctttccaataaagatgtgagaagcttcaaaaaaaaaaggcgccgctcgcgatctagaactag

SEQ ID NO: 313981 - DNA, 1431 bp, Homo sapiens
  misc_feature (140)..(140): n is a, c, g, or t
  misc_feature (201)..(201): n is a, c, g, or t
  misc_feature (411)..(411): n is a, c, g, or t
  misc_feature (413)..(413): n is a, c, g, or t
aggatcacgatgtccgtgctccagcgcggggcgggggggggacaagtgagccaggcaagaagaatggattggccctagagtacgggttctccaaatgtaacctcggccctacagatctctgagactatgtcagggggttngtgagattttataacaaaattaagatgttagtacaatatcgtgtttcgccgccgggcgcgnttgacatgatgtttccacaaagcaggcattcgggctcctcgcacctaccccagcaactcaaattcaccacctcggactcctgcgaccgcatcaaagacgaatttcagctactgcaagctcagtaccacagcctcaagctcgaatgtgacaagttggccagtgagaagtcagagatgcagcgtcactatgtgatgtactacgagattcctncngcttgaacatcgagatgcacaaacaggctgagatcgtcaaaaggctgaacgcggcggcggccccgggagctgccgatcggcgccgggacaaaggcgcggccgcccggcgcccccagcagcccgagccggggcgcacagccggggcgcagcccgcgccccccgccgcgattgacatgatgtttccacaaagcaggcattcgggccgccggcgggggccccagcccagcttgcaggccacctctagctttcttcctaccccattcccggcttccctcctcctcccctgcagcctggttaggtggatacctgccctgacatgtgaggcaagctaaggcctggagggtcagatgggagaccaggtcccaagggagcaagacctcgcgaagcgcagcagccccggcccttcccccgttttgaacatgtgtaaccgacagtctgcctgggccacagccctctcaccctggtactgcatgcacgcaatgctagctgcccctttcccgtcctgggcaccccgagtctcccccgaccccgggtcccaggtatgctcccacctccacctgccccactcaccacctctgctagttccagacacctccacgcccacctggtcctctcccatcgcccacaaaagggggggcacgagggacgagcttagctgagctgggaggagcagggtgagggtgggcgacccaggattccccctccccttcccaaataaagatgagggtactaaagttgtcttggtttttattttattattatttttttctttttccagtatactagcttgtcttttaagaaaggggatattaaaaaaaaaaaaagacaaaagtgtttttaaaaaaaagcaacacccacacctgtgtctgtatatagtcagcttatctcgtgttcaatcgtctgatctctacagagagaagtggaaaatgctgtatcaagggtgggcttagctgtgcctttccaataaagatgtgagaagcttcaaaaaaaaaaggcgccgctcgcgatctagaactag

SEQ ID NO: 313982 - DNA, 1574 bp, Homo sapiens
  misc_feature (140)..(140): n is a, c, g, or t
  misc_feature (201)..(201): n is a, c, g, or t
  misc_feature (411)..(411): n is a, c, g, or t
  misc_feature (413)..(413): n is a, c, g, or t
aggatcacgatgtccgtgctccagcgcggggcgggggggggacaagtgagccaggcaagaagaatggattggccctagagtacgggttctccaaatgtaacctcggccctacagatctctgagactatgtcagggggttngtgagattttataacaaaattaagatgttagtacaatatcgtgtttcgccgccgggcgcgnttgacatgatgtttccacaaagcaggcattcgggctcctcgcacctaccccagcaactcaaattcaccacctcggactcctgcgaccgcatcaaagacgaatttcagctactgcaagctcagtaccacagcctcaagctcgaatgtgacaagttggccagtgagaagtcagagatgcagcgtcactatgtgatgtactacgagattcctncngcttgaacatcgagatgcacaaacaggctgagatcgtcaaaaggctgaacgcggcggcggccccgggagctgccgatcggcgccgggacaaaggcgcggccgcccggcgcccccagcagcccgagccggggcgcacagccggggcgcagcccgcgccccccgccgcgattgacatgatgtttccacaaagcaggcattcgggctcctcgcacctaccccagcaactcaaattcaccacctcggactcctgcgaccgcatcaaagacgaatttcagctactgcaagctcagtaccacagcctcaagctcgaatgtgacaagttggccagtgagaagtcagagatgcagcgtcactatgtgatgtactacgagatgtcctacggcttgaacatcgagatgcacaaacaggctgagatcgtcaaaaggctgaacgggatttgtgcccaggtcctgccctgacatgtgaggcaagctaaggcctggagggtcagatgggagaccaggtcccaagggagcaagacctcgcgaagcgcagcagccccggcccttcccccgttttgaacatgtgtaaccgacagtctgcctgggccacagccctctcaccctggtactgcatgcacgcaatgctagctgcccctttcccgtcctgggcaccccgagtctcccccgaccccgggtcccaggtatgctcccacctccacctgccccactcaccacctctgctagttccagacacctccacgcccacctggtcctctcccatcgcccacaaaagggggggcacgagggacgagcttagctgagctgggaggagcagggtgagggtgggcgacccaggattccccctccccttcccaaataaagatgagggtactaaagttgtcttggtttttattttattattatttttttctttttccagtatactagcttgtcttttaagaaaggggatattaaaaaaaaaaaaagacaaaagtgtttttaaaaaaaagcaacacccacacctgtgtctgtatatagtcagcttatctcgtgttcaatcgtctgatctctacagagagaagtggaaaatgctgtatcaagggtgggcttagctgtgcctttccaataaagatgtgagaagcttcaaaaaaaaaaggcgccgctcgcgatctagaactag

SEQ ID NO: 313983 - DNA, 1395 bp, Homo sapiens
  misc_feature (140)..(140): n is a, c, g, or t
  misc_feature (201)..(201): n is a, c, g, or t
  misc_feature (411)..(411): n is a, c, g, or t
  misc_feature (413)..(413): n is a, c, g, or t
aggatcacgatgtccgtgctccagcgcggggcgggggggggacaagtgagccaggcaagaagaatggattggccctagagtacgggttctccaaatgtaacctcggccctacagatctctgagactatgtcagggggttngtgagattttataacaaaattaagatgttagtacaatatcgtgtttcgccgccgggcgcgnttgacatgatgtttccacaaagcaggcattcgggctcctcgcacctaccccagcaactcaaattcaccacctcggactcctgcgaccgcatcaaagacgaatttcagctactgcaagctcagtaccacagcctcaagctcgaatgtgacaagttggccagtgagaagtcagagatgcagcgtcactatgtgatgtactacgagattcctncngcttgaacatcgagatgcacaaacaggctgagatcgtcaaaaggctgaacgcggcggcggccccgggagctgccgatcggcgccgggacaaaggcgcggccgcccggcgcccccagcagcccgagccggggcgcacagccggggcgcagcccgcgccccccgccgcgattgacatgatgtttccacaaagcaggcattcgggctcctcgcacctaccccagcaactcaaattcaccacctcggactcctgcgaccgcatcaaagacgaatttcagctactgcaagctcagtaccacagcctcaagctcgaatgtgacaagttggccagtgagaagtcagagatgcagcgtcactatgtgatgtactacgagatgtcctacggcttgaacatcgagatgcacaaacaggccacagccctctcaccctggtactgcatgcacgcaatgctagctgcccctttcccgtcctgggcaccccgagtctcccccgaccccgggtcccaggtatgctcccacctccacctgccccactcaccacctctgctagttccagacacctccacgcccacctggtcctctcccatcgcccacaaaagggggggcacgagggacgagcttagctgagctgggaggagcagggtgagggtgggcgacccaggattccccctccccttcccaaataaagatgagggtactaaagttgtcttggtttttattttattattatttttttctttttccagtatactagcttgtcttttaagaaaggggatattaaaaaaaaaaaaagacaaaagtgtttttaaaaaaaagcaacacccacacctgtgtctgtatatagtcagcttatctcgtgttcaatcgtctgatctctacagagagaagtggaaaatgctgtatcaagggtgggcttagctgtgcctttccaataaagatgtgagaagcttcaaaaaaaaaaggcgccgctcgcgatctagaactag

SEQ ID NO: 313984 - DNA, 1115 bp, Homo sapiens
  misc_feature (140)..(140): n is a, c, g, or t
  misc_feature (201)..(201): n is a, c, g, or t
  misc_feature (411)..(411): n is a, c, g, or t
  misc_feature (413)..(413): n is a, c, g, or t
aggatcacgatgtccgtgctccagcgcggggcgggggggggacaagtgagccaggcaagaagaatggattggccctagagtacgggttctccaaatgtaacctcggccctacagatctctgagactatgtcagggggttngtgagattttataacaaaattaagatgttagtacaatatcgtgtttcgccgccgggcgcgnttgacatgatgtttccacaaagcaggcattcgggctcctcgcacctaccccagcaactcaaattcaccacctcggactcctgcgaccgcatcaaagacgaatttcagctactgcaagctcagtaccacagcctcaagctcgaatgtgacaagttggccagtgagaagtcagagatgcagcgtcactatgtgatgtactacgagattcctncngcttgaacatcgagatgcacaaacaggctgagatcgtcaaaaggctgaacgcggcggcggccccgggagctgccgatcggcgccgggacaaaggcgcggccgcccggcgcccccagcagcccgagccggggcgcacagccggggcgcagcccgcgccccccgccgcgattgacatgatgtttccacaaagcaggcattcgtctcccccgaccccgggtcccaggtatgctcccacctccacctgccccactcaccacctctgctagttccagacacctccacgcccacctggtcctctcccatcgcccacaaaagggggggcacgagggacgagcttagctgagctgggaggagcagggtgagggtgggcgacccaggattccccctccccttcccaaataaagatgagggtactaaagttgtcttggtttttattttattattatttttttctttttccagtatactagcttgtcttttaagaaaggggatattaaaaaaaaaaaaagacaaaagtgtttttaaaaaaaagcaacacccacacctgtgtctgtatatagtcagcttatctcgtgttcaatcgtctgatctctacagagagaagtggaaaatgctgtatcaagggtgggcttagctgtgcctttccaataaagatgtgagaagcttcaaaaaaaaaaggcgccgctcgcgatctagaactag

SEQ ID NO: 313985 - DNA, 1452 bp, Homo sapiens
  misc_feature (140)..(140): n is a, c, g, or t
  misc_feature (201)..(201): n is a, c, g, or t
  misc_feature (411)..(411): n is a, c, g, or t
  misc_feature (413)..(413): n is a, c, g, or t
aggatcacgatgtccgtgctccagcgcggggcgggggggggacaagtgagccaggcaagaagaatggattggccctagagtacgggttctccaaatgtaacctcggccctacagatctctgagactatgtcagggggttngtgagattttataacaaaattaagatgttagtacaatatcgtgtttcgccgccgggcgcgnttgacatgatgtttccacaaagcaggcattcgggctcctcgcacctaccccagcaactcaaattcaccacctcggactcctgcgaccgcatcaaagacgaatttcagctactgcaagctcagtaccacagcctcaagctcgaatgtgacaagttggccagtgagaagtcagagatgcagcgtcactatgtgatgtactacgagattcctncngcttgaacatcgagatgcacaaacaggctgagatcgtcaaaaggctgaacgcggcggcggccccgggagctgccgatcggcgccgggacaaaggcgcggccgcccggcgcccccagcagcccgagccggggcgcacagccggggcgcagcccgcgccccccgccgcgattgacatgatgtttccacaaagcaggcattcgggctcctcgcacctaccccagcaactcaaattcaccacctcggactcctgcgaccgcatcaaagacgaatttcagctactgcaagctcagtaccacagcctcaagctcgaatgtgacaagttggccagtgagaagtcagagatgcagcgtcactatgtgatgtactacgagatgtcctacggcttgaacatcgagatgcacaaacaggctgagatcgtcaaaaggctgaacgggatttgtgcccaggtcctgccctacctctcccaagaggtaagagccagggccttggggaggggttgtgagggggccccgcacttgcccagcccctgtccactgcagccatcttgggtggtgtgctgggcgccccagggcacacgcctcccctctctggacctccctggctctgaacaccagagccggcctgtgcagaagaatccccgggccagagacactccaggggtgcaggcgtgtggggggcgggcctcaccctgctctggaattcccagctggagtgagtcatgtcataggtagaaatgtcagatgggcctaaactgcaccaggaatgtttttttctcatctctcttcctcctttcaccctcttgagacatcctcctccaggccatgcgggctgcacaggaccaaggactagagggtgttaggggattgtgggggaaggggtagcacagggtggtcacacatggacacagccacacagataggcacgagcacatcaacacacgggagatacacagatgcagacacggatacacgtgtgtgcagacagcacagggacacgcatgcaggaatgtgcagctacacgtgggcacacgtgatcctga

SEQ ID NO: 313986 - DNA, 919 bp, Homo sapiens
  misc_feature (140)..(140): n is a, c, g, or t
  misc_feature (201)..(201): n is a, c, g, or t
  misc_feature (411)..(411): n is a, c, g, or t
  misc_feature (413)..(413): n is a, c, g, or t
aggatcacgatgtccgtgctccagcgcggggcgggggggggacaagtgagccaggcaagaagaatggattggccctagagtacgggttctccaaatgtaacctcggccctacagatctctgagactatgtcagggggttngtgagattttataacaaaattaagatgttagtacaatatcgtgtttcgccgccgggcgcgnttgacatgatgtttccacaaagcaggcattcgggctcctcgcacctaccccagcaactcaaattcaccacctcggactcctgcgaccgcatcaaagacgaatttcagctactgcaagctcagtaccacagcctcaagctcgaatgtgacaagttggccagtgagaagtcagagatgcagcgtcactatgtgatgtactacgagattcctncngcttgaacatcgagatgcacaaacaggctgagatcgtcaaaaggctgaacgcggcggcggccccgggagctgccgatcggcgccgggacaaaggcgcggccgcccggcgcccccagcagcccgagccggggcgcacagccggggcgcagcccgcgccccccgccgcgattgacatgatgtttccacaaagcaggcattcgggctcctcgcacctaccccagcaactcaaattcaccacctcggactcctgcgaccgcatcaaagacgaatttcagctactgcaagctcagtaccacaggtgagctgggggactgggggtccctgcgtcccgagaatgtgagtccccccatttcttctgcgcagatggcaaggctgaggcctggagattgggaaaataatatatgctagactctgacctaatcacttgacaaatactgaattcatttattttaaacagccccattttgtagaggagaaaaccgaggcacaaaaatagttaaataatt

SEQ ID NO: 313987 - DNA, 4140 bp, Homo sapiens
atgttacgacgctaccgccctgacatcaccagttgccatggtagcaccgccgagagtaaaggaggggtggtgctagacgtttcgggcagagctcggccgctgcggaggacaaggaactctccctctcccactagtctgacttcttccaaaatgagcggcctggatgggggcaacaagctccctctcgcccaaaccggcggcctggctgctcccgaccatgcctcaggagatccggacctagaccagtgccaagggctccgtgaagaaaccgaggcgacacaggtgatggcgaacacaggtgggggcagcctggagaccgttgcggaggggggtgcatcccaggatcctgtcgactgtggccccgcgctccgcgtcccagttgccgggagtcgcggcggtgcagcgaccaaagccgggcaggaggatgctccaccttctacgaaaggtctggaagcagcctctgccgccgaggctgctgacagcagccagaaaaatggctgtcagcttggagagccccgtggccctgctgggcagaaggctctagaagcctgtggcgcagggggcttggggtctcagatgataccggggaagaaggccaaggaagtgacgactaaaaaacgcgccatctcggcagcagtggaaaaggagggagaagcaggggcggcgatggaggaaaagaaggtagtgcagaaggaaaaaaaggtggcaggaggggtgaaagaggagacacggcccagggccccgaagatcaataactgcatggactcactggaggccatcgatcaagagttgtcaaacgtaaatgcccaggctgacagggccttccttcagcttgagcgcaagtttggccgcatgcgaaggctccacatgcagcgcagaagtttcattatccagaatatcccaggtttctgggttactgcctttcgaaaccacccccagctgtcacctatgatcagtggccaagatgaagacatgctgaggtacatgatcaatttggaggtggaggagcttaaacaccccagagcaggctgcaaattcaagttcatctttcagggcaacccctacttccgaaatgaggggcttgtcaaggaatatgaacgcagatcctctggccgggtggtgtctctttccactccaatccgctggcaccgaggccaagacccccaggctcatatccacagaaaccgggaagggaacactatccctagtttcttcaactggttttcagaccacagccttctagaattcgacagaattgcagagattatcaaaggagaactgtggcccaatcccctacaatactacctgatgggtgaagggccccgtagaggaattcgaggcccaccaaggcagccagtggagagcgccagatccttcaggttccagtctggctaatctctgtcctgtgagaagcttctgcacaagtttccttaccacctcctcttggacctatgcttggccaacagcatgcagtcttccatctgctttctcttcatactgtggattatcttttcctttggttctaaatcttcagtaatcggttgcaagattgttggcttacctgcctgtgccattcttcctctgggccttcatgcttttctgcattgtgttaacatgtttcaagtgcatggccttctacggcttctatgccaagcgtatgatactatagatatagtgtaccatactgcctttctttgcatggcttggaccctatctgtgaccatgctcttctcccaatttaagtggttctgtaccacaaagaatcttgatacattttcacaaataactgattgggcttcatactttatgctggctgtgtcctgatacccatgtacttatggtaagctatttgggtattaccactgcaagacaaaactgatatcttaacccggccatcaacccaaattggacattccagactaccaccaactggatcccagctgccttcctgggcttgtgccatccaccctactggttatctgatagaacaagctggtggctgatgggtgactgctaggcgtgactgaggtaatagatgaaaagtgttctatgttatcacattggttttcctgtacctttggttactctacgtcatgaccagctgctggtgagtatgaagcctgtgctatagcccacccctactcactctcaccttctggttgaactttgcttaggccaccattgtctgcctcatcaggaactatctgtagacgtagctcccagggagctcacagcaacaccccctaccaccaggatgggcagtaatatgtgacagagcccaaagcaaggctggaacgcagtcccttccagcttagtctttctgactcctagccaacaaaccatccttaatgtgagcaacttctttaggcatttcctcttttccccgcctgcacccactctgaacatgacaaaagttgccagagttggggcattgaggaagagatatttctggaatgtgagacttgttatgcctctgtctctttctctccctcctcctcccctctccctccccctctccctcccatcccttttcttccctttcactctgaagcagttttagcttattaacagaaaacaaaactggcaaagcaggctttttgtttaatttgctctttccctgattgtgttcagagagaaaggttatgattaaatgggctccagatctcttattgcccttattcctccaccccacttcttttagcaaggtctgaaagtttcaaagggagacctataggttaattgtttagttataggcagtgttaaattaggcagattttgacatatttatctttttaccccatccattctaccaaaacctgtgtatttcttgagtttttagtttgagaagctggaaagagagagaagggcctcacagtgatgggttcaggacgggtcaaaggcaaaggcctttgtgatgtgagcaaaggcaaccgactgcttctagggtagcattttgtaggtcactcttctcctttgtactattttgtttctgccctgatgtcccttgggtctccatcctactgcctggctttcttggccctcatttctcagcttctgcatttccttccctgctcctaacaaatgaagaagcaggctgcagcctgcattgtggaagatctccagcctccttgtaggggataaggggatgtgcagcatctgtgtggattttcacggacaagttccagtaggtgggacagtgatgccgtcaaggcttagttatgatcatgtgtggtgataaagaccatccaccatcacccttttcccctttggttttgaaggccttgccctaagctacctgagggtttaggaggtctgaacacacacagtggagaggttaatctaggttgggaaactgagtaaaagtccagagcaggaatgagcctgctgtggcgtgggtttggaaaggctcacaggaaagaacctgcaggatcaggggtgggaggggaggcccctgaggtgctctccagggaagaggggctggggtttaaatagcatgcttggaggaagattttccttcaatttttcctaagtccttgaattcaccagtagatttttgtaaacaaaatgtaagtcgatgttttctctcaattatcctaggagtgacctttatatgtgtggaagattaatggtatatgctccttatgtcactgtttttgagtaaaatccatttcctttctctgtttcagcctatgacaaaattgatgtttacaggcctgctttttgcttataattgacaacatgtgcaaaaataccaaatttgtgtcctgtgcagtatgaagaattcagtgaatattcattaatgtattagcttgttttgctctctgttcatatatggctctattcttagaaatataatttgaatgtgatctttcaatagtctgaatattttacaaattatagctatgtcttgtgaaaataacctcaaaaagaaaaatacgactctgttgtcttacttgatatttcttgccctagtaatgtacttgacatttatgttcctaagcagtgtaagtaccagtagaatttctctgtcaaactcaatgatcatttagtacttttgtcttctcccatgtgcttgaaggaaaaataaagtgtcactaccgtatttcttgttttcatcaaaaaataaaaataatttaaaaa

SEQ ID NO: 313988 - DNA, 4141 bp, Homo sapiens
atgttacgacgctaccgccctgacatcaccagttgccatggtagcaccgccgagagtaaaggaggggtggtgctagacgtttcgggcagagctcggccgctgcggaggacaaggaactctccctctcccactagtctgacttcttccaaaatgagcggcctggatgggggcaacaagctccctctcgcccaaaccggcggcctggctgctcccgaccatgcctcaggagatccggacctagaccagtgccaagggctccgtgaagaaaccgaggcgacacaggtgatggcgaacacaggtgggggcagcctggagaccgttgcggaggggggtgcatcccaggatcctgtcgactgtggccccgcgctccgcgtcccagttgccgggagtcgcggcggtgcagcgaccaaagccgggcaggaggatgctccaccttctacgaaaggtctggaagcagcctctgccgccgaggctgctgacagcagccagaaaaatggctgtcagcttggagagccccgtggccctgctgggcagaaggctctagaagcctgtggcgcagggggcttggggtctcagatgataccggggaagaaggccaaggaagtgacgactaaaaaacgcgccatctcggcagcagtggaaaaggagggagaagcaggggcggcgatggaggaaaagaaggtagtgcagaaggaaaaaaaggtggcaggaggggtgaaagaggagacacggcccagggccccgaagatcaataactgcatggactcactggaggccatcgatcaagagttgtcaaacgtaaatgcccaggctgacagggccttccttcagcttgagcgcaagtttggccgcatgcgaaggctccacatgcagcgcagaagtttcattatccagaatatcccaggtttctgggttactgcctttcgaaaccacccccagctgtcacctatgatcagtggccaagatgaagacatgctgaggtacatgatcaatttggaggtggaggagcttaaacaccccagagcaggctgcaaattcaagttcatctttcagggcaacccctacttccgaaatgaggggcttgtcaaggaatatgaacgcagatcctctggccgggtggtgtctctttccactccaatccgctggcaccgaggccaagacccccaggctcatatccacagaaaccgggaagggaacactatccctagtttcttcaactggttttcagaccacagccttctagaattcgacagaattgcagagattatcaaaggagaactgtggcccaatcccctacaatactacctgatgggtgaagggccccgtagaggaattcgaggcccaccaaggcagccagtggagagcgccagatccttcaggttccagtctggctaatctctgtcctgtgagaagcttctgcacaagtttccttaccacctcctcttggacctatgcttggccaacagcatgcagtcttccatctgctttctcttcatactgtggattatcttttcctttggttctaaatcttcagtaatcggttgcaagattgttggcttacctgcctgtgccattcttcctctgggccttcatgcttttctgcattgtgttaacatgtttcaagtgcatggccttctacggcttctatgccaagcgtatgatactatagatatagtgtaccatactgcctttctttgcatggcttggaccctatctgtgaccatgctcttctcccaatttaagtggttctgtaccacaaagaatcttgatacattttcacaaataactgattgggcttcatactttatgctggctgtgtcctgatacccatgtacttatggtaagctatttgggtattaccactgcaagacaaaactgatatcttaacccggccatcaacccaaattggacattccagactaccaccaactggatcccagctgccttcctgggcttgtgccatccaccctactggttatctgatagaacaagctggtggctgatgggtgactgctaggcgtgactgaggtaatagatgtcatgaccagctgctggtgagtatgaagcctgtgctatagcccacccctactcactctcaccttctggttgaactttgcttaggccaccattgtctgcctcatcaggaactatctgtagacgtagctcccagggagctcacagcaacaccccctaccaccaggatgggcagtaatatgtgacagagcccaaagcaaggctggaacgcagtcccttccagcttagtctttctgactcctagccaacaaaccatccttaatgtgagcaacttctttaggcatttcctcttttccccgcctgcacccactctgaacatgacaaaagttgccagagttggggcattgaggaagagatatttctggaatgtgagacttgttatgcctctgtctctttctctccctcctcctcccctctccctccccctctccctcccatcccttttcttccctttcactctgaagcagttttagcttattaacagaaaacaaaactggcaaagcaggctttttgtttaatttgctctttccctgattgtgttcagagagaaaggttatgattaaatgggctccagatctcttattgcccttattcctccaccccacttcttttagcaaggtctgaaagtttcaaagggagacctataggttaattgtttagttataggcagtgttaaattaggcagattttgacatatttatctttttaccccatccattctaccaaaacctgtgtatttcttgagtttttagtttgagaagctggaaagagagagaagggcctcacagtgatgggttcaggacgggtcaaaggcaaaggcctttgtgatgtgagcaaaggcaaccaaaacttagcctcactccacttttctaaagatggaaattcttttttgggccttggactgcttctagggtagcattttgtaggtcactcttctcctttgtactattttgtttctgccctgatgtcccttgggtctccatcctactgcctggctttcttggccctcatttctcagcttctgcatttccttccctgctcctaacaaatgaagaagcaggctgcagcctgcattgtggaagatctccagcctccttgtaggggataaggggatgtgcagcatctgtgtggattttcacggacaagttccagtaggtgggacagtgatgccgtcaaggcttagttatgatcatgtgtggtgataaagaccatccaccatcacccttttcccctttggttttgaaggccttgccctaagctacctgagggtttaggaggtctgaacacacacagtggagaggttaatctaggttgggaaactgagtaaaagtccagagcaggaatgagcctgctgtggcgtgggtttggaaaggctcacaggaaagaacctgcaggatcaggggtgggaggggaggcccctgaggtgctctccagggaagaggggctggggtttaaatagcatgcttggaggaagattttccttcaatttttcctaagtccttgaattcaccagtagatttttgtaaacaaaatgtaagtcgatgttttctctcaattatcctaggagtgacctttatatgtgtggaagattaatggtatatgctccttatgtcactgtttttgagtaaaatccatttcctttctctgtttcagcctatgacaaaattgatgtttacaggcctgctttttgcttataattgacaacatgtgcaaaaataccaaatttgtgtcctgtgcagtatgaagaattcagtgaatattcattaatgtattagcttgttttgctctctgttcatatatggctctattcttagaaatataatttgaatgtgatctttcaatagtctgaatattttacaaattatagctatgtcttgtgaaaataacctcaaaaagaaaaatacgactctgttgtcttacttgatatttcttgccctagtaatgtacttgacatttatgttcctaagcagtgtaagtaccagtagaatttctctgtcaaactcaatgatcatttagtacttttgtcttctcccatgtgcttgaaggaaaaataaagtgtcactaccgtatttcttgttttcatcaaaaaataaaaataatttaaaaa

SEQ ID NO: 313989 - DNA, 4194 bp, Homo sapiens
atgttacgacgctaccgccctgacatcaccagttgccatggtagcaccgccgagagtaaaggaggggtggtgctagacgtttcgggcagagctcggccgctgcggaggacaaggaactctccctctcccactagtctgacttcttccaaaatgagcggcctggatgggggcaacaagctccctctcgcccaaaccggcggcctggctgctcccgaccatgcctcaggagatccggacctagaccagtgccaagggctccgtgaagaaaccgaggcgacacaggtgatggcgaacacaggtgggggcagcctggagaccgttgcggaggggggtgcatcccaggatcctgtcgactgtggccccgcgctccgcgtcccagttgccgggagtcgcggcggtgcagcgaccaaagccgggcaggaggatgctccaccttctacgaaaggtctggaagcagcctctgccgccgaggctgctgacagcagccagaaaaatggctgtcagcttggagagccccgtggccctgctgggcagaaggctctagaagcctgtggcgcagggggcttggggtctcagatgataccggggaagaaggccaaggaagtgacgactaaaaaacgcgccatctcggcagcagtggaaaaggagggagaagcaggggcggcgatggaggaaaagaaggtagtgcagaaggaaaaaaaggtggcaggaggggtgaaagaggagacacggcccagggccccgaagatcaataactgcatggactcactggaggccatcgatcaagagttgtcaaacgtaaatgcccaggctgacagggccttccttcagcttgagcgcaagtttggccgcatgcgaaggctccacatgcagcgcagaagtttcattatccagaatatcccaggtttctgggttactgcctttcgaaaccacccccagctgtcacctatgatcagtggccaagatgaagacatgctgaggtacatgatcaatttggaggtggaggagcttaaacaccccagagcaggctgcaaattcaagttcatctttcagggcaacccctacttccgaaatgaggggcttgtcaaggaatatgaacgcagatcctctggccgggtggtgtctctttccactccaatccgctggcaccgaggccaagacccccaggctcatatccacagaaaccgggaagggaacactatccctagtttcttcaactggttttcagaccacagccttctagaattcgacagaattgcagagattatcaaaggagaactgtggcccaatcccctacaatactacctgatgggtgaagggccccgtagaggaattcgaggcccaccaaggcagccagtggagagcgccagatccttcaggttccagtctggctaatctctgtcctgtgagaagcttctgcacaagtttccttaccacctcctcttggacctatgcttggccaacagcatgcagtcttccatctgctttctcttcatactgtggattatcttttcctttggttctaaatcttcagtaatcggttgcaagattgttggcttacctgcctgtgccattcttcctctgggccttcatgcttttctgcattgtgttaacatgtttcaagtgcatggccttctacggcttctatgccaagcgtatgatactatagatatagtgtaccatactgcctttctttgcatggcttggaccctatctgtgaccatgctcttctcccaatttaagtggttctgtaccacaaagaatcttgatacattttcacaaataactgattgggcttcatactttatgctggctgtgtcctgatacccatgtacttatggtaagctatttgggtattaccactgcaagacaaaactgatatcttaacccggccatcaacccaaattggacattccagactaccaccaactggatcccagctgccttcctgggcttgtgccatccaccctactggttatctgatagaacaagctggtggctgatgggtgactgctaggcgtgactgaggtaatagatgaaaagtgttctatgttatcacattggttttcctgtacctttggttactctacgtcatgaccagctgctggtgagtatgaagcctgtgctatagcccacccctactcactctcaccttctggttgaactttgcttaggccaccattgtctgcctcatcaggaactatctgtagacgtagctcccagggagctcacagcaacaccccctaccaccaggatgggcagtaatatgtgacagagcccaaagcaaggctggaacgcagtcccttccagcttagtctttctgactcctagccaacaaaccatccttaatgtgagcaacttctttaggcatttcctcttttccccgcctgcacccactctgaacatgacaaaagttgccagagttggggcattgaggaagagatatttctggaatgtgagacttgttatgcctctgtctctttctctccctcctcctcccctctccctccccctctccctcccatcccttttcttccctttcactctgaagcagttttagcttattaacagaaaacaaaactggcaaagcaggctttttgtttaatttgctctttccctgattgtgttcagagagaaaggttatgattaaatgggctccagatctcttattgcccttattcctccaccccacttcttttagcaaggtctgaaagtttcaaagggagacctataggttaattgtttagttataggcagtgttaaattaggcagattttgacatatttatctttttaccccatccattctaccaaaacctgtgtatttcttgagtttttagtttgagaagctggaaagagagagaagggcctcacagtgatgggttcaggacgggtcaaaggcaaaggcctttgtgatgtgagcaaaggcaaccaaaacttagcctcactccacttttctaaagatggaaattcttttttgggccttggactgcttctagggtagcattttgtaggtcactcttctcctttgtactattttgtttctgccctgatgtcccttgggtctccatcctactgcctggctttcttggccctcatttctcagcttctgcatttccttccctgctcctaacaaatgaagaagcaggctgcagcctgcattgtggaagatctccagcctccttgtaggggataaggggatgtgcagcatctgtgtggattttcacggacaagttccagtaggtgggacagtgatgccgtcaaggcttagttatgatcatgtgtggtgataaagaccatccaccatcacccttttcccctttggttttgaaggccttgccctaagctacctgagggtttaggaggtctgaacacacacagtggagaggttaatctaggttgggaaactgagtaaaagtccagagcaggaatgagcctgctgtggcgtgggtttggaaaggctcacaggaaagaacctgcaggatcaggggtgggaggggaggcccctgaggtgctctccagggaagaggggctggggtttaaatagcatgcttggaggaagattttccttcaatttttcctaagtccttgaattcaccagtagatttttgtaaacaaaatgtaagtcgatgttttctctcaattatcctaggagtgacctttatatgtgtggaagattaatggtatatgctccttatgtcactgtttttgagtaaaatccatttcctttctctgtttcagcctatgacaaaattgatgtttacaggcctgctttttgcttataattgacaacatgtgcaaaaataccaaatttgtgtcctgtgcagtatgaagaattcagtgaatattcattaatgtattagcttgttttgctctctgttcatatatggctctattcttagaaatataatttgaatgtgatctttcaatagtctgaatattttacaaattatagctatgtcttgtgaaaataacctcaaaaagaaaaatacgactctgttgtcttacttgatatttcttgccctagtaatgtacttgacatttatgttcctaagcagtgtaagtaccagtagaatttctctgtcaaactcaatgatcatttagtacttttgtcttctcccatgtgcttgaaggaaaaataaagtgtcactaccgtatttcttgttttcatcaaaaaataaaaataatttaaaaa

SEQ ID NO: 313990 - DNA, 2577 bp, Homo sapiens
atgttacgacgctaccgccctgacatcaccagttgccatggtagcaccgccgagagtaaaggaggggtggtgctagacgtttcgggcagagctcggccgctgcggaggacaaggaactctccctctcccactagtctgacttcttccaaaatgagcggcctggatgggggcaacaagctccctctcgcccaaaccggcggcctggctgctcccgaccatgcctcaggagatccggacctagaccagtgccaagggctccgtgaagaaaccgaggcgacacaggtgatggcgaacacaggtgggggcagcctggagaccgttgcggaggggggtgcatcccaggatcctgtcgactgtggccccgcgctccgcgtcccagttgccgggagtcgcggcggtgcagcgaccaaagccgggcaggaggatgctccaccttctacgaaaggtctggaagcagcctctgccgccgaggctgctgacagcagccagaaaaatggctgtcagcttggagagccccgtggccctgctgggcagaaggctctagaagcctgtggcgcagggggcttggggtctcagatgataccggggaagaaggccaaggaagtgacgactaaaaaacgcgccatctcggcagcagtggaaaaggagggagaagcaggggcggcgatggaggaaaagaaggtagtgcagaaggaaaaaaaggtggcaggaggggtgaaagaggagacacggcccagggccccgaagatcaataactgcatggactcactggaggccatcgatcaagagttgtcaaacgtaaatgcccaggctgacagggccttccttcagcttgagcgcaagtttggccgcatgcgaaggctccacatgcagcgcagaagtttcattatccagaatatcccaggtttctgggttactgcctttcactctgaagcagttttagcttattaacagaaaacaaaactggcaaagcaggctttttgtttaatttgctctttccctgattgtgttcagagagaaaggttatgattaaatgggctccagatctcttattgcccttattcctccaccccacttcttttagcaaggtctgaaagtttcaaagggagacctataggttaattgtttagttataggcagtgttaaattaggcagattttgacatatttatctttttaccccatccattctaccaaaacctgtgtatttcttgagtttttagtttgagaagctggaaagagagagaagggcctcacagtgatgggttcaggacgggtcaaaggcaaaggcctttgtgatgtgagcaaaggcaaccaaaacttagcctcactccacttttctaaagatggaaattcttttttgggccttggactgcttctagggtagcattttgtaggtcactcttctcctttgtactattttgtttctgccctgatgtcccttgggtctccatcctactgcctggctttcttggccctcatttctcagcttctgcatttccttccctgctcctaacaaatgaagaagcaggctgcagcctgcattgtggaagatctccagcctccttgtaggggataaggggatgtgcagcatctgtgtggattttcacggacaagttccagtaggtgggacagtgatgccgtcaaggcttagttatgatcatgtgtggtgataaagaccatccaccatcacccttttcccctttggttttgaaggccttgccctaagctacctgagggtttaggaggtctgaacacacacagtggagaggttaatctaggttgggaaactgagtaaaagtccagagcaggaatgagcctgctgtggcgtgggtttggaaaggctcacaggaaagaacctgcaggatcaggggtgggaggggaggcccctgaggtgctctccagggaagaggggctggggtttaaatagcatgcttggaggaagattttccttcaatttttcctaagtccttgaattcaccagtagatttttgtaaacaaaatgtaagtcgatgttttctctcaattatcctaggagtgacctttatatgtgtggaagattaatggtatatgctccttatgtcactgtttttgagtaaaatccatttcctttctctgtttcagcctatgacaaaattgatgtttacaggcctgctttttgcttataattgacaacatgtgcaaaaataccaaatttgtgtcctgtgcagtatgaagaattcagtgaatattcattaatgtattagcttgttttgctctctgttcatatatggctctattcttagaaatataatttgaatgtgatctttcaatagtctgaatattttacaaattatagctatgtcttgtgaaaataacctcaaaaagaaaaatacgactctgttgtcttacttgatatttcttgccctagtaatgtacttgacatttatgttcctaagcagtgtaagtaccagtagaatttctctgtcaaactcaatgatcatttagtacttttgtcttctcccatgtgcttgaaggaaaaataaagtgtcactaccgtatttcttgttttcatcaaaaaataaaaataatttaaaaa

SEQ ID NO: 313991 - DNA, 4880 bp, Homo sapiens
cgccaccgccgccgccgccgccacagccgccagccgcttcgcgttcggcgggggaggagttggaggcggagaagaaggcggtggtggcgggtggaggttcgagcgctgttctcgctccggagccgctgcacatttcggaatcttctgcggcttgtccatagtgtgaataaaaactaaatcacatctataattctactgaactggtcatacagacgctgccatatatgtcacagtacactgaaaaggagccagcagcaatggaccaagaatctggtaaggctgtctggcccaaaccagcaggagggtatcagacaattacaggcaggagatatggaagaagacatgcttatgtcagttttaaaccatgtatgaccagacatgaaagaagcttaggtcgggctggtgatgactatgaagtgttggaactagatgatgttccaaaggaaaattcctcaggttccagtcctttggatcaagttgattcttctttacccagtgaacctatatttgaaaaaagtgaaacagaaattcccacttgtggttcagcattgaatcaaaccactgagagcagtcaatcctttgttgcagtacatcacagtgaggaaggcagggataccttaggaagcagtacaaatcttcataatcactctgagggagagtatattccaggagcttgtagtgcttcaagtgtccaaaatggaattgcattggttcatacagactcttatgatccagatggcaaacatggagaagataatgaccatcttcaactttctgcagaagtcgtggaaggtagtagataccaggaatcattaggcaatacagtatttgagttggaaaacagagaggcagaggcatacactggtctttcaccaccagttccctcatttaactgtgaagtaagagatgagtttgaagagttagattctgtaccattagtgaaaagttctgctggtgatactgagtttgtccatcagaatagccaggaaattcagaggtcttctcaagatgaaatggttagtacgaaacaacaaaataatactagccaggaaagacagacagaacattcacctgaagatgcagcctgtggtccagggcatatttgtagtgaacgaaataccaatgatagggaaaagaaccatggaagttctcctgaacaggtagtgaggccaaaagttagaaaactgataagttcaagccaggtggaccaagaaacaggttttaataggcatgaggcgaaacaaagaagtgttcaaagatggagagaggctttggaagttgaggaaagtggctcagatgacctcttaataaaatgtgaagaatatgatggagagcatgactgtatgttcttggatccaccatactcaagagttattacacaaagggaaacagaaaataaccaaatgacatcagaaagtggagccacagcgggaaggcaagaagtggataacaccttttggaatggctgtggagattattaccaactctatgacaaagatgaagatagttctgaatgcagtgatggggaatggtctgcttctttgcctcatcgattttctggtacagaaaaagatcaatcctcaagtgatgaaagctgggagactctgccaggaaaagatgagaatgaacctgagctacaaagtgatagcagtggccctgaagaagaaaaccaagaattatctcttcaggaaggggaacagacatccttggaagagggagaaattccttggttacagtacaatgaagtcaatgaaagcagcagtgatgagggaaatgaacctgccaatgaatttgcacagccagctttcatgttggatggtaacaataacctggaggatgactccagtgtgagtgaagacttagatgtggattggagcctatttgatggctttgcagatggactaggagttgctgaagctatttcatatgtggatcctcagttccttacctacatggcactagaagaacgcttagcccaggctatggagactgctctggcccatttagagtctcttgcagtggatgttgaggtggccaatccaccagctagtaaggaaagcattgatggtcttccagagacccttgttcttgaagatcacactgctattggtcaggaacaatgctgtccaatctgttgcagtgagtatattaaggatgatatagcaacagagttgccctgtcaccatttctttcacaaaccttgtgtctcaatttggctacaaaagtcgggaacatgccctgtgtgccgccgtcatttcccacctgcggttattgaagcatctgcagctccttcctctgagcctgatcctgatgccccaccttcaaatgacagtattgcagaagcaccctaaaccttgacagttgaaatgagatcagtgtatcaaagtaaatctgcaaattccttctaaatttcatgtgcaaataattatatataaatatatttaaaaatgctatatatagtatatgccatagtttagaaagaatattaacctttctaaactaaatttaggtttgcagaaagtattaaacatttttaagctgaatgttgagacagtgcatccattttctttagttgaatatgtttgtattaattgtaaagccaagcttatcagttgactctctccagaataaataatcatctgtgtggcatacgttattggctttgtctgtaatactgccactaagtgattataattaagctgtcctgtttgcatcaaatgtaaagactgtgttcacaaccgtagtaaaatttggtttcattggaaatgaaacaaattctaaagtatgctttttcactagtccctttgattttgctatatcataacctcttggttcatatgctgagaaatttttcagaaagtccatttttgtttaaaattagaacttttcagaatgccaaatgaaggctaaaattttggccagaacattacaaaagttttaaatcgtagacgtaactccccctgaaataaagttaggtagtaaaatccttaatgaaaccagtggatgtgcttaacgtaaggttagtaaagcatacaaagaatctagtgtgctcagggcttggtacaatgagctgaattagatggccttatgaaactctttctaacctcttacccaacctgtttctccttggttaaaattatacttgaaggcccagaacactcatggcacatttgtttaatattgcttatagttagtttaaggtaattttgcttctacagtattttggaaggtctgaaaacttgcacagggtcatctttgtaattatataaccccaaactaagatgcacaatgtctccttcaggtgatcacacacagtggacgagtatgtgcaaacatggacataatagttcacttacaaatgtgatttgatgttaacactagagaatgatgactgtagaacatttgagcaagtaaaatagtaaagcacatagtgagtgtatgtccgtctaactggtacattgataatttagtttgggcacataaaaggaatatttatatggcttcccaaatgcagagttacatcttattcgtgtatttctctgagtatttatatcccgtctccttttttcattcttaaaaataaatgaattttcactgttggcacatatgaggcttaaatataaggaacataacacttgcattctaatttttgcatatattgtaaatgtgtctggtatttacagcaaaatactgtgtatccttttatgggtaaaacaaaagtgaacattgcatgcatgtaatgtgatgaatttgtaatttaggagttctttggggcttctgtgacttgggaaatgcttacattcaggccttaatgttgcattagctagcatgttttccctctgatgtatatagtcactgttgtataaactaatctttgcttgttttctactctgtgatctttccatatcatatttcattaatgatcagttagtgtcaaggagtcaaaacagattaaaattaatttcatgtgtatatggtggaaatttgtggctagtgtgattttgtttgtttccttttaaggtactgttgatcagttgtgacacttactggttaaacttacgttgctaaagatttctctataataagccacacattatatttagactatattaagggaccttggttttcttctagatagcagctgtcccaaagaaaatatttcttctttgtctgttaagatttagctattatctgccagttgttaagaggttttggttccaaactcaaccagcaatgttgagagctgaacttaagatagctgttgtactttttgctttccatctgttactgtccttcattcttggctccctactatctataaacagctgctgtgaagaagaaaagttgaataagagttggcttaaattttaaaaaagaaaaagaaaattgaggttttaggattttcatggtaacaagctctggtataagctaaggctggcaagttcagatactaaaatattatttgatcatatcttggatccttttgaaaaagttaagactatatgaaggtaaattagaaataagtatgaatattaataaaatagcatttatcttatttctctattttatgttgtgacttaacctaattttatttttttaacattttcttatttcttataatatgaatgctgatatttaaaggtagatctatgtggtattctttgtgtttcttaattgtttaactcttaagattatttgtgatctggatttatgtatttgttagatacatacgaattgttaaaatggaatgcaagtttttcaaaagcccaggtctaaatgtaatggttggtttattgttctataaccccagcccatcattttctgtgtaaatcataaacaataaacagaatatactcggtggtcatttctaatatttaatt

SEQ ID NO: 313992 - DNA, 5063 bp, Homo sapiens
ctcacacccaccttctgcggtttcccgtcaccccgcgtagagcggaaccatcttacgccacaggcctgcagcacccctcccccgaggagccttctgttgccgtcgttttgctgggcgtctgcattttccccgattgtcagtgaggctcggcacgcagacaccccgctcgagccgcagcagtcgctctactcccgggatcagcacctttccgccagggctgctctcagttagcgatgtcaggccagagctcctcttgcagatgcacctttaatttggcctccctcagatgactggtaatcattttgcgcacattcaaaatggaatcttctgcggcttgtccatagtgtgaataaaaactaaatcacatctataattctactgaactggtcatacagacgctgccatatatgtcacagtacactgaaaaggagccagcagcaatggaccaagaatctggtaaggctgtctggcccaaaccagcaggagggtatcagacaattacaggcaggagatatggaagaagacatgcttatgtcagttttaaaccatgtatgaccagacatgaaagaagcttaggtcgggctggtgatgactatgaagtgttggaactagatgatgttccaaaggaaaattcctcaggttccagtcctttggatcaagttgattcttctttacccagtgaacctatatttgaaaaaagtgaaacagaaattcccacttgtggttcagcattgaatcaaaccactgagagcagtcaatcctttgttgcagtacatcacagtgaggaaggcagggataccttaggaagcagtacaaatcttcataatcactctgagggagagtatattccaggagcttgtagtgcttcaagtgtccaaaatggaattgcattggttcatacagactcttatgatccagatggcaaacatggagaagataatgaccatcttcaactttctgcagaagtcgtggaaggtagtagataccaggaatcattaggcaatacagtatttgagttggaaaacagagaggcagaggcatacactggtctttcaccaccagttccctcatttaactgtgaagtaagagatgagtttgaagagttagattctgtaccattagtgaaaagttctgctggtgatactgagtttgtccatcagaatagccaggaaattcagaggtcttctcaagatgaaatggttagtacgaaacaacaaaataatactagccaggaaagacagacagaacattcacctgaagatgcagcctgtggtccagggcatatttgtagtgaacgaaataccaatgatagggaaaagaaccatggaagttctcctgaacaggtagtgaggccaaaagttagaaaactgataagttcaagccaggtggaccaagaaacaggttttaataggcatgaggcgaaacaaagaagtgttcaaagatggagagaggctttggaagttgaggaaagtggctcagatgacctcttaataaaatgtgaagaatatgatggagagcatgactgtatgttcttggatccaccatactcaagagttattacacaaagggaaacagaaaataaccaaatgacatcagaaagtggagccacagcgggaaggcaagaagtggataacaccttttggaatggctgtggagattattaccaactctatgacaaagatgaagatagttctgaatgcagtgatggggaatggtctgcttctttgcctcatcgattttctggtacagaaaaagatcaatcctcaagtgatgaaagctgggagactctgccaggaaaagatgagaatgaacctgagctacaaagtgatagcagtggccctgaagaagaaaaccaagaattatctcttcaggaaggggaacagacatccttggaagagggagaaattccttggttacagtacaatgaagtcaatgaaagcagcagtgatgagggaaatgaacctgccaatgaatttgcacagccagctttcatgttggatggtaacaataacctggaggatgactccagtgtgagtgaagacttagatgtggattggagcctatttgatggctttgcagatggactaggagttgctgaagctatttcatatgtggatcctcagttccttacctacatggcactagaagaacgcttagcccaggctatggagactgctctggcccatttagagtctcttgcagtggatgttgaggtggccaatccaccagctagtaaggaaagcattgatggtcttccagagacccttgttcttgaagatcacactgctattggtcaggaacaatgctgtccaatctgttgcagtgagtatattaaggatgatatagcaacagagttgccctgtcaccatttctttcacaaaccttgtgtctcaatttggctacaaaagtcgggaacatgccctgtgtgccgccgtcatttcccacctgcggttattgaagcatctgcagctccttcctctgagcctgatcctgatgccccaccttcaaatgacagtattgcagaagcaccctaaaccttgacagttgaaatgagatcagtgtatcaaagtaaatctgcaaattccttctaaatttcatgtgcaaataattatatataaatatatttaaaaatgctatatatagtatatgccatagtttagaaagaatattaacctttctaaactaaatttaggtttgcagaaagtattaaacatttttaagctgaatgttgagacagtgcatccattttctttagttgaatatgtttgtattaattgtaaagccaagcttatcagttgactctctccagaataaataatcatctgtgtggcatacgttattggctttgtctgtaatactgccactaagtgattataattaagctgtcctgtttgcatcaaatgtaaagactgtgttcacaaccgtagtaaaatttggtttcattggaaatgaaacaaattctaaagtatgctttttcactagtccctttgattttgctatatcataacctcttggttcatatgctgagaaatttttcagaaagtccatttttgtttaaaattagaacttttcagaatgccaaatgaaggctaaaattttggccagaacattacaaaagttttaaatcgtagacgtaactccccctgaaataaagttaggtagtaaaatccttaatgaaaccagtggatgtgcttaacgtaaggttagtaaagcatacaaagaatctagtgtgctcagggcttggtacaatgagctgaattagatggccttatgaaactctttctaacctcttacccaacctgtttctccttggttaaaattatacttgaaggcccagaacactcatggcacatttgtttaatattgcttatagttagtttaaggtaattttgcttctacagtattttggaaggtctgaaaacttgcacagggtcatctttgtaattatataaccccaaactaagatgcacaatgtctccttcaggtgatcacacacagtggacgagtatgtgcaaacatggacataatagttcacttacaaatgtgatttgatgttaacactagagaatgatgactgtagaacatttgagcaagtaaaatagtaaagcacatagtgagtgtatgtccgtctaactggtacattgataatttagtttgggcacataaaaggaatatttatatggcttcccaaatgcagagttacatcttattcgtgtatttctctgagtatttatatcccgtctccttttttcattcttaaaaataaatgaattttcactgttggcacatatgaggcttaaatataaggaacataacacttgcattctaatttttgcatatattgtaaatgtgtctggtatttacagcaaaatactgtgtatccttttatgggtaaaacaaaagtgaacattgcatgcatgtaatgtgatgaatttgtaatttaggagttctttggggcttctgtgacttgggaaatgcttacattcaggccttaatgttgcattagctagcatgttttccctctgatgtatatagtcactgttgtataaactaatctttgcttgttttctactctgtgatctttccatatcatatttcattaatgatcagttagtgtcaaggagtcaaaacagattaaaattaatttcatgtgtatatggtggaaatttgtggctagtgtgattttgtttgtttccttttaaggtactgttgatcagttgtgacacttactggttaaacttacgttgctaaagatttctctataataagccacacattatatttagactatattaagggaccttggttttcttctagatagcagctgtcccaaagaaaatatttcttctttgtctgttaagatttagctattatctgccagttgttaagaggttttggttccaaactcaaccagcaatgttgagagctgaacttaagatagctgttgtactttttgctttccatctgttactgtccttcattcttggctccctactatctataaacagctgctgtgaagaagaaaagttgaataagagttggcttaaattttaaaaaagaaaaagaaaattgaggttttaggattttcatggtaacaagctctggtataagctaaggctggcaagttcagatactaaaatattatttgatcatatcttggatccttttgaaaaagttaagactatatgaaggtaaattagaaataagtatgaatattaataaaatagcatttatcttatttctctattttatgttgtgacttaacctaattttatttttttaacattttcttatttcttataatatgaatgctgatatttaaaggtagatctatgtggtattctttgtgtttcttaattgtttaactcttaagattatttgtgatctggatttatgtatttgttagatacatacgaattgttaaaatggaatgcaagtttttcaaaagcccaggtctaaatgtaatggttggtttattgttctataaccccagcccatcattttctgtgtaaatcataaacaataaacagaatatactcggtggtcatttctaatatttaatt

SEQ ID NO: 313993 - DNA, 5035 bp, Homo sapiens
cgccaccgccgccgccgccgccacagccgccagccgcttcgcgttcggcgggggaggagttggaggcggagaagaaggcggtggtggcgggtggaggttcgagcgctgttctcgctccggagccgctgcacatttcggaatcttctgcggcttgtccatagtgtgaataaaaactaaatcacatctataattctactgaactggtcatacagacgctgccatatatgtcacagtacactgaaaaggagccagcagcaatggaccaagaatctggtaaggctgtctggcccaaaccagcaggagggtatcagacaattacaggcaggagatatggaagaagacatgcttatgtcagttttaaaccatgtatgaccagacatgaaagaagcttaggtcgggctggtgatgactatgaagtgttggaactagatgatgttccaaaggaaaattcctcaggttccagtcctttggatcaagttgattcttctttacccagtgaacctatatttgaaaaaagtgaaacagaaattcccacttgtggttcagcattgaatcaaaccactgagagcagtcaatcctttgttgcagtacatcacagtgaggaaggcagggataccttaggaagcagtacaaatcttcataatcactctgagggagagtatattccaggagcttgtagtgcttcaagtgtccaaaatggaattgcattggttcatacagactcttatgatccagatggcaaacatggagaagataatgaccatcttcaactttctgcagaagtcgtggaaggtagtagataccaggaatcattaggcaatacagtatttgagttggaaaacagagaggcagaggcatacactggtctttcaccaccagttccctcatttaactgtgaagtaagagatgagtttgaagagttagattctgtaccattagtgaaaagttctgctggtgatactgagtttgtccatcagaatagccaggaaattcagaggtcttctcaagatgaaatggttagtacgaaacaacaaaataatactagccaggaaagacagacagaacattcacctgaagatgcagcctgtggtccagggcatatttgtagtgaacgaaataccaatgatagggaaaagaaccatggaagttctcctgaacaggtagtgaggccaaaagttagaaaactgataagttcaagccaggtggaccaagaaacaggttttaataggcatgaggcgaaacaaagaagtgttcaaagatggagagaggctttggaagttgaggaaagtggctcagatgacctcttaataaaatgtgaagaatatgatggagagcatgactgtatgttcttggatccaccatactcaagagttattacacaaagggaaacagaaaataaccaaatgacatcagaaagtggagccacagcgggaaggcaagaagtggataacaccttttggaatggctgtggagattattaccaactctatgacaaagatgaagatagttctgaatgcagtgatggggaatggtctgcttctttgcctcatcgattttctggtacagaaaaagatcaatcctcaagtgatgaaagctgggagactctgccaggaaaagatgagaatgaacctgagctacaaagtgatagcagtggccctgaagaagaaaaccaagaattatctcttcaggaaggggaacagacatccttggaagagggagaaattccttggttacagtacaatgaagtcaatgaaagcagcagtgatgagggaaatgaacctgccaatgaatttgcacagccagctttcatgttggatggtaacaataacctggaggatgactccagtgtgagtgaagacttagatgtggattggagcctatttgatggctttgcagatggactaggagttgctgaagctatttcatatgtggatcctcagttccttacctacatggcactagaagaacgcttagcccaggctatggagactgctctggcccatttagagtctcttgcagtggatgttgaggtggccaatccaccagctagtaaggaaagcattgatggtcttccagagacccttgttcttgaagatcacactgctattggtcaggaacaatgctgtccaatctgttgcagtgagtatattaaggatgatatagcaacagagttgccctgtcaccatttctttcacaaaccttgtgtctcaatttggctacaaaagtcgggaacatgccctgtgtgccgccgtcatttcccacctgcggttattgaagcatctgcagctccttcctctgagcctgatcctgatgccccaccttcaaatgacagtattgcagaagcaccctaaaccttgacagttgaaatgagatcagtgtatcaaagtaaatctgcaaattccttctaaatttcatgtgcaaataattatatataaatatatttaaaaatgctatatatagtatatgccatagtttagaaagaatattaacctttctaaactaaatttaggtttgcagaaagtattaaacatttttaagctgaatgttgagacagtgcatccattttctttagttgaatatgtttgtattaattgtaaagccaagcttatcagttgactctctccagaataaataatcatctgtgtggcatacgttattggctttgtctgtaatactgccactaagtgattataattaagctgtcctgtttgcatcaaatgtaaagactgtgttcacaaccgtagtaaaatttggtttcattggaaatgaaacaaattctaaagtatgctttttcactagtccctttgattttgctatatcataacctcttggttcatatgctgagaaatttttcagaaagtccatttttgtttaaaattagaacttttcagaatgccaaatgaaggctaaaattttggccagaacattacaaaagttttaaatcgtagacgtaactccccctgaaataaagttaggtagtaaaatccttaatgaaaccagtggatgtgcttaacgtaaggttagtaaagcatacaaagaatctagtgtgctcagggcttggtacaatgagctgaattagatggccttatgaaactctttctaacctcttacccaacctgtttctccttggttaaaattatacttgaaggcccagaacactcatggcacatttgtttaatattgcttatagttagtttaaggtaattttgcttctacagtattttggaaggtctgaaaacttgcacagggtcatctttgtaattatataaccccaaactaagatgcacaatgtctccttcaggtgatcacacacagtggacgagtatgtgcaaacatggacataatagttcacttacaaatgtgatttgatgttaacactagagaatgatgactgtagaacatttgagcaagtaaaatagtaaagcacatagtgagtgtatgtccgtctaactggtacattgataatttagtttgggcacataaaaggaatatttatatggcttcccaaatgcagagttacatcttattcgtgtatttctctgagtatttatatcccgtctccttttttcattcttaaaaataaatgaattttcactgttggcacatatgaggcttaaatataaggaacataacacttgcattctaatttttgcatatattgtaaatgtgtctggtatttacagcaaaatactgtgtatccttttatgggtaaaacaaaagtgaacattgcatgcatgtaatgtgatgaatttgtaatttaggagttctttggggcttctgtgacttgggaaatgcttacattcaggccttaatgttgcattagctagcatgttttccctctgatgtatatagtcactgttgtataaactaatctttgcttgttttctactctgtgatctttccatatcatatttcattaatgatcagttagtgtcaaggagtcaaaacagattaaaattaatttcatgtgtatatggtggaaatttgtggctagtgtgattttgtttgtttccttttaaggtactgttgatcagttgtgacacttactggttaaacttacgttgctaaagatttctctataataagccacacattatatttagactatattaagggaccttggttttcttctagatagcagctgtcccaaagaaaatatttcttctttgtctgttaagatttagctattatctgccagttgttaagaggttttggttccaaactcaaccagcaatgttgagagctgaacttaagatagctgttgtactttttgctttccatctgttactgtccttcattcttggctccctactatctataaacagctgctgtgaagaagaaaagttgaataagagttggcttaaattttaaaaaagaaaaagaaaattgaggttttaggattttcatggtaacaagctctggtataagctaaggctggcaagttcagatactaaaatattatttgatcatatcttggatccttttgaaaaagttaagactatatgaaggtaaattagaaataagtatgaatattaataaaatagcatttatcttatttctctattttatgttgtgacttaacctaattttatttttttaacattttcttatttcttataatatgaatgctgatatttaaaggtagatctatgtggtattctttgtgtttcttaattgtttaactcttaagattatttgtgatctggatttatgtatttgttagatacatacgaattgttaaaatggaatgcaagtttttcaaaagcccaggtctaaatgtaatggttggtttattgttctataaccccagcccatcattttctgtgtaaatcataaacaataaacagaatatactcgaaacaaaaaaaagggggcgtctaaagttcctcggaggccaaggtaacgttacaagttttgaagagggccataggggggtttaagaaacggcggagttaaagtgctggaaatgcctgcttggagacatctggggattgaacacagtggcggaaaatggttggtaacttggaaggatatc

SEQ ID NO: 313994 - DNA, 4508 bp, Homo sapiens
cgccaccgccgccgccgccgccacagccgccagccgcttcgcgttcggcgggggaggagttggaggcggagaagaaggcggtggtggcgggtggaggttcgagcgctgttctcgctccggagccgctgcacatttcggaatcttctgcggcttgtccatagtgtgaataaaaactaaatcacatctataattctactgaactggtcatacagacgctgccatatatgtcacagtacactgaaaaggagccagcagcaatggaccaagaatctggtaaggctgtctggcccaaaccagcaggagggtatcagacaattacaggcaggagatatggaagaagacatgcttatgtcagttttaaaccatgtatgaccagacatgaaagaagcttaggtcgggctggtgatgactatgaagtgttggaactagatgatgttccaaaggaaaattcctcaggttccagtcctttggatcaagttgattcttctttacccagtgaacctatatttgaaaaaagtgaaacagaaattcccacttgtggttcagcattgaatcaaaccactgagagcagtcaatcctttgttgcagtacatcacagtgaggaaggcagggataccttaggaagcagtacaaatcttcataatcactctgagggagagtatattccaggagcttgtagtgcttcaagtgtccaaaatggaattgcattggttcatacagactcttatgatccagatggcaaacatggagaagataatgaccatcttcaactttctgcagaagtcgtggaaggtagtagataccaggaatcattaggcaatacagtatttgagttggaaaacagagaggcagaggcatacactggtctttcaccaccagttccctcatttaactgtgaagtaagagatgagtttgaagagttagattctgtaccattagtgaaaagttctgctggtgatactgagtttgtccatcagaatagccaggaaattcagaggtcttctcaagatgaaatggttagtacgaaacaacaaaataatactagccaggaaagacagacagaacattcacctgaagatgcagcctgtggtccagggcatatttgtagtgaacgaaataccaatgatagggaaaagaaccatggaagttctcctgaacaggtagtgaggccaaaagttagaaaactgataagttcaagccaggtggaccaagaaacaggttttaataggcatgaggcgaaacaaagaagtgttcaaagatggagagaggctttggaagttgaggaaagtggctcagatgacctcttaataaaatgtgaagaatatgatggagagcatgactgtatgttcttggatccaccatactcaagagttattacacaaagggaaacagaaaataaccaaatgacatcagaaagtggagccacagcgggaaggcaagaagtggataacaccttttggaatggctgtggagattattaccaactctatgacaaagatgaagatagttctgaatgcagtgatggggaatggtctgcttctttgcctcatcgattttctggtacagaaaaagatcaatcctcaagtgatgaaagctgggagactctgccaggaaaagatgagaatgaacctgagctacaaagtgatagcagtggccctgaagaagaaaaccaagaattatctcttcaggaaggggaacagacatccttggaagagggagaaattccttggttacagtacaatgaagtcaatgaaagcagcagtgatgagggaaatgaacctgccaatgaatttgcacagccagctttcatgttggatggtaacaataacctggaggatgactccagtgtgagtgaagacttagatgtggattggagcctatttgatggctttgcagatggactaggagttgctgaagctatttcatatgtggatcctcagttccttacctacatggcactagaagaacgcttagcccaggctatggagactgctctggcccatttagagtctcttgcagtggatgttgaggtggccaatccaccagctagtaaggaaagcattgatggtcttccagagacccttgttcttgaagatcacactgctattggtcaggaacaatgctgtccaatctgttgcagtgagtatattaaggatgatatagcaacagagttgccctgtcaccatttctttcacaaaccttgtgtctcaatttggctacaaaagtcgggaacatgccctgtgtgccgccgtcatttcccacctgcggttattgaagcatctgcagctccttcctctgagcctgatcctgatgccccaccttcaaatgacagtattgcagaagcaccctaaaccttgacagttgaaatgagatcagtgtatcaaagtaaatctgcaaattccttctaaatttcatgtgcaaataattatatataaatatatttaaaaatgctatatatagtatatgccatagtttagaaagaatattaacctttctaaactaaatttaggtttgcagaaagtattaaacatttttaagctgaatgttgagacagtgcatccattttctttagttgaatatgtttgtattaattgtaaagccaagcttatcagttgactctctccagaataaataatcatctgtgtggcatacgttattggctttgtctgtaatactgccactaagtgattataattaagctgtcctgtttgcatcaaatgtaaagactgtgttcacaaccgtagtaaaatttggtttcattggaaatgaaacaaattctaaagtatgctttttcactagtccctttgattttgctatatcataacctcttggttcatatgctgagaaatttttcagaaagtccatttttgtttaaaattagaacttttcagaatgccaaatgaaggctaaaattttggccagaacattacaaaagttttaaatcgtagacgtaactccccctgaaataaagttaggtagtaaaatccttaatgaaaccagtggatgtgcttaacgtaaggttagtaaagcatacaaagaatctagtgtgctcagggcttggtacaatgagctgaattagatggccttatgaaactctttctaacctcttacccaacctgtttctccttggttaaaattatacttgaaggcccagaacactcatggcacatttgtttaatattgcttatagttagtttaaggtaattttgcttctacagtattttggaaggtctgaaaacttgcacagggtcatctttgtaattatataaccccaaactaagatgcacaatgtctccttcaggtgatcacacacagtggacgagtatgtgcaaacatggacataatagttcacttacaaatgtgatttgatgttaacactagagaatgatgactgtagaacatttgagcaagtaaaatagtaaagcacatagtgagtgtatgtccgtctaactggtacattgataatttagtttgggcacataaaaggaatatttatatggcttcccaaatgcagagttacatcttattcgtgtatttctctgagtatttatatcccgtctccttttttcattcttaaaaataaatgaattttcactgttggcacatatgaggcttaaatataaggaacataacacttgcattctaatttttgcatatattgtaaatgtgtctggtatttacagcaaaatactgtgtatccttttatgggtaaaacaaaagtgaacattgcatgcatgtaatgtgatgaatttgtaatttaggagttctttggggcttctgtgacttgggaaatgcttacattcaggccttaatgttgcattagctagcatgttttccctctgatgtatatagtcactgttgtataaactaatctttgcttgttttctactctgtgatctttccatatcatatttcattaatgatcagttagtgtcaaggagtcaaaacagattaaaattaatttcatgtgtatatggtggaaatttgtggctagtgtgattttgtttgtttccttttaaggtactgttgatcagttgtgacacttactggttaaacttacgttgctaaagatttctctataataagccacacattatatttagactatattaagggaccttggttttcttctagatagcagctgtcccaaagaaaatatttcttctttgtctgttaagatttagctattatctgccagttgttaagaggttttggttccaaactcaaccagcaatgttgagagctgaacttaagatagctgttgtactttttgctttccatctgttactgtccttcattcttggctccctactatctataaacagctgctgtgaagaagaaaagttgaataagagttggcttaaattttaaaaaagaaaaagaaaattgaggttttaggattttcatggtaacaagctctggtataagctaaggctggcaagttcagatactaaaatattatttgatcatatcttggaagctgctgtagttggggtcctctaagtcag

SEQ ID NO: 313995 - DNA, 1826 bp, Homo sapiens
tagaactagtggatccccctgtctgcaggaattcggcacgagagtgtgcttttggcttggtacaatgagctgaattagatggccttatgaaactctttctaacctcttacccaacctgtttctccttggttaaaattatacttgaaggcccagaacactcatggcacatttgtttaatattgcttatagttagtttaaggtaattttgcttctacagtattttggaaggtctgaaaacttgcacagggtcatctttgtaattatataaccccaaactaagatgcacaatgtctccttcaggtgatcacacacagtggacgagtatgtgcaaacatggacataatagttcacttacaaatgtgatttgatgttaacactagagaatgatgactgtagaacatttgagcaagtaaaatagtaaagcacatagtgagtgtatgtccgtctaactggtacattgataatttagtttgggcacataaaaggaatatttatatggcttcccaaatgcagagttacatcttattcgtgtatttctctgagtatttatatcccgtctccttttttcattcttataacacttgcattctaatttttgcatatattgtaaatgtgtctggtatttacagcaaaatactgtgtatccttttatgggtaaaacaaaagtgaacattgcatgcatgtaatgtgatgaatttgtaatttaggagttctttggggcttctgtgacttgggaaatgcttacattcaggccttaatgttgcattagctagcatgttttccctctgatgtatatagtcactgttgtataaactaatctttgcttgttttctactctgtgatctttccatatcatatttcattaatgatcagttagtgtcaaggagtcaaaacagattaaaattaatttcatgtgtatatggtggaaatttgtggctagtgtgattttgtttgtttccttttaaggtactgttgatcagttgtgacacttactggttaaacttacgttgctaaagatttctctataataagccacacattatatttagactatattaagggaccttggttttcttctagatagcagctgtcccaaagaaaatatttcttctttgtctgttaagatttagctattatctgccagttgttaagaggttttggttccaaactcaaccagcaatgttgagagctgaacttaagatagctgttgtactttttgctttccatctgttactgtccttcattcttggctccctactatctataaacagctgctgtgaagaagaaaagttgaataagagttggcttaaattttaaaaaagaaaaagaaaattgaggttttaggattttcatggtaacaagctctggtataagctaaggctggcaagttcagatactaaaatattatttgatcatatcttggatccttttgaaaaagttaagactatatgaaggtaaattagaaataagtatgaatattaataaaatagcatttatcttatttctctattttatgttgtgacttaacctaattttatttttttaacattttcttatttcttataatatgaatgctgatatttaaaggtagatctatgtggtattctttgtgtttcttaattgtttaactcttaagattatttgtgatctggatttatgtatttgttagatacatacgaattgttaaaatggaatgcaagtttttcaaaagcccaggtctaaatgtaatggttggtttattgttctataaccccagcccatcattttctgtgtaaatcataaacaataaacagaatatactcggtggtcatttctaatatttaatt

SEQ ID NO: 313996 - DNA, 986 bp, Homo sapiens
agccccggcccctccacccgcatgtggggacggagccgggaggatcgcgcgctggccgccgccgaaggacccctcgctcctctcggaaatttgtggctagtgtgattttgtttgtttccttttaaggtactgttgatcagttgtgacacttactggttaaacttacgttgctaaagatttctctataataagccacacattatatttagactatattaagggaccttggttttcttctagatagcagctgtcccaaagaaaatatttcttctttgtctgttaagatttagctattatctgccagttgttaagaggttttggttccaaactcaaccagcaatgttgagagctgaacttaagatagctgttgtactttttgctttccatctgttactgtccttcattcttggctccctactatctataaacagctgctgtgaagaagaaaagttgaataagagttggcttaaattttaaaaaagaaaaagaaaattgaggttttaggattttcatggtaacaagctctggtataagctaaggctggcaagttcagatactaaaatattatttgatcatatcttggatccttttgaaaaagttaagactatatgaaggtaaattagaaataagtatgaatattaataaaatagcatttatcttatttctctattttatgttgtgacttaacctaattttatttttttaacattttcttatttcttataatatgaatgctgatatttaaaggtagatctatgtggtattctttgtgtttcttaattgtttaactcttaagattatttgtgatctggatttatgtatttgttagatacatacgaattgttaaaatggaatgcaagtttttcaaaagcccaggtctaaatgtaatggttggtttattgttctataaccccagcccatcattttctgtgtaaatcataaacaataaacagaatatactcggtggtcatttctaatatttaatt

SEQ ID NO: 313997 - DNA, 2469 bp, Homo sapiens
cgccaccgccgccgccgccgccacagccgccagccgcttcgcgttcggcgggggaggagttggaggcggagaagaaggcggtggtggcgggtggaggttcgagcgctgttctcgctccggagccgctgcacatttcggaatcttctgcggcttgtccatagtgtgaataaaaactaaatcacatctataattctactgaactggtcatacagacgctgccatatatgtcacagtacactgaaaaggagccagcagcaatggaccaagaatctggtaaggctgtctggcccaaaccagcaggagggtatcagacaattacaggcaggagatatggaagaagacatgcttatgtcagttttaaaccatgtatgaccagacatgaaagaagcttaggtcgggctggtgatgactatgaagtgttggaactagatgatgttccaaaggaaaattcctcaggttccagtcctttggatcaagttgattcttctttacccagtgaacctatatttgaaaaaagtgaaacagaaattcccacttgtggttcagcattgaatcaaaccactgagagcagtcaatcctttgttgcagtacatcacagtgaggaaggcagggataccttaggaagcagtacaaatcttcataatcactctgagggagagtatattccaggagcttgtagtgcttcaagtgtccaaaatggaattgcattggttcatacagactcttatgatccagatggcaaacatggagaagataatgaccatcttcaactttctgcagaagtcgtggaaggtagtagataccaggaatcattaggcaatacagtatttgagttggaaaacagagaggcagaggcatacactggtctttcaccaccagttccctcatttaactgtgaagtaagagatgagtttgaagagttagattctgtaccattagtgaaaagttctgctggtgatactgagtttgtccatcagaatagccaggaaattcagaggtcttctcaagatgaaatggttagtacgaaacaacaaaataatactagccaggaaagacagacagaacattcacctgaagatgcagcctgtggtccagggcatatttgtagtgaacgaaataccaatgatagggaaaagaaccatggaagttctcctgaacaggtagtgaggccaaaagttagaaaactgataagttcaagccaggtggaccaagaaacaggttttaataggcatgaggcgaaacaaagaagtgttcaaagatggagagaggctttggaagttgaggaaagtggctcagatgacctcttaataaaatgtgaagaatatgatggagagcatgactgtatgttcttggatccaccatactcaagagttattacacaaagggaaacagaaaataaccaaatgacatcagaaagtggagccacagcgggaaggcaagaagtggataacaccttttggaatggctgtggagattattaccaactctatgacaaagatgaagatagttctgaatgcagtgatggggaatggtctgcttctttgcctcatcgattttctggtacagaaaaagatcaatcctcaagtgatgaaagctgggagactctgccaggaaaagatgagaatgaacctgagctacaaagtgatagcagtggccctgaagaagaaaaccaagaattatctcttcaggaaggggaacagacatccttggaagagggagaaattccttggttacagtacaatgaagtcaatgaaagcagcagtgatgagggaaatgaacctgccaatgaatttgcacagccagctttcatgttggatggtaacaataacctggaggatgactccagtgtgagtgaagacttagatgtggattggagcctatttgatggctttgcagatggactaggagttgctgaagctatttcatatgtggatcctcagttccttacctacatggcactagaagaacgcttagcccaggctatggagactgctctggcccatttagagtctcttgcagtggatgttgaggtggccaatccaccagctagtaaggaaagcattgatggtcttccagagacccttgttcttgaagatcacactgctattggtcaggaacaatgctgtccaatctgttgcagtgagtatattaaggatgatatagcaacagagttgccctgtcaccatttctttcacaaaccttgtgtctcaatttggctacaaaagtcgggaacatgccctgtgtgccgccgtcatttcccacctgcggttattgaagcatctgcagctccttcctctgagcctgatcctgatgccccaccttcaaatgacagtattgcagaagcaccctaaaccttgacagttgaaatgagatcagggtccagtaatcggttctcctaattctgggcagtaatcttattcagattcaacgggcttatgacatgccacgtcgaggaatcctcacacatgg

SEQ ID NO: 313998 - DNA, 676 bp, Homo sapiens
gtgattcacagtgcactgattttatttacagatcaaaagccacttaaataatctgcagacacaagtgctgtccagggcagaagcctggggtccaaatcagccttatccctcctcatgcccacagtcagcccaatgctgtctccgttccatgggccagcacaggcaggcgccactctgctgacatgaggacctggggtagctcagacatttctcgtgccgaattcggcacgctggcaagttcagatactaaaatattatttgatcatatcttggatccttttgaaaaagttaagactatatgaaggtaaattagaaataagtatgaatattaataaaatagcatttatcttatttctctattttatgttgtgacttaacctaattttatttttttaacattttcttatttcttataatatgaatgctgatatttaaaggtagatctatgtggtattctttgtgtttcttaattgtttaactcttaagattatttgtgatctggatttatgtatttgttagatacatacgaattgttaaaatggaatgcaagtttttcaaaagcccaggtctaaatgtaatggttggtttattgttctataaccccagcccatcattttctgtgtaaatcataaacaataaacagaatatactcggtggtcatttctaatatttaatt

SEQ ID NO: 313999 - DNA, 467 bp, Homo sapiens
ccccgctcgagccgcagcagtcgctctactcccgggatcagcacctttccgccagggctgctctcagttagcgatgtcaggccagagctcctcttgcagatgcacctttaatttggcctccctcagatgactggtaatcattttgcgcacattcaaaatggtgaggttaaagacgctcagaccaagttgaagcaaaggggaggtggtaaatagtcgttttgcagggaggagagtaatctgagagttccttctccggacattaaaaaaaaaaaaatttacatccgcataggcgcttcttttgagtctgctggttctgtgaagtttaaaattttcattgcaggcttaatgtattctgttttatcatgaaatatttggtcacatttctttaaaatggcagtcacctttgctgaaggctacggatcatttgaagtgtatgtgaataaacctgaggataacagtaataaacg

SEQ ID NO: 314000 - DNA, 621 bp, Homo sapiens
caggccccatctccaacattttggattacagttcaacatgagatttggtggggacacagatccaaaccatatcatctagttaacaccccaaatgataaaaataactgaacacattatgatagtttatttctcttctgatttgcagttctgaatgcagtgatggggaatggtctgcttctttgcctcatcgattttctggtacagaaaaagatcaatcctcaagtgatgaaagctgggagactctgccaggaaaagatgagaatgaacctgagctacaaagtgatagcagtggccctgaagaagaaaaccaagaattatctcttcaggaagggtatgttcaacagtgagatttatttttctgtatattgtacaagagtggtatattttacattcaaatgttggatatgccattaattgtatttataagccttatgtagaaccagtaggcccccctgattttttcattatgcttttggtattttaaaaagaacaattaagttgaaaatactgataatttcagtatcgtttatggagatacaatatatgtctccacttggctttaataagaaaagttgggcacctaaaatgtcattttggttaagttaggaatgggtgaattag

SEQ ID NO: 314001 - DNA, 4828 bp, Homo sapiens
cgccaccgccgccgccgccgccacagccgccagccgcttcgcgttcggcgggggaggagttggaggcggagaagaaggcggtggtggcgggtggaggttcgagcgctgttctcgctccggagccgctgcacatttcggaatcttctgcggcttgtccatagtgtgaataaaaactaaatcacatctataattctactgaactggtcatacagacgctgccatatatgtcacagtacactgaaaaggagccagcagcaatggaccaagaatctggtaaggctgtctggcccaaaccagcaggagggtatcagacaattacaggcaggagatatggaagaagacatgcttatgtcagttttaaaccatgtatgaccagacatgaaagaagcttaggtcgggctggtgatgactatgaagtgttggaactagatgatgttccaaaggaaaattcctcaggttccagtcctttggatcaagttgattcttctttacccagtgaacctatatttgaaaaaagtgaaacagaaattcccacttgtggttcagcattgaatcaaaccactgagagcagtcaatcctttgttgcagtacatcacagtgaggaaggcagggataccttaggaagcagtacaaatcttcataatcactctgagggagagtatattccaggagcttgtagtgcttcaagtgtccaaaatggaattgcattggttcatacagactcttatgatccagatggcaaacatggagaagataatgaccatcttcaactttctgcagaagtcgtggaaggtagtagataccaggaatcattaggcaatacagtatttgagttggaaaacagagaggcagaggcatacactggtctttcaccaccagttccctcatttaactgtgaagtaagagatgagtttgaagagttagattctgtaccattagtgaaaagttctgctggtgatactgagtttgtccatcagaatagccaggaaattcagaggtcttctcaagatgaaatggttagtacgaaacaacaaaataatactagccaggaaagacagacagaacattcacctgaagatgcagcctgtggtccagggcatatttgtagtgaacgaaataccaatgatagggaaaagaaccatggaagttctcctgaacaggtagtgaggccaaaagttagaaaactgataagttcaagccaggtggaccaagaaacaggttttaataggcatgaggcgaaacaaagaagtgttcaaagatggagagaggctttggaagttgaggaaagtggctcagatgacctcttaataaaatgtgaagaatatgatggagagcatgactgtatgttcttggatccaccatactcaagagttattacacaaagggaaacagaaaataaccaaatgacatcagaaagtggagccacagcgggaaggcaagaagtggataacaccttttggaatggctgtggagattattaccaactctatgacaaagatgaagatagttctgaatgcagtgatggggaatggtctgcttctttgcctcatcgattttctggtacagaaaaagatcaatcctcaagtgatgaaagctgggagactctgccaggaaaagatgagaatgaacctgagctacaaagtgatagcagtggccctgaagaagaaaaccaagaattatctcttcaggaaggggaacagacatccttggaagagggagaaattccttggttacagtacaatgaagtcaatgaaagcagcagtgatgagggaaatgaacctgccaatgaatttgcacagccagctttcatgttggatggtaacaataacctggaggatgactccagtgtgagtgaagacttagatgtggattggagcctatttgatggctttgcagatggactaggagttgctgaagctatttcatatgtggatcctcagttccttacctacatggcactagaagaacgcttagcccaggctatggagactgctctggcccatttagagtctcttgcagtggatgttgaggtggccaatccaccagctagtaaggaaagcattgatggtcttccagagacccttgttcttgaagatcacactgctattggtcaggaacaatgctgtccaatctgttgcagtgagtatattaaggatgatatagcaacagagttgccctgtcaccatttctttcacaaaccttgtgtctcaatttggctacaaaagcatctgcagctccttcctctgagcctgatcctgatgccccaccttcaaatgacagtattgcagaagcaccctaaaccttgacagttgaaatgagatcagtgtatcaaagtaaatctgcaaattccttctaaatttcatgtgcaaataattatatataaatatatttaaaaatgctatatatagtatatgccatagtttagaaagaatattaacctttctaaactaaatttaggtttgcagaaagtattaaacatttttaagctgaatgttgagacagtgcatccattttctttagttgaatatgtttgtattaattgtaaagccaagcttatcagttgactctctccagaataaataatcatctgtgtggcatacgttattggctttgtctgtaatactgccactaagtgattataattaagctgtcctgtttgcatcaaatgtaaagactgtgttcacaaccgtagtaaaatttggtttcattggaaatgaaacaaattctaaagtatgctttttcactagtccctttgattttgctatatcataacctcttggttcatatgctgagaaatttttcagaaagtccatttttgtttaaaattagaacttttcagaatgccaaatgaaggctaaaattttggccagaacattacaaaagttttaaatcgtagacgtaactccccctgaaataaagttaggtagtaaaatccttaatgaaaccagtggatgtgcttaacgtaaggttagtaaagcatacaaagaatctagtgtgctcagggcttggtacaatgagctgaattagatggccttatgaaactctttctaacctcttacccaacctgtttctccttggttaaaattatacttgaaggcccagaacactcatggcacatttgtttaatattgcttatagttagtttaaggtaattttgcttctacagtattttggaaggtctgaaaacttgcacagggtcatctttgtaattatataaccccaaactaagatgcacaatgtctccttcaggtgatcacacacagtggacgagtatgtgcaaacatggacataatagttcacttacaaatgtgatttgatgttaacactagagaatgatgactgtagaacatttgagcaagtaaaatagtaaagcacatagtgagtgtatgtccgtctaactggtacattgataatttagtttgggcacataaaaggaatatttatatggcttcccaaatgcagagttacatcttattcgtgtatttctctgagtatttatatcccgtctccttttttcattcttaaaaataaatgaattttcactgttggcacatatgaggcttaaatataaggaacataacacttgcattctaatttttgcatatattgtaaatgtgtctggtatttacagcaaaatactgtgtatccttttatgggtaaaacaaaagtgaacattgcatgcatgtaatgtgatgaatttgtaatttaggagttctttggggcttctgtgacttgggaaatgcttacattcaggccttaatgttgcattagctagcatgttttccctctgatgtatatagtcactgttgtataaactaatctttgcttgttttctactctgtgatctttccatatcatatttcattaatgatcagttagtgtcaaggagtcaaaacagattaaaattaatttcatgtgtatatggtggaaatttgtggctagtgtgattttgtttgtttccttttaaggtactgttgatcagttgtgacacttactggttaaacttacgttgctaaagatttctctataataagccacacattatatttagactatattaagggaccttggttttcttctagatagcagctgtcccaaagaaaatatttcttctttgtctgttaagatttagctattatctgccagttgttaagaggttttggttccaaactcaaccagcaatgttgagagctgaacttaagatagctgttgtactttttgctttccatctgttactgtccttcattcttggctccctactatctataaacagctgctgtgaagaagaaaagttgaataagagttggcttaaattttaaaaaagaaaaagaaaattgaggttttaggattttcatggtaacaagctctggtataagctaaggctggcaagttcagatactaaaatattatttgatcatatcttggatccttttgaaaaagttaagactatatgaaggtaaattagaaataagtatgaatattaataaaatagcatttatcttatttctctattttatgttgtgacttaacctaattttatttttttaacattttcttatttcttataatatgaatgctgatatttaaaggtagatctatgtggtattctttgtgtttcttaattgtttaactcttaagattatttgtgatctggatttatgtatttgttagatacatacgaattgttaaaatggaatgcaagtttttcaaaagcccaggtctaaatgtaatggttggtttattgttctataaccccagcccatcattttctgtgtaaatcataaacaataaacagaatatactcggtggtcatttctaatatttaatt

SEQ ID NO: 314002 - DNA, 4827 bp, Homo sapiens
cgccaccgccgccgccgccgccacagccgccagccgcttcgcgttcggcgggggaggagttggaggcggagaagaaggcggtggtggcgggtggaggttcgagcgctgttctcgctccggagccgctgcacatttcggaatcttctgcggcttgtccatagtgtgaataaaaactaaatcacatctataattctactgaactggtcatacagacgctgccatatatgtcacagtacactgaaaaggagccagcagcaatggaccaagaatctggtaaggctgtctggcccaaaccagcaggagggtatcagacaattacaggcaggagatatggaagaagacatgcttatgtcagttttaaaccatgtatgaccagacatgaaagaagcttaggtcgggctggtgatgactatgaagtgttggaactagatgatgttccaaaggaaaattcctcaggttccagtcctttggatcaagttgattcttctttacccagtgaacctatatttgaaaaaagtgaaacagaaattcccacttgtggttcagcattgaatcaaaccactgagagcagtcaatcctttgttgcagtacatcacagtgaggaaggcagggataccttaggaagcagtacaaatcttcataatcactctgagggagagtatattccaggagcttgtagtgcttcaagtgtccaaaatggaattgcattggttcatacagactcttatgatccagatggcaaacatggagaagataatgaccatcttcaactttctgcagaagtcgtggaaggtagtagataccaggaatcattaggcaatacagtatttgagttggaaaacagagaggcagaggcatacactggtctttcaccaccagttccctcatttaactgtgaagtaagagatgagtttgaagagttagattctgtaccattagtgaaaagttctgctggtgatactgagtttgtccatcagaatagccaggaaattcagaggtcttctcaagatgaaatggttagtacgaaacaacaaaataatactagccaggaaagacagacagaacattcacctgaagatgcagcctgtggtccagggcatatttgtagtgaacgaaataccaatgatagggaaaagaaccatggaagttctcctgaacaggtagtgaggccaaaagttagaaaactgataagttcaagccaggtggaccaagaaacaggttttaataggcatgaggcgaaacaaagaagtgttcaaagatggagagaggctttggaagttgaggaaagtggctcagatgacctcttaataaaatgtgaagaatatgatggagagcatgactgtatgttcttggatccaccatactcaagagttattacacaaagggaaacagaaaataaccaaatgacatcagaaagtggagccacagcgggaaggcaagaagtggataacaccttttggaatggctgtggagattattaccaactctatgacaaagatgaagatagttctgaatgcagtgatggggaatggtctgcttctttgcctcatcgattttctggtacagaaaaagatcaatcctcaagtgatgaaagctgggagactctgccaggaaaagatgagaatgaacctgagctacaaagtgatagcagtggccctgaagaagaaaaccaagaattatctcttcaggaaggggaacagacatccttggaagagggagaaattccttggttacagtacaatgaagtcaatgaaagcagcagtgatgagggaaatgaacctgccaatgaatttgcacagccagctttcatgttggatggtaacaataacctggaggatgactccagtgtgagtgaagacttagatgtggattggagcctatttgatggctttgcagatggactaggagttgctgaagctatttcatatgtggatcctcagttccttacctacatggcactagaagaacgcttagcccaggctatggagactgctctggcccatttagagtctcttgcagtggatgttgaggtggccaatccaccagctagtaaggaaagcattgatggtcttccagagacccttgttcttgaagatcacactgctattggtcaggaacaatgctgtccaatctgttgcagtgagtatattaaggatgatatagcaacagagttgccctgtcaccatttctttcacaaaccttgtgtctcaatttggctacaaaagtcgggaacatgccctgtgtgccgccgtcatttcccacctgcggttattgaagcatctgcagctccttcctctgagcctgatcctgatgccccaccttcaaatgacagtattgcagaagcaccctaaaccttgacagttgaaatgagatcagtgtatcaaagtaaatctgcaaattccttctaaatttcatgtgcaaataattatatataaatatatttaaaaatgctatatatagtatatgccatagtttagaaagaatattaacctttctaaactaaatttaggtttgcagaaagtattaaacatttttaagctgaatgttgagacagtgcatccattttctttagttgaatatgtttgtattaattgtaaagccaagcttatcagttgactctctccagaataaataatcatctgtgtggcatacgttattggctttgtctgtaatactgccactaagtgattataattaagctgtcctgtttgcatcaaatgtaaagactgtgttcacaaccgtagtaaaatttggtttcattggaaatgaaacaaattctaaagtatgctttttcactagtccctttgattttgctatatcataacctcttggttcatatgctgagaaatttttcagaaagtccatttttgtttaaaattagaacttttcagaatgccaaatgaaggctaaaattttggccagaacattacaaaagttttaaatcgtagacgtaactccccctgaaataaagttaggtagtaaaatccttaatgaaaccagtggatgtgcttaacgtaaggttagtaaagcatacaaagaatctagtgtgctcagggcttggtacaatgagctgaattagatggccttatgaaactctttctaacctcttacccaacctgtttctccttggttaaaattatacttgaaggcccagaacactcatggcacatttgtttaatattgcttatagttagtttaaggtaattttgcttctacagtattttggaaggtctgaaaacttgcacagggtcatctttgtaattatataaccccaaactaagatgcacaatgtctccttcaggtgatcacacacagtggacgagtatgtgcaaacatggacataatagttcacttacaaatgtgatttgatgttaacactagagaatgatgactgtagaacatttgagcaagtaaaatagtaaagcacatagtgagtgtatgtccgtctaactggtacattgataatttagtttgggcacataaaaggaatatttatatggcttcccaaatgcagagttacatcttattcgtgtatttctctgagtatttatatcccgtctccttttttcattcttataacacttgcattctaatttttgcatatattgtaaatgtgtctggtatttacagcaaaatactgtgtatccttttatgggtaaaacaaaagtgaacattgcatgcatgtaatgtgatgaatttgtaatttaggagttctttggggcttctgtgacttgggaaatgcttacattcaggccttaatgttgcattagctagcatgttttccctctgatgtatatagtcactgttgtataaactaatctttgcttgttttctactctgtgatctttccatatcatatttcattaatgatcagttagtgtcaaggagtcaaaacagattaaaattaatttcatgtgtatatggtggaaatttgtggctagtgtgattttgtttgtttccttttaaggtactgttgatcagttgtgacacttactggttaaacttacgttgctaaagatttctctataataagccacacattatatttagactatattaagggaccttggttttcttctagatagcagctgtcccaaagaaaatatttcttctttgtctgttaagatttagctattatctgccagttgttaagaggttttggttccaaactcaaccagcaatgttgagagctgaacttaagatagctgttgtactttttgctttccatctgttactgtccttcattcttggctccctactatctataaacagctgctgtgaagaagaaaagttgaataagagttggcttaaattttaaaaaagaaaaagaaaattgaggttttaggattttcatggtaacaagctctggtataagctaaggctggcaagttcagatactaaaatattatttgatcatatcttggatccttttgaaaaagttaagactatatgaaggtaaattagaaataagtatgaatattaataaaatagcatttatcttatttctctattttatgttgtgacttaacctaattttatttttttaacattttcttatttcttataatatgaatgctgatatttaaaggtagatctatgtggtattctttgtgtttcttaattgtttaactcttaagattatttgtgatctggatttatgtatttgttagatacatacgaattgttaaaatggaatgcaagtttttcaaaagcccaggtctaaatgtaatggttggtttattgttctataaccccagcccatcattttctgtgtaaatcataaacaataaacagaatatactcggtggtcatttctaatatttaatt

SEQ ID NO: 314003 - DNA, 4827 bp, Homo sapiens
cgccaccgccgccgccgccgccacagccgccagccgcttcgcgttcggcgggggaggagttggaggcggagaagaaggcggtggtggcgggtggaggttcgagcgctgttctcgctccggagccgctgcacatttcggaatcttctgcggcttgtccatagtgtgaataaaaactaaatcacatctataattctactgaactggtcatacagacgctgccatatatgtcacagtacactgaaaaggagccagcagcaatggaccaagaatctggtaaggctgtctggcccaaaccagcaggagggtatcagacaattacaggcaggagatatggaagaagacatgcttatgtcagttttaaaccatgtatgaccagacatgaaagaagcttaggtcgggctggtgatgactatgaagtgttggaactagatgatgttccaaaggaaaattcctcaggttccagtcctttggatcaagttgattcttctttacccagtgaacctatatttgaaaaaagtgaaacagaaattcccacttgtggttcagcattgaatcaaaccactgagagcagtcaatcctttgttgcagtacatcacagtgaggaaggcagggataccttaggaagcagtacaaatcttcataatcactctgagggagagtatattccaggagcttgtagtgcttcaagtgtccaaaatggaattgcattggttcatacagactcttatgatccagatggcaaacatggagaagataatgaccatcttcaactttctgcagaagtcgtggaaggtagtagataccaggaatcattaggcaatacagtatttgagttggaaaacagagaggcagaggcatacactggtctttcaccaccagttccctcatttaactgtgaagtaagagatgagtttgaagagttagattctgtaccattagtgaaaagttctgctggtgatactgagtttgtccatcagaatagccaggaaattcagaggtcttctcaagatgaaatggttagtacgaaacaacaaaataatactagccaggaaagacagacagaacattcacctgaagatgcagcctgtggtccagggcatatttgtagtgaacgaaataccaatgatagggaaaagaaccatggaagttctcctgaacaggtagtgaggccaaaagttagaaaactgataagttcaagccaggtggaccaagaaacaggttttaataggcatgaggcgaaacaaagaagtgttcaaagatggagagaggctttggaagttgaggaaagtggctcagatgacctcttaataaaatgtgaagaatatgatggagagcatgactgtatgttcttggatccaccatactcaagagttattacacaaagggaaacagaaaataaccaaatgacatcagaaagtggagccacagcgggaaggcaagaagtggataacaccttttggaatggctgtggagattattaccaactctatgacaaagatgaagatagttctgaatgcagtgatggggaatggtctgcttctttgcctcatcgattttctggtacagaaaaagatcaatcctcaagtgatgaaagctgggagactctgccaggaaaagatgagaatgaacctgagctacaaagtgatagcagtggccctgaagaagaaaaccaagaattatctcttcaggaaggggaacagacatccttggaagagggagaaattccttggttacagtacaatgaagtcaatgaaagcagcagtgatgagggaaatgaacctgccaatgaatttgcacagccagctttcatgttggatggtaacaataacctggaggatgactccagtgtgagtgaagacttagatgtggattggagcctatttgatggctttgcagatggactaggagttgctgaagctatttcatatgtggatcctcagttccttacctacatggcactagaagaacgcttagcccaggctatggagactgctctggcccatttagagtctcttgcagtggatgttgaggtggccaatccaccagctagtaaggaaagcattgatggtcttccagagacccttgttcttgaagatcacactgctattggtcaggaacaatgctgtccaatctgttgcagtgagtatattaaggatgatatagcaacagagttgccctgtcaccatttctttcacaaaccttgtgtctcaatttggctacaaaagtcgggaacatgccctgtgtgccgccgtcatttcccacctgcggttattgaagcatctgcagctccttcctctgagcctgatcctgatgccccaccttcaaatgacagtattgcagaagcaccctaaaccttgacagttgaaatgagatcagtgtatcaaagtaaatctgcaaattccttctaaatttcatgtgcaaataattatatataaatatatttaaaaatgctatatatagtatatgccatagtttagaaagaatattaacctttctaaactaaatttaggtttgcagaaagtattaaacatttttaagctgaatgttgagacagtgcatccattttctttagttgaatatgtttgtattaattgtaaagccaagcttatcagttgactctctccagaataaataatcatctgtgtggcatacgttattggctttgtctgtaatactgccactaagtgattataattaagctgtcctgtttgcatcaaatgtaaagactgtgttcacaaccgtagtaaaatttggtttcattggaaatgaaacaaattctaaagtatgctttttcactagtccctttgattttgctatatcataacctcttggttcatatgctgagaaatttttcagaaagtccatttttgtttaaaattagaacttttcagaatgccaaatgaaggctaaaattttggccagaacattacaaaagttttaaatcgtagacgtaactccccctgaaataaagttaggtagtaaaatccttaatgaaaccagtggatgtgcttaacgtaaggttagtaaagcatacaaagaatctagtgtgctcagggcttggtacaatgagctgaattagatggccttatgaaactctttctaacctcttacccaacctgtttctccttggttaaaattatacttgaaggcccagaacactcatggcacatttgtttaatattgcttatagttagtttaaggtaattttgcttctacagtattttggaaggtctgaaaacttgcacagggtcatctttgtaattatataaccccaaactaagatgcacaatgtctccttcaggtgatcacacacagtggacgagtatgtgcaaacatggacataatagttcacttacaaatgtgatttgatgttaacactagagaatgatgactgtagaacatttgagcaagtaaaatagtaaagcacatagtgagtgtatgtccgtctaactggtacattgataatttagtttgggcacataaaaggaatatttatatggcttcccaaatgcagagttacatcttattcgtgtatttctctgagtatttatatcccgtctccttttttcattcttaaaaataaatgaattttcactgttggcacatatgaggcttaaatataaggaacataacacttgcattctaatttttgcatatattgtaaatgtgtctggtatttacagcaaaatactgtgtatccttttatgggtaaaacaaaagtgaacattgcatgcatgtaatgtgatgaatttgtaatttaggagttctttggggcttctgtgacttgggaaatgcttacattcaggccttaatgttgcattagctagcatgttttccctctgatgtatatagtcactgttgtataaactaatctttgcttgttttctactctgtgatctttccatatcatatttcattaatgatcagttagtgtcaaggagtcaaaacagatttgtttccttttaaggtactgttgatcagttgtgacacttactggttaaacttacgttgctaaagatttctctataataagccacacattatatttagactatattaagggaccttggttttcttctagatagcagctgtcccaaagaaaatatttcttctttgtctgttaagatttagctattatctgccagttgttaagaggttttggttccaaactcaaccagcaatgttgagagctgaacttaagatagctgttgtactttttgctttccatctgttactgtccttcattcttggctccctactatctataaacagctgctgtgaagaagaaaagttgaataagagttggcttaaattttaaaaaagaaaaagaaaattgaggttttaggattttcatggtaacaagctctggtataagctaaggctggcaagttcagatactaaaatattatttgatcatatcttggatccttttgaaaaagttaagactatatgaaggtaaattagaaataagtatgaatattaataaaatagcatttatcttatttctctattttatgttgtgacttaacctaattttatttttttaacattttcttatttcttataatatgaatgctgatatttaaaggtagatctatgtggtattctttgtgtttcttaattgtttaactcttaagattatttgtgatctggatttatgtatttgttagatacatacgaattgttaaaatggaatgcaagtttttcaaaagcccaggtctaaatgtaatggttggtttattgttctataaccccagcccatcattttctgtgtaaatcataaacaataaacagaatatactcggtggtcatttctaatatttaatt

SEQ ID NO: 314004 - DNA, 3133 bp, Homo sapiens
cgccaccgccgccgccgccgccacagccgccagccgcttcgcgttcggcgggggaggagttggaggcggagaagaaggcggtggtggcgggtggaggttcgagcgctgttctcgctccggagccgctgcacatttcggaatcttctgcggcttgtccatagtgtgaataaaaactaaatcacatctataattctactgaactggtcatacagacgctgccatatatgtcacagtacactgaaaaggagccagcagcaatggaccaagaatctggtaaggctgtctggcccaaaccagcaggagggtatcagacaattacaggcaggagatatggaagaagacatgcttatgtcagttttaaaccatgtatgaccagacatgaaagaagcttaggtcgggctggtgatgactatgaagtgttggaactagatgatgttccaaaggaaaattcctcaggttccagtcctttggatcaagttgattcttctttacccagtgaacctatatttgaaaaaagtgaaacagaaattcccacttgtggttcagcattgaatcaaaccactgagagcagtcaatcctttgttgcagtacatcacagtgaggaaggcagggataccttaggaagcagtacaaatcttcataatcactctgagggagagtatattccaggagcttgtagtgcttcaagtgtccaaaatggaattgcattggttcatacagactcttatgatccagatggcaaacatggagaagataatgaccatcttcaactttctgcagaagtcgtggaaggtagtagataccaggaatcattaggcaatacagtatttgagttggaaaacagagaggcagaggcatacactggtctttcaccaccagttccctcatttaactgtgaagtaagagatgagtttgaagagttagattctgtaccattagtgaaaagttctgctggtgatactgagtttgtccatcagaatagccaggaaattcagaggtcttctcaagatgaaatggttagtacgaaacaacaaaataatactagccaggaaagacagacagaacattcacctgaagatgcagcctgtggtccagggcatatttgtagtgaacgaaataccaatgatagggaaaagaaccatggaagttctcctgaacaggtagtgaggccaaaagttagaaaactgataagttcaagccaggtggaccaagaaacaggttttaataggcatgaggcgaaacaaagaagtgttcaaagatggagagaggctttggaagttgaggaaagtggctcagatgacctcttaataaaatgtgaagaatatgatggagagcatgactgtatgttcttggatccaccatactcaagagttattacacaaagggaaacagaaaataaccaaatgacatcagaaagtggagccacagcgggaaggcaagaagtggataacaccttttggaatggctgtggagattattaccaactctatgacaaagatgaagatagttctgaatgcagtgatggggaatggtctgcttctttgcctcatcgattttctggtacagaaaaagatcaatcctcaagtgatgaaagctgggagactctgccaggaaaagatgagaatgaacctgagctacaaagtgatagcagtggccctgaagaagaaaaccaagaattatctcttcaggaaggggaacagacatccttggaagagggagaaattccttggttacagtacaatgaagtcaatgaaagcagcagtgatgagggaaatgaacctgccaatgaatttgcacagccagctttcatgttggatggtaacaataacctggaggatgactccagtgtgagtgaagacttagatgtggattggagcctatttgatggctttgcagatggactaggagttgctgaagctatttcatatgtggatcctcagttccttacctacatggcactagaagaacgcttagcccaggctatggagactgctctggcccatttagagtctcttgcagtggatgttgaggtggccaatccaccagctagtaaggaaagcattgatggtcttccagagacccttgttcttgaagatcacactgctattggtcaggaacaatgctgtccaatctgttgcagtgagtatattaaggatgatatagcaacagagttgccctgtcaccatttctttcacaaaccttgtgtctcaatttggctacaaaagcatctgcagctccttcctctgagcctgatcctgatgccccaccttcaaatgacagtattgcagaagcaccctaaaccttgacagttgaaatgagatcagtgtatcaaagtaaatctgcaaattccttctaaatttcatgtgcaaataattatatataaatatatttaaaaatgctatatatagtatatgccatagtttagaaagaatattaacctttctaaactaaatttaggtttgcagaaagtattaaacatttttaagctgaatgttgagacagtgcatccattttctttagttgaatatgtttgtattaattgtaaagccaagcttatcagttgactctctccagaataaataatcatctgtgtggcatacgtaaaaaaaaaaaaaaaaaaaaaaagaaacaaaacacaaaaaacaacaaacaaaaaaaaaaacaaaaacaaaaaaaacaaaaacaaaacaacaacaccacacaaaaaaaccaaaacggcgcgggggcgccccacacatgacacctcccccgcggcgggccgccacccccccctcaccccccttctccaaaaatgggacccctctaagaaggggaagtgtattcatattagtagatttatcgagggggaggtgcctataatagtcagaccttggcgcataatgaagagaaaccgaacgtagatggtaggagaacgcacaagtaggagacgggaccctcgccatagcacgaggcgcacgaacagcacaacaacgaggaagagagccccactacctactggtcagtgttatacccacgttgcggagtggaaaaacacacaccaagaccggccaagagaagcgtagcgggagcaccaaggccagcggagataaagcaggacgaccgaaacaagcaagcagtacccccggagggctgg

SEQ ID NO: 314005 - DNA, 1672 bp, Homo sapiens
cgccaccgccgccgccgccgccacagccgccagccgcttcgcgttcggcgggggaggagttggaggcggagaagaaggcggtggtggcgggtggaggttcgagcgctgttctcgctccggagccgctgcacatttcggaatcttctgcggcttgtccatagtgtgaataaaaactaaatcacatctataattctactgaactggtcatacagacgctgccatatatgtcacagtacactgaaaaggagccagcagcaatggaccaagaatctggtaaggctgtctggcccaaaccagcaggagggtatcagacaattacaggcaggagatatggaagaagacatgcttatgtcagttttaaaccatgtatgaccagacatgaaagaagcttaggtcgggctggtgatgactatgaagtgttggaactagatgatgttccaaaggaaaattcctcaggttccagtcctttggatcaagttgattcttctttacccagtgaacctatatttgaaaaaagtgaaacagaaattcccacttgtggttcagcattgaatcaaaccactgagagcagtcaatcctttgttgcagtacatcacagtgaggaaggcagggataccttaggaagcagtacaaatcttcataatcactctgagggagagtatattccaggagcttgtagtgcttcaagtgtccaaaatggaattgcattggttcatacagactcttatgatccagatggcaaacatggagaagataatgaccatcttcaactttctgcagaagtcgtggaaggtagtagataccaggaatcattaggcaatacagtatttgagttggaaaacagagaggcagaggcatacactggtctttcaccaccagttccctcatttaactgtgaagtaagagatgagtttgaagagttagattctgtaccattagtgaaaagttctgctggtgatactgagtttgtccatcagaatagccaggaaattcagaggtcttctcaagatgaaatggttagtacgaaacaacaaaataatactagccaggaaagacagacagaacattcacctgaagatgcagcctgtggtccagggcatatttgtagtgaacgaaataccaatgatagggaaaagaaccatggaagttctcctgaacaggtagtgaggccaaaagttagaaaactgataagttcaagccaggtggaccaagaaacaggttttaataggcatgaggcgaaacaaagaagtgttcaaagatggagagaggctttggaagttgaggaaagtggctcagatgacctcttaataaaatgtgaagaatatgatggagagcatgaacacaggcttatttttaaaataaaaatatttttaacatgggtttccttattgaaaaatcagtgtattagtcataaaaccccatcattaagaataattgaacaataaagtttgctttcagatgcagttttcaaattataatctcatttcaatttataacgttctcagtcctttgttataattttcctttttcatgtaagtttaattatctgcatttatcttttttcctagtttttctaatactaatgttatttcttaaaattcagtgagatataggataaaataatgctttgagaagaatgtttaatagaaaattaaaataaccttttctggca

SEQ ID NO: 314006 - DNA, 1681 bp, Homo sapiens
  misc_feature (658)..(658): n is a, c, g, or t
gttgatttacagcttggttttgtagaaaaatatttagtgagcaaagactctgctgtagaaaagctgatcctatttttttatgtgggctttacaccagctgaatactgatgaaaaaaaatcacatttgacaatattgattttaagatactctgatggtattaaaattttataaaaatgacatgttctgaaaggtaatgatttagttattaagcaaggggacatgctctaaaatttggaaccttaagattaagaatgtatttttctaatgtcagtctcctttgaagtttcatttttatgaagggttttatgtgtgtgtgtgtattgcctatatttaaacatcttttttctctgtgttctaatgatgaccgtgacaaaaattactttctcctgcgcctataaattcattttaaaggtggaaggatgcataaaaatgtctagtttccgtgtagagtagtattcgtaattcaaatagatggcagcattttaaatgtgctcttttgatgtttttcacaggtcgtggcaattctgcagaagttctattccaacagtgaaagtgcattggggttaaatttcatcaatgagctcatcataaggttccggcactgttctaagtgggttggaaggcaagctttcgctttcatttgtcagattctgaaangacttctttgggattaaagaagtgtatgtttctagaagactgcggaaaacatcatttctttggctgtgactttcttggagcaggcagtggtgagcaaggagtgtgtccccgtggaccagttcatggagcacctgcttcccagcctcctgagcctcgcatcagatcctgtgcccaacgtgagggttctgctagccaaggccctaaggcagatgctgttggaaaaggcgtattttagaaatgctggtaaccctcatcttgaagtcattgaagagaccatcttagcattgcagtcagaccgggaccaagatgtttccttttttgcagccctagaaccaaagcggcggaatatcatagacactgctgtactagaaaaacagaattaactacttccgtgatgagttgcaatctgattatttcatgcttggcacatatggcttaccataacttgaaggggaactgattgtattataccagctgggggagattttggaacctttcatactgtgcactcagtgattgacgccttttccatctgtaccccgaagggactgaacctgatgggggctttttctggatggctgggccatcctgatcaagcctgatcagtaagtctgtggaaagattgcagaccaggtggctaactgggcactggagcctctgaaccatcaggctgtctgccagcaagttcttttctccatggcagactgtatgatctgaagtccccccaaccctctccaagtaaagtagtttattagaagctcttaagtctttaatagacctgcatatttccttcccttatgatttcctataaaatatagtttatggtgttatatttttaactgaaatactgtacatatgtaaataactcttgacaggaagaaaatatattaatgtagtatttgccccctatcagtgagctgaacaaatacatcatttaaatctatgctgcactttgagttgctacaaatatggttcgatttgtttatttttgaaaaatgtgataaagaaatctaaagaatgaaa

SEQ ID NO: 314007 - DNA, 1546 bp, Homo sapiens
  misc_feature (34)..(34): n is a, c, g, or t
  misc_feature (43)..(43): n is a, c, g, or t
tgaaatataaaatcaataataatttttatttttngttcagcanagcctgtgcggagcgagccagagctacctgtggaagggacctcagcgaaaaccagtgattgcccacacagcagtagctcctctgacggcccagcggaaagccctgtggaaagctgtgtgtcggctggagctgagtggaccagggtttccccagagaccagcgcctgctcaaagctttctgacatgaatgacctccccatcagcagctaccctggatcagattcctgggcctgcccagggaacactgaggatgtgttcagtcattttctttattggtgaactcctctccctgacataagcaaggacttagagctgcttctgagtgaggctgggcctcaggaggacgactgcagcagacctggggttgtgcacaacagctgtgtggcccggagtgagattcagaaagtccttggtagcttgcaggagcatctgatgaatgatccagatgttcaagctcaagttcaggtattatccgctgcactgagagctgcacagctcgactgcgtgaatgaagctgagagcaagccaacagcaggcctaaaggaagtgtccatttcacatcccagctctgcctctgacaatcagatcgctctggcggcctcatcatctcaggatgagctctttgtggccaggatattacaaagcccagatccaggtggacccagaaatggaaccagtgaccatctggagactgaccagaggcaggatcccaccccacttgaagagaataaatctaaattacaggatgtaatacctcagccgctgctagatcagtatgtgtccatgactgacccagctcgagcccagactgtcgatactgacatagccaaacactgtgcctacagcctcccaggggtggcactgaccctgggcaggcaaaattggcactgcctgaaagatacatatgaaacactggcttctgatgtacagtggaaggtacggcgagccctagccttctccattcacgagctggctgtgattcttggggatcagttaacagcagctgacctggtgcctatcttcaatggatttttaaaggatctggatgaagtgcgaataggagttcttagacacctgtatgattttctaaagttgcttcatgaagacaagaggagagactatctttatcagcttcaagaatttgtagtgactgataacagcaggaattggaggtttcgatatgaactagcagaacagctgatactgattctggaactctatagtcccaatgatgtttatgattacctaatgcacattgccttaaagttgtgtgcagatcaagtttctgaagttcggtggatctccttcaaactagtaaggaatcagggcatttgctctgtgatttttacaaataggaatgttgatgtatcttccattttaactcttttaatttttctgggcttactttgtcagctaacctatgaaactagcttttaaaatttgaaattaggaactatattatagttttatcaatttgtaggatagctttttttgttatatgttt

SEQ ID NO: 314008 - DNA, 1131 bp, Homo sapiens
  misc_feature (34)..(34): n is a, c, g, or t
  misc_feature (43)..(43): n is a, c, g, or t
tgaaatataaaatcaataataatttttatttttngttcagcanagcctgtgcggagcgagccagagctacctgtggaagggacctcagcgaaaaccagtgattgcccacacagcagtagctcctctgacggcccagcggaaagccctgtggaaagctgtgtgtcggctggagctgagtggaccagggtttccccagagaccagcgcctgctcaaagctttctgacatgaatgacctccccatcagcagctaccctggatcagattcctgggcctgcccagggaacactgaggatgtgttcagtcattttctttattggtgaactcctctccctgacataagcaaggacttagagctgcttctgagtgaggctgggcctcaggaggacgactgcagcagacctggggttgtgcacaacagctgtgtggcccggagtgagattcagaaagtccttggtagcttgcaggagcatctgatgaatgatccagatgttcaagctcaagttcaggtattatccgctgcactgagagctgcacagctcgactgcgtgaatgaagctgagagcaagccaacagcaggcctaaaggaagtgtccatttcacatcccagctctgcctctgacaatcagatcgctctggcggcctcatcatctcaggatgagctctttgtggccaggatattacaaagcccagatccaggtggacccagaaatggaaccagtgaccatctggagactgaccagaggcaggatcccaccccacttgaagagaataaatctaaattacaggatgtaatacctcagccgctgctagatcagtatgtgtccatgactgacccagctcgagcccagactgtcgatactgacatagccaaacactgtgcctacagcctcccaggggtggcactgaccctgggcaggcaaaattggcactgcctgaaagatacatatgaaacactggcttctgatgtacaggtaaaagcctttccagaggcacgtgcagaaagagggtgggtcattcattagggagaaaagggaagctgcagcaaggcttattggcctgaattttatgtggatgcaaattggcatgtttactggtctctgatgaaataaagctttaagtggccaacacct

SEQ ID NO: 314009 - DNA, 482 bp, Homo sapiens
ctgaagccctttggctttaggaaggcctcatgttcctctcacatttctgctttattgttttcacctctaaactccaaactccttgtttttcatgagtattttcctgcattcacgatggcctcctttctctctcatttcccaggatgtaatacctcagccgctgctagatcagtatgtgtccatgactgacccagctcgagcccagactgtcgatactgacatagccaaacactgtgcctacagcctcccaggggtggcactgaccctgggcaggcaaaattggcactgcctgaaagatacatatgaaacactggcttctgatgtacaggtaaaagcctttccagaggcacgtgcagaaagagggtgggtcattcattagggagaaaagggaagctgcagcaaggcttattggcctgaattttatgtggatgcaaattggcatgtttactggtctctgatgaaataaagctttaagtggccaa

SEQ ID NO: 314010 - DNA, 2524 bp, Homo sapiens
  misc_feature (34)..(34): n is a, c, g, or t
  misc_feature (43)..(43): n is a, c, g, or t
  misc_feature (1501)..(1501): n is a, c, g, or t
tgaaatataaaatcaataataatttttatttttngttcagcanagcctgtgcggagcgagccagagctacctgtggaagggacctcagcgaaaaccagtgattgcccacacagcagtagctcctctgacggcccagcggaaagccctgtggaaagctgtgtgtcggctggagctgagtggaccagggtttccccagagaccagcgcctgctcaaagctttctgacatgaatgacctccccatcagcagctaccctggatcagattcctgggcctgcccagggaacactgaggatgtgttcagtcattttctttattggtgaactcctctccctgacataagcaaggacttagagctgcttctgagtgaggctgggcctcaggaggacgactgcagcagacctggggttgtgcacaacagctgtgtggcccggagtgagattcagaaagtccttggtagcttgcaggagcatctgatgaatgatccagatgttcaagctcaagttcaggtattatccgctgcactgagagctgcacagctcgactgcgtgaatgaagctgagagcaagccaacagcaggcctaaaggaagtgtccatttcacatcccagctctgcctctgacaatcagatcgctctggcggcctcatcatctcaggatgagctctttgtggccaggatattacaaagcccagatccaggtggacccagaaatggaaccagtgaccatctggagactgaccagaggcaggatcccaccccacttgaagagaataaatctaaattacaggatgtaatacctcagccgctgctagatcagtatgtgtccatgactgacccagctcgagcccagactgtcgatactgacatagccaaacactgtgcctacagcctcccaggggtggcactgaccctgggcaggcaaaattggcactgcctgaaagatacatatgaaacactggcttctgatgtacagtggaaggtacggcgagccctagccttctccattcacgagctggctgtgattcttggggatcagttaacagcagctgacctggtgcctatcttcaatggatttttaaaggatctggatgaagtgcgaataggagttcttagacacctgtatgattttctaaagttgcttcatgaagacaagaggagagactatctttatcagcttcaagaatttgtagtgactgataacagcaggaattggaggtttcgatatgaactagcagaacagctgatactgattctggaactctatagtcccaatgatgtttatgattacctaatgcacattgccttaaagttgtgtgcagatcaagtttctgaagttcggtggatctccttcaaactagtcgtggcaattctgcagaagttctattccaacagtgaaagtgcattggggttaaatttcatcaatgagctcatcataaggttccggcactgttctaagtgggttggaaggcaagctttcgctttcatttgtcagattctgaaangacttctttgggattaaagaagtgtatgtttctagaagactgcggaaaacatcatttctttggctgtgactttcttggagcaggcagtggtgagcaaggagtgtgtccccgtggaccagttcatggagcacctgcttcccagcctcctgagcctcgcatcagatcctgtgcccaacgtgagggttctgctagccaaggccctaaggcagatgctgttggaaaaggcgtattttagaaatgctggtaaccctcatcttgaagtcattgaagagaccatcttagcattgcagtcagaccgggaccaagatgtttccttttttgcagccctagaaccaaagcggcggaatatcatagacactgctgtactagaaaaacagaattaactacttccgtgatgagttgcaatctgattatttcatgcttggcacatatggcttaccataacttgaaggggaactgattgtattataccagctgggggagattttggaacctttcatactgtgcactcagtgattgacgccttttccatctgtaccccgaagggactgaacctgatgggggctttttctggatggctgggccatcctgatcaagcctgatcagtaagtctgtggaaagattgcagaccaggtggctaactgggcactggagcctctgaaccatcaggctgtctgccagcaagttcttttctccatggcagactgtatgatctgaagtccccccaaccctctccaagtaaagtagtttattagaagctcttaagtctttaatagacctgcatatttccttcccttatgatttcctataaaatatagtttatggtgttatatttttaactgaaatactgtacatatgtaaataactcttgacaggaagaaaatatattaatgtagtatttgccccctatcagtgagctgaacaaatacatcatttaaatctatgctgcactttgagttgctacaaatatggttcgatttgtttatttttgaaaaatgtgataaagaaatctaaagaatgaaa

SEQ ID NO: 314011 - DNA, 310 bp, Homo sapiens
atttgaacactcatcagtaactttgatatatagtgaatccgccttttaggaataccttttctatatagttgtttaaacaccaaaggcattttaagaggtagaatatatggactgatactaatccacacttgtcttttctgatgggagaccagaattctctttagagccaacagaaccagccactgttccaattcccttggaacatttttgttgtatatttacagctccctatgcttaagagaatggtgcatctgtctgatggagacgcctggctgcattctttcccagatattaatataggtggcacttt

SEQ ID NO: 314012 - DNA, 725 bp, Homo sapiens
agcgggggaagggcggccgacccatataagcagcctgcggggcgttccctcgggttgtggttggtgtgcgggtttcggttggaggactcgttggggaggtggcctgcgcttgtagagactgcatccccgagacgatggcggagggagataatcgcagcaccaacctgctggctgcagagactgcaagtctggaagaacagctgcaaggatggggagaagtgatgctgatggctgataaagtcctccgatgggaaagagcctggtttccacctgccatcatgggtgtggtttctttggtgtttctgattatctactatctagatccatctgttctgtccggcgtttcctgttttgttatgtttttgtgcttggctgactaccttgttcccattctagcgcctagaatttttggctccaataaatggaccactgaacaacagcaaagattccatgaaatttgcagcaatctagtaaaaactcgacgcagagctgtgggttggtggaaacgcctcttcacactaaaggaagaaaaacctaagatgtacttcatgaccatgatcgtttcccttgctgcggttgcttgggtgggacaacaagtccacaacctgcttctcacctacctgatagtgacttccttactattgcttcctggactaaaccaacatggaatcattttgaagtacattggaatggccaagagggagataaacaaacttctcaaacaa

SEQ ID NO: 314013 - DNA, 885 bp, Homo sapiens
attacaactgggtccgtacaaccgccggcaagtccagccctttccgaaaagggtgaagatctccccccccatgtctgtcactgcctctgccatcggctgatccttttccagccatagaactcccacaggcatcccatctgacaccaccctgccacgtggatggagatgcactcacgcatgactagaacttgaagggtcttcgcggtgaaggagcgaaggacgcacaccaggatctcggttggaggactcgttggggaggtggcctgcgcttgtagagactgcatccccgagacgatggcggagggagataatcgcagcaccaacctgctggctgcagagactgcaagtctggaagaacagctgcaaggatggggagaagtgatgctgatggctgataaagtcctccgatgggaaagagcctggtttccacctgccatcatgggtgtggtttctttggtgtttctgattatctactatctagatccatctgttctgtccggcgtttcctgttttgttatgtttttgtgcttggctgactaccttgttcccattctagcgcctagaatttttggctccaataaatggaccactgaacaacagcaaagattccatgaaatttgcagcaatctagtaaaaactcgacgcagagctgtgggttggtggaaacgcctcttcacactaaaggaagaaaaacctaagatgtacttcatgaccatgatcgtttcccttgctgcggttgcttgggtgggacaacaagtccacaacctgcttctcacctacctgatagtgacttccttactattgcttcctggactaaaccaacatggaatcattttgaagtacattggaatggccaagagggagataaacaaacttctcaaacaa

SEQ ID NO: 314014 - DNA, 329 bp, Homo sapiens
  misc_feature (50)..(50): n is a, c, g, or t
tccttttcctatcacatcatatattcactccgtacccacgctaccattcnctcctctgtccctattaaataagtgttgttttctcctctttaatattgctgtgaacagtggtgcccattgtagcatatgtttgatttttttttattatttcataagaaaactacgttaattttaccttactttcattgtaaataagcctgtcttcctatctggattttttgtgtgcatacatattctactgattaactacttttgcagttttaatcctgtattatttcttctactttgttttgtgtaaaaggggaaaaaataaaaaaagctggaatctt

SEQ ID NO: 314015 - DNA, 835 bp, Homo sapiens
agcgggggaagggcggccgacccatataagcagcctgcggggcgttccctcgggttgtggttggtgtgcgggtttcggttggaggactcgttggggaggtggcctgcgcttgtagagactgcatccccgagacgatggcggagggagataatcgcagcaccaacctgctggctgcagagactgcaagtctggaagaacagctgcaaggatggggagaagtgatgctgatggctgataaagtcctccgatgggaaagagcctggtttccacctgccatcatgggtgtggtttctttggtgtttctgtaagtgagctattagattactatgggttgtgcttcttattaataaagactttttaatatatagcttctgtttgtgggagtgccttaagtcttctgtaatatataacccataaagaacccataaagaatgtttctcataagcacttctagtttccagaatttgtagtacttctgtaaacttggtaacctaaagcacttgagtaaatcagtgactcgcaaactttttgtcctccagacacttaaatttttttttgttattatactttaagttctgggatacatgtgtagaatgtacaggtttgttacataggtatatatacatgtgccatggtggtttgctgcacccatcaacccttcatctacattaggtatttctcctaatgctatccctcccctagtcccccacctccctaaactcttaaaaaagtgctgagaactccaaagagcttttgtccattgatatatacttaaccactgcagctatgatatcagcatgtcacaaagcctctggaaagccacttgtgagaaaat

SEQ ID NO: 314016 - DNA, 2413 bp, Homo sapiens
  misc_feature (2362)..(2362): n is a, c, g, or t
  misc_feature (2381)..(2381): n is a, c, g, or t
  misc_feature (2405)..(2405): n is a, c, g, or t
agcgggggaagggcggccgacccatataagcagcctgcggggcgttccctcgggttgtggttggtgtgcgggtttcggttggaggactcgttggggaggtggcctgcgcttgtagagactgcatccccgagacgatggcggagggagataatcgcagcaccaacctgctggctgcagagactgcaagtctggaagaacagctgcaaggatggggagaagtgatgctgatggctgataaagtcctccgatgggaaagagcctggtttccacctgccatcatgggtgtggtttctttggtgtttctgattatctactatctagatccatctgttctgtccggcgtttcctgttttgttatgtttttgtgcttggctgactaccttgttcccattctagcgcctagaatttttggctccaataaatggaccactgaacaacagcaaagattccatgaaatttgcagcaatctagtaaaaactcgacgcagagctgtgggttggtggaaacgcctcttcacactaaaggaagaaaaacctaagatgtacttcatgaccatgatcgtttcccttgctgcggttgcttgggtgggacaacaagtccacaacctgcttctcacctacctgatagtgacttccttactattgcttcctggactaaaccaacatggaatcattttgaagtacattggaatggccaagagggagataaacaaacttctcaaacaaaaagaaaagaaaaacgaatgattcatctgctttaatcagtgtgattaatgcagcacccattgccccgggaaccgtttctgctgtactatctggatactaaaatgttacggaagtagctctttgttctccctcactctgcccttagttaatagaaattcagactcgccaagtaaggcttcgtgcatagtgtcttcatgtcgcgtatagttgagcgcgttcttagcagttggcttcatggacaactcattagtgttttgacttttcttacccagcgttaattgaattcttgcttttagacaacttcctttttgtagtggtgaaccttgccctttagtacagttcaagtgaatctggataattgttcatctttgctttagcttagataccatgtagtggtctgtggctacaggaagctggttctgtctgcttccacagtctgcttaaaaaactgtctgacttcgtgaatatagagaccaagtttaccacttctgatgaagagaccaattaagattcattcctcattctgtttctttccagtgggagaagagtccccatgaaataagatgaaactgattccatgcactagtacatgtaggcttctcccttgtgcaaagcttagcaatttgtaggaaactttgatctttttgtccaagaaaaggaatgtctgacaggcttaagctttcgtccccttgcacttagactcgaagttagtaaatccttaaaggctttttaatagcagacttccaaaagattgcatttaggatttctagcatgcttttaatttcagattttcagctgacattagctatagtatacagtaggttaagactcatgtctatgactttcactctaagactggcaaaaggacagcagtcttctatgtttagtcaatattcatttcagtagaagataatcttatctaatttttgagaccagaataagccttttaaggtaaacctcaaaattatcattttatggtaatactgaccattttagtcccctaggtttgacatgggagatagtgactacactggtgtctgacttttttcctagagatttctccctgaaaaatacaagggctgttggtgagagcagacttgaggtgatgatagttggcctctggtctacaaagatttcataactccttggaaagcttcttataatcattcttaacttcttggtagctagaaatttagagtagttgcaatctttaggaatgaacttctgagggccaaaaaatgtgactgacgggaacaattcttaaactgattaactagctgtaatatagttttgtgaatttattgcactgatgttgtaccttgtggtatatctgtccctattaaataagtgttgttttctcctctttaatattgctgtgaacagtggtgcccattgtagcatatgtttgatttttttttattatttcataagaaaactacgttaattttaccttactttcattgtaaataagcctgtcttcctatctggattttttgtgtgcatacatattctactgattaactacttttgcagttttaatcctgtattatttcttctactttgttttgtgtaaaaggggaaaaaataaaaaaagctggaatcttaaaaaaaaaaaaaaaaaaaaaaaaaaaaaaaanctcgggggggggccccggnccccaattcggccctatagggggngccgggtt

SEQ ID NO: 314017 - DNA, 2329 bp, Homo sapiens
agcgggggaagggcggccgacccatataagcagcctgcggggcgttccctcgggttgtggttggtgtgcgggtttcggttggaggactcgttggggaggtggcctgcgcttgtagagactgcatccccgagacgatggcggagggagataatcgcagcaccaacctgctggctgcagagactgcaagtctggaagaacagctgcaaggatggggagaagtgatgctgatggctgataaagtcctccgatgggaaagagcctggtttccacctgccatcatgggtgtggtttctttggtgtttctgattatctactatctagatccatctgttctgtccggcgtttcctgttttgttatgtttttgtgcttggctgactaccttgttcccattctagcgcctagaatttttggctccaataaatggaccactgaacaacagcaaagattccatgaaatttgcagcaatctagtaaaaactcgacgcagagctgtgggttggtggaaacgcctcttcacactaaaggaagaaaaacctaagatgtacttcatgaccatgatcgtttcccttgctgcggttgcttgggtgggacaacaagtccacaacctgcttctcacctacctgatagtgacttccttactattgcttcctggactaaaccaacatggaatcattttgaagtacattggaatggccaagagggagataaacaaacttctcaaacaaaaagaaaagaaaaacgaatgattcatctgctttaatcagtgtgattaatgcagcacccattgccccgggaaccgtttctgctgtactatctggatactaaaatgttacggaagtagctctttgttctccctcactctgcccttagttaatagaaattcagactcgccaagtaaggcttcgtgcatagtgtcttcatgtcgcgtatagttgagcgcgttcttagcagttggcttcatggacaactcattagtgttttgacttttcttacccagcgttaattgaattcttgcttttagacaacttcctttttgtagtggtgaaccttgccctttagtacagttcaagtgaatctggataattgttcatctttgctttagcttagataccatgtagtggtctgtggctacaggaagctggttctgtctgcttccacagtctgcttaaaaaactgtctgacttcgtgaatatagagaccaagtttaccacttctgatgaagagaccaattaagattcattcctcattctgtttctttccagtgggagaagagtccccatgaaataagatgaaactgattccatgcactagtacatgtaggcttctcccttgtgcaaagcttagcaatttgtaggaaactttgatctttttgtccaagaaaaggaatgtctgacaggcttaagctttcgtccccttgcacttagactcgaagttagtaaatccttaaaggctttttaatagcagacttccaaaagattgcatttaggatttctagcatgcttttaatttcagattttcagctgacattagctatagtatacagtaggttaagactcatgtctatgactttcactctaagactggcaaaaggacagcagtcttctatgtttagtcaatattcatttcagtagaagataatcttatctaatttttgagaccagaataagccttttaaggtaaacctcaaaattatcattttatggtaatactgaccattttagtcccctaggtttgacatgggagatagtgactacactggtgtctgacttttttcctagagatttctccctgaaaaatacaagggctgttggtgagagcagacttgaggtgatgatagttggcctctggtctacaaagatttcataactccttggaaagcttcttataatcattcttaacttcttggtagctagaaatttagagtagttgcaatctttaggaatgaacttctgagggccaaaaaatgtgactgacgggaacaattcttaaactgattaactagctgtaatatagttttgtgaatttattgcactgatgttgtaccttgtggtatatctgtccctattaaataagtgttgttttctcctctttaatattgctgtgaacagtggtgcccattgtagcatatgtttgatttttttttattatttcataagaaaactacgttaattttaccttactttcattgtaaataagcctgtcttcctatctggattttttgtgtgcatacatattctactgattaactacttttgcagttttaatcctgtattatttcttctactttgttttgtgtaaaaggggaaaaaataaaaaaagctggaatctt

SEQ ID NO: 314018 - DNA, 2817 bp, Homo sapiens
  misc_feature (2530)..(2531): n is a, c, g, or t
attacaactgggtccgtacaaccgccggcaagtccagccctttccgaaaagggtgaagatctccccccccatgtctgtcactgcctctgccatcggctgatccttttccagccatagaactcccacaggcatcccatctgacaccaccctgccacgtggatggagatgcactcacgcatgactagaacttgaagggtcttcgcggtgaaggagcgaaggacgcacaccaggatctcggttggaggactcgttggggaggtggcctgcgcttgtagagactgcatccccgagacgatggcggagggagataatcgcagcaccaacctgctggctgcagagactgcaagtctggaagaacagctgcaaggatggggagaagtgatgctgatggctgataaagtcctccgatgggaaagagcctggtttccacctgccatcatgggattatctactatctagatccatctgttctgtccggcgtttcctgttttgttatgtttttgtgcttggctgactaccttgttcccattctagcgcctagaatttttggctccaataaatggaccactgaacaacagcaaagattccatgaaatttgcagcaatctagtaaaaactcgacgcagagctgtgggttggtggaaacgcctcttcacactaaaggaagaaaaacctaagatgtacttcatgaccatgatcgtttcccttgctgcggttgcttgggtgggacaacaagtccacaacctgcttctcacctacctgatagtgacttccttactattgcttcctggactaaaccaacatggaatcattttgaagtacattggaatggccaagagggagataaacaaacttctcaaacaaaaagaaaagaaaaacgaatgattcatctgctttaatcagtgtgattaatgcagcacccattgccccgggaaccgtttctgctgtactatctggatactaaaatgttacggaagtagctctttgttctccctcactctgcccttagttaatagaaattcagactcgccaagtaaggcttcgtgcatagtgtcttcatgtcgcgtatagttgagcgcgttcttagcagttggcttcatggacaactcattagtgttttgacttttcttacccagcgttaattgaattcttgcttttagacaacttcctttttgtagtggtgaaccttgccctttagtacagttcaagtgaatctggataattgttcatctttgctttagcttagataccatgtagtggtctgtggctacaggaagctggttctgtctgcttccacagtctgcttaaaaaactgtctgacttcgtgaatatagagaccaagtttaccacttctgatgaagagaccaattaagattcattcctcattctgtttctttccagtgggagaagagtccccatgaaataagatgaaactgattccatgcactagtacatgtaggcttctcccttgtgcaaagcttagcaatttgtaggaaactttgatctttttgtccaagaaaaggaatgtctgacaggcttaagctttcgtccccttgcacttagactcgaagttagtaaatccttaaaggctttttaatagcagacttccaaaagattgcatttaggatttctagcatgcttttaatttcagattttcagctgacattagctatagtatacagtaggttaagactcatgtctatgactttcactctaagactggcaaaaggacagcagtcttctatgtttagtcaatattcatttcagtagaagataatcttatctaatttttgagaccagaataagccttttaaggtaaacctcaaaattatcattttatggtaatactgaccattttagtcccctaggtttgacatgggagatagtgactacactggtgtctgacttttttcctagagatttctccctgaaaaatacaagggctgttggtgagagcagacttgaggtgatgatagttggcctctggtctacaaagatttcataactccttggaaagcttcttataatcattcttaacttcttggtagctagaaatttagagtagttgcaatctttaggaatgaacttctgagggccaaaaaatgtgactgacgggaacaattcttaaactgattaactagctgtaatatagttttgtgaatttattgcactgatgttgtaccttgtggtatatctgtccctattaaataagtgttgttttctcctctttaatattgctgtgaacagtggtgcccattgtagcatatgtttgatttttttttattatttcataagaaaactacgttaattttaccttactttcattgtaaataagcctgtcttcctatctggattttttgtgtgcatacatattctactgattaactacttttgcagttttaatcctgtattatttcttctactttgttttgtgtaaaaggggaaaaaataaaaaaagctggaatcttaaaaaaaaaaaaaaaaaaaaaaaaaaaaaaaaaaaaagaaaaaagaaaaaaaaaaaaaaaaanncaagaaaaaaaaacaaaaagaaaaacaaaaaaacaaacgaaaaataaaatggagtacaataaaaatcagaacaaagatgaaaaaaaagaggggggcgggccgccgacaagaaaatccatgcgaactccgcggaaggaggaccagaaaagacaacgcaacaacagaagtatattaggaagaggaagacgcagacccacaaagaggagaaaatatatataaaaaaacgacagagcggcgcgcctctataaaacaacacgggagaagaaacaaaacgagcggggtgctt

SEQ ID NO: 314019 - DNA, 2653 bp, Homo sapiens
  misc_feature (2366)..(2367): n is a, c, g, or t
agcgggggaagggcggccgacccatataagcagcctgcggggcgttccctcgggttgtggttggtgtgcgggtttcggttggaggactcgttggggaggtggcctgcgcttgtagagactgcatccccgagacgatggcggagggagataatcgcagcaccaacctgctggctgcagagactgcaagtctggaagaacagctgcaaggatggggagaagtgatgctgatggctgataaagtcctccgatgggaaagagcctggtttccacctgccatcatgggtgtggtttctttggtgtttctgattatctactatctagatccatctgttctgtccggcgtttcctgttttgttatgtttttgtgcttggctgactaccttgttcccattctagcgcctagaatttttggctccaataaatggaccactgaacaacagcaaagattccatgaaatttgcagcaatctagtaaaaactcgacgcagagctgtgggttggtggaaacgcctcttcacactaaaggaagaaaaacctaagatgtacttcatgaccatgatcgtttcccttgctgcggttgcttgggtgggacaacaagtccacaacctgcttctcacctacctgatagctaaaccaacatggaatcattttgaagtacattggaatggccaagagggagataaacaaacttctcaaacaaaaagaaaagaaaaacgaatgattcatctgctttaatcagtgtgattaatgcagcacccattgccccgggaaccgtttctgctgtactatctggatactaaaatgttacggaagtagctctttgttctccctcactctgcccttagttaatagaaattcagactcgccaagtaaggcttcgtgcatagtgtcttcatgtcgcgtatagttgagcgcgttcttagcagttggcttcatggacaactcattagtgttttgacttttcttacccagcgttaattgaattcttgcttttagacaacttcctttttgtagtggtgaaccttgccctttagtacagttcaagtgaatctggataattgttcatctttgctttagcttagataccatgtagtggtctgtggctacaggaagctggttctgtctgcttccacagtctgcttaaaaaactgtctgacttcgtgaatatagagaccaagtttaccacttctgatgaagagaccaattaagattcattcctcattctgtttctttccagtgggagaagagtccccatgaaataagatgaaactgattccatgcactagtacatgtaggcttctcccttgtgcaaagcttagcaatttgtaggaaactttgatctttttgtccaagaaaaggaatgtctgacaggcttaagctttcgtccccttgcacttagactcgaagttagtaaatccttaaaggctttttaatagcagacttccaaaagattgcatttaggatttctagcatgcttttaatttcagattttcagctgacattagctatagtatacagtaggttaagactcatgtctatgactttcactctaagactggcaaaaggacagcagtcttctatgtttagtcaatattcatttcagtagaagataatcttatctaatttttgagaccagaataagccttttaaggtaaacctcaaaattatcattttatggtaatactgaccattttagtcccctaggtttgacatgggagatagtgactacactggtgtctgacttttttcctagagatttctccctgaaaaatacaagggctgttggtgagagcagacttgaggtgatgatagttggcctctggtctacaaagatttcataactccttggaaagcttcttataatcattcttaacttcttggtagctagaaatttagagtagttgcaatctttaggaatgaacttctgagggccaaaaaatgtgactgacgggaacaattcttaaactgattaactagctgtaatatagttttgtgaatttattgcactgatgttgtaccttgtggtatatctgtccctattaaataagtgttgttttctcctctttaatattgctgtgaacagtggtgcccattgtagcatatgtttgatttttttttattatttcataagaaaactacgttaattttaccttactttcattgtaaataagcctgtcttcctatctggattttttgtgtgcatacatattctactgattaactacttttgcagttttaatcctgtattatttcttctactttgttttgtgtaaaaggggaaaaaataaaaaaagctggaatcttaaaaaaaaaaaaaaaaaaaaaaaaaaaaaaaaaaaaagaaaaaagaaaaaaaaaaaaaaaaanncaagaaaaaaaaacaaaaagaaaaacaaaaaaacaaacgaaaaataaaatggagtacaataaaaatcagaacaaagatgaaaaaaaagaggggggcgggccgccgacaagaaaatccatgcgaactccgcggaaggaggaccagaaaagacaacgcaacaacagaagtatattaggaagaggaagacgcagacccacaaagaggagaaaatatatataaaaaaacgacagagcggcgcgcctctataaaacaacacgggagaagaaacaaaacgagcggggtgctt

SEQ ID NO: 314020 - DNA, 2399 bp, Homo sapiens
  misc_feature (2112)..(2113): n is a, c, g, or t
agcgggggaagggcggccgacccatataagcagcctgcggggcgttccctcgggttgtggttggtgtgcgggtttcggttggaggactcgttggggaggtggcctgcgcttgtagagactgcatccccgagacgatggcggagggagataatcgcagcaccaacctgctggctgcagagactgcaagtctggaagaacgaccactgaacaacagcaaagattccatgaaatttgcagcaatctagtaaaaactcgacgcagagctgtgggttggtggaaacgcctcttcacactaaaggaagaaaaacctaagatgtacttcatgaccatgatcgtttcccttgctgcggttgcttgggtgggacaacaagtccacaacctgcttctcacctacctgatagtgacttccttactattgcttcctggactaaaccaacatggaatcattttgaagtacattggaatggccaagagggagataaacaaacttctcaaacaaaaagaaaagaaaaacgaatgattcatctgctttaatcagtgtgattaatgcagcacccattgccccgggaaccgtttctgctgtactatctggatactaaattcagactcgccaagtaaggcttcgtgcatagtgtcttcatgtcgcgtatagttgagcgcgttcttagcagttggcttcatggacaactcattagtgttttgacttttcttacccagcgttaattgaattcttgcttttagacaacttcctttttgtagtggtgaaccttgccctttagtacagttcaagtgaatctggataattgttcatctttgctttagcttagataccatgtagtggtctgtggctacaggaagctggttctgtctgcttccacagtctgcttaaaaaactgtctgacttcgtgaatatagagaccaagtttaccacttctgatgaagagaccaattaagattcattcctcattctgtttctttccagtgggagaagagtccccatgaaataagatgaaactgattccatgcactagtacatgtaggcttctcccttgtgcaaagcttagcaatttgtaggaaactttgatctttttgtccaagaaaaggaatgtctgacaggcttaagctttcgtccccttgcacttagactcgaagttagtaaatccttaaaggctttttaatagcagacttccaaaagattgcatttaggatttctagcatgcttttaatttcagattttcagctgacattagctatagtatacagtaggttaagactcatgtctatgactttcactctaagactggcaaaaggacagcagtcttctatgtttagtcaatattcatttcagtagaagataatcttatctaatttttgagaccagaataagccttttaaggtaaacctcaaaattatcattttatggtaatactgaccattttagtcccctaggtttgacatgggagatagtgactacactggtgtctgacttttttcctagagatttctccctgaaaaatacaagggctgttggtgagagcagacttgaggtgatgatagttggcctctggtctacaaagatttcataactccttggaaagcttcttataatcattcttaacttcttggtagctagaaatttagagtagttgcaatctttaggaatgaacttctgagggccaaaaaatgtgactgacgggaacaattcttaaactgattaactagctgtaatatagttttgtgaatttattgcactgatgttgtaccttgtggtatatctgtccctattaaataagtgttgttttctcctctttaatattgctgtgaacagtggtgcccattgtagcatatgtttgatttttttttattatttcataagaaaactacgttaattttaccttactttcattgtaaataagcctgtcttcctatctggattttttgtgtgcatacatattctactgattaactacttttgcagttttaatcctgtattatttcttctactttgttttgtgtaaaaggggaaaaaataaaaaaagctggaatcttaaaaaaaaaaaaaaaaaaaaaaaaaaaaaaaaaaaaagaaaaaagaaaaaaaaaaaaaaaaanncaagaaaaaaaaacaaaaagaaaaacaaaaaaacaaacgaaaaataaaatggagtacaataaaaatcagaacaaagatgaaaaaaaagaggggggcgggccgccgacaagaaaatccatgcgaactccgcggaaggaggaccagaaaagacaacgcaacaacagaagtatattaggaagaggaagacgcagacccacaaagaggagaaaatatatataaaaaaacgacagagcggcgcgcctctataaaacaacacgggagaagaaacaaaacgagcggggtgctt

SEQ ID NO: 314021 - DNA, 1995 bp, Homo sapiens
  misc_feature (1708)..(1709): n is a, c, g, or t
ctcgtgccgaattcggcacgagcctaaaccaacatggaatcattttgaagtacattggaatggccaagagggagataaacaaacttctcaaacaaaaagaaaagaaaaacgaatgattcatctgctttaatcagtgtgattaatgcagcacccattgccccgggaaccgtttctgctgtactatctggatactaaattcagactcgccaagtaaggcttcgtgcatagtgtcttcatgtcgcgtatagttgagcgcgttcttagcagttggcttcatggacaactcattagtgttttgacttttcttacccagcgttaattgaattcttgcttttagacaacttcctttttgtagtggtgaaccttgccctttagtacagttcaagtgaatctggataattgttcatctttgctttagcttagataccatgtagtggtctgtggctacaggaagctggttctgtctgcttccacagtctgcttaaaaaactgtctgacttcgtgaatatagagaccaagtttaccacttctgatgaagagaccaattaagattcattcctcattctgtttctttccagtgggagaagagtccccatgaaataagatgaaactgattccatgcactagtacatgtaggcttctcccttgtgcaaagcttagcaatttgtaggaaactttgatctttttgtccaagaaaaggaatgtctgacaggcttaagctttcgtccccttgcacttagactcgaagttagtaaatccttaaaggctttttaatagcagacttccaaaagattgcatttaggatttctagcatgcttttaatttcagattttcagctgacattagctatagtatacagtaggttaagactcatgtctatgactttcactctaagactggcaaaaggacagcagtcttctatgtttagtcaatattcatttcagtagaagataatcttatctaatttttgagaccagaataagccttttaaggtaaacctcaaaattatcattttatggtaatactgaccattttagtcccctaggtttgacatgggagatagtgactacactggtgtctgacttttttcctagagatttctccctgaaaaatacaagggctgttggtgagagcagacttgaggtgatgatagttggcctctggtctacaaagatttcataactccttggaaagcttcttataatcattcttaacttcttggtagctagaaatttagagtagttgcaatctttaggaatgaacttctgagggccaaaaaatgtgactgacgggaacaattcttaaactgattaactagctgtaatatagttttgtgaatttattgcactgatgttgtaccttgtggtatatctgtccctattaaataagtgttgttttctcctctttaatattgctgtgaacagtggtgcccattgtagcatatgtttgatttttttttattatttcataagaaaactacgttaattttaccttactttcattgtaaataagcctgtcttcctatctggattttttgtgtgcatacatattctactgattaactacttttgcagttttaatcctgtattatttcttctactttgttttgtgtaaaaggggaaaaaataaaaaaagctggaatcttaaaaaaaaaaaaaaaaaaaaaaaaaaaaaaaaaaaaagaaaaaagaaaaaaaaaaaaaaaaanncaagaaaaaaaaacaaaaagaaaaacaaaaaaacaaacgaaaaataaaatggagtacaataaaaatcagaacaaagatgaaaaaaaagaggggggcgggccgccgacaagaaaatccatgcgaactccgcggaaggaggaccagaaaagacaacgcaacaacagaagtatattaggaagaggaagacgcagacccacaaagaggagaaaatatatataaaaaaacgacagagcggcgcgcctctataaaacaacacgggagaagaaacaaaacgagcggggtgctt

SEQ ID NO: 314022 - DNA, 1102 bp, Homo sapiens
  misc_feature (815)..(816): n is a, c, g, or t
ccgccctcttgtgggggtgtttatttaaagcggtgtcggcgatccggatatgtcgacagcgtcgtatctaatttttgagaccagaataagccttttaaggtaaacctcaaaattatcattttatggtaatactgaccattttagtcccctaggtttgacatgggagatagtgactacactggtgtctgacttttttcctagagatttctccctgaaaaatacaagggctgttggtgagagcagacttgaggtgatgatagttggcctctggtctacaaagatttcataactccttggaaagcttcttataatcattcttaacttcttggtagctagaaatttagagtagttgcaatctttaggaatgaacttctgagggccaaaaaatgtgactgacgggaacaattcttaaactgattaactagctgtaatatagttttgtgaatttattgcactgatgttgtaccttgtggtatatctgtccctattaaataagtgttgttttctcctctttaatattgctgtgaacagtggtgcccattgtagcatatgtttgatttttttttattatttcataagaaaactacgttaattttaccttactttcattgtaaataagcctgtcttcctatctggattttttgtgtgcatacatattctactgattaactacttttgcagttttaatcctgtattatttcttctactttgttttgtgtaaaaggggaaaaaataaaaaaagctggaatcttaaaaaaaaaaaaaaaaaaaaaaaaaaaaaaaaaaaaagaaaaaagaaaaaaaaaaaaaaaaanncaagaaaaaaaaacaaaaagaaaaacaaaaaaacaaacgaaaaataaaatggagtacaataaaaatcagaacaaagatgaaaaaaaagaggggggcgggccgccgacaagaaaatccatgcgaactccgcggaaggaggaccagaaaagacaacgcaacaacagaagtatattaggaagaggaagacgcagacccacaaagaggagaaaatatatataaaaaaacgacagagcggcgcgcctctataaaacaacacgggagaagaaacaaaacgagcggggtgctt

SEQ ID NO: 314023 - DNA, 622 bp, Homo sapiens
agcgggggaagggcggccgacccatataagcagcctgcggggcgttccctcgggttgtggttggtgtgcgggtttcggttggaggactcgttggggaggtggcctgcgcttgtagagactgcatccccgagacgatggcggagggagataatcgcagcaccaacctgctggctgcagagactgcaagtctggaagaacagctgcaaggatggggagaagtgatgctgatggctgataaagtcctccgatgggaaagagcctggtttccacctgccatcatgggtgtggtttctttggtgtttctgattatctactatctagatccatctgttctgtccggcgtttcctgttttgttatgtttttgtgcttggctgactaccttgttcccattctagcgcctagaatttttggctccaataaatggaccactgaacaacagcaaagattccatgaaatttgcagcaatctagtaaaaactcgacgcagagctgtgggttggtggaaacgcctcttcacactaaaggaagaaaaacctaagatgcaacagcaaagattccatgaaatttgcagcaatctagtaaaaactcgacgcagagctgtgggtcggtggaaacgcctcta

SEQ ID NO: 314024 - DNA, 422 bp, Homo sapiens
  misc_feature (3)..(3): n is a, c, g, or t
  misc_feature (8)..(9): n is a, c, g, or t
  misc_feature (16)..(16): n is a, c, g, or t
  misc_feature (18)..(18): n is a, c, g, or t
  misc_feature (20)..(20): n is a, c, g, or t
  misc_feature (30)..(30): n is a, c, g, or t
  misc_feature (34)..(34): n is a, c, g, or t
  misc_feature (47)..(47): n is a, c, g, or t
  misc_feature (54)..(54): n is a, c, g, or t
  misc_feature (58)..(58): n is a, c, g, or t
  misc_feature (63)..(63): n is a, c, g, or t
  misc_feature (73)..(74): n is a, c, g, or t
  misc_feature (76)..(76): n is a, c, g, or t
  misc_feature (78)..(79): n is a, c, g, or t
  misc_feature (83)..(83): n is a, c, g, or t
  misc_feature (87)..(87): n is a, c, g, or t
  misc_feature (91)..(91): n is a, c, g, or t
  misc_feature (93)..(94): n is a, c, g, or t
  misc_feature (100)..(100): n is a, c, g, or t
  misc_feature (104)..(104): n is a, c, g, or t
  misc_feature (112)..(113): n is a, c, g, or t
  misc_feature (119)..(119): n is a, c, g, or t
  misc_feature (130)..(130): n is a, c, g, or t
  misc_feature (132)..(132): n is a, c, g, or t
  misc_feature (159)..(160): n is a, c, g, or t
tanccccnncgcccantntngggaattgancggnaaaaaattccacnggaaaancctngcctngtttccccanngngnntttncccncccntnngggganaaanggtggggnncccccnggtgggggccncncttggacttgtgggtcccccgggttgnnggaattcggcacgagctcctctttaatattgctgtgaacagtggtgcccattgtagcatatgtttgatttttttttattatttcataagaaaactacgttaattttaccttactttcattgtaaataagcctgtcttcctatctggattttttgtgtgcatacatattctactgattaactacttttgcagttttaatcctgtattatttcttctactttgttttgtgtaaaaggggaaaaaataaaaaaagctggaatctt

SEQ ID NO: 314025 - DNA, 797 bp, Homo sapiens
atagcaaaaggcaaatttcttttctagggaccactgaacaacagcaaagattccatgaaatttgcagcaatctagtaaaaactcgacgcagagctgtgggttggtggaaacgcctcttcacactaaaggaagaaaaacctaagatgatggtactttttttgctttgacttaagtacagtaaaattttaagatttgagtcaattcgcctttttgtcttaatagctataatttgaaaattattcattggttaattcctaagtacattcataaatgtttacctgtattaattagactgaatcattttaaagttaaaaattacatttttgcatttaattttttattctaataaaacaaaattcttctgtttcatttttcttactgaaataatagtaaaagacatatacttagaaagcatctgtttaggccgggcacagtggctaatgcctataatcccagctacatggaaggctgaggatcacttgagccctggaggtcgaggctgcagtgagctgtgtttgcgcagtgagctgtttgcaccactgcactccagcctttgtgacagaatgagactctgtctcaaaaaaaaaagctgttccgtgaagttattaactgaaaagatcgtataatttatatcataaaatatttacatacagaattgcagtaattctaggaagaaatgtatccaaattctataaagtagatccaatggaataggtttttaaatctaagaatttttaaagaaaagtgataataaaagctaaattatttcccgaactttgaaacacattcttctttaa

SEQ ID NO: 314026 - DNA, 693 bp, Homo sapiens
agcgggggaagggcggccgacccatataagcagcctgcggggcgttccctcgggttgtggttggtgtgcgggtttcggttggaggactcgttggggaggtggcctgcgcttgtagagactgcatccccgagacgatggcggagggagataatcgcagcaccaacctgctggctgcagagactgcaagtctggaagaacagctgcaaggatggggagaagtgatgctgatggctgataaagtcctccgatgggaaagagcctggtttccacctgccatcatgggtgtggtttctttggtgtttctgattatctactatctagatccatctgttctgtccggcgtttcctgttttgttatgtttttgtgcttggctgactaccttgttcccattctagcgcctagaatttttggctccaataaatggaccactgaacaacagcaaagattccatgaaatttgcagcaatctagtaaaaactcgacgcagagctgtgggttggtggaaacgcctcttcacactaaaggaagaaaaacctaagatgtacttcatgaccatgatcgtttcccttgctgcggttgcttgggtgggacaacaagtccacaacctgcttctcacctacctgatagaccctaaccctggaataagtggaactttcccttaactaatttgcctttccctggggaacctaaaaa

SEQ ID NO: 314027 - DNA, 2679 bp, Homo sapiens
  misc_feature (2392)..(2393): n is a, c, g, or t
agcgggggaagggcggccgacccatataagcagcctgcggggcgttccctcgggttgtggttggtgtgcgggtttcggttggaggactcgttggggaggtggcctgcgcttgtagagactgcatccccgagacgatggcggagggagataatcgcagcaccaacctgctggctgcagagactgcaagtctggaagaacagctgcaaggatggggagaagtgatgctgatggctgataaagtcctccgatgggaaagagcctggtttccacctgccatcatgggtgtggtttctttggtgtttctgattatctactatctagatccatctgttctgtccggcgtttcctgttttgttatgtttttgtgcttggctgactaccttgttcccattctagcgcctagaatttttggctccaataaatggaccactgaacaacagcaaagattccatgaaatttgcagcaatctagtaaaaactcgacgcagagctgtgggttggtggaaacgcctcttcacactaaaggaagaaaaacctaagatgtacttcatgaccatgatcgtttcccttgctgcggttgcttgggtgggacaacaagtccacaacctgcttctcacctacctgatagtgacttccttactattgcttcctggactaaaccaacatggaatcattttgaagtacattggaatggccaagagggagataaacaaacttctcaaacaaaaagaaaagaaaaacgaatgattcatctgctttaatcagtgtgattaatgcagcacccattgccccgggaaccgtttctgctgtactatctggatactaaaatgttacggaagtagctctttgttctccctcactctgcccttagttaatagaaattcagactcgccaagtaaggcttcgtgcatagtgtcttcatgtcgcgtatagttgagcgcgttcttagcagttggcttcatggacaactcattagtgttttgacttttcttacccagcgttaattgaattcttgcttttagacaacttcctttttgtagtggtgaaccttgccctttagtacagttcaagtgaatctggataattgttcatctttgctttagcttagataccatgtagtggtctgtggctacaggaagctggttctgtctgcttccacagtctgcttaaaaaactgtctgacttcgtgaatatagagaccaagtttaccacttctgatgaagagaccaattaagattcattcctcattctgtttctttccagtgggagaagagtccccatgaaataagatgaaactgattccatgcactagtacatgtaggcttctcccttgtgcaaagcttagcaatttgtaggaaactttgatctttttgtccaagaaaaggaatgtctgacaggcttaagctttcgtccccttgcacttagactcgaagttagtaaatccttaaaggctttttaatagcagacttccaaaagattgcatttaggatttctagcatgcttttaatttcagattttcagctgacattagctatagtatacagtaggttaagactcatgtctatgactttcactctaagactggcaaaaggacagcagtcttctatgtttagtcaatattcatttcagtagaagataatcttatctaatttttgagaccagaataagccttttaaggtaaacctcaaaattatcattttatggtaatactgaccattttagtcccctaggtttgacatgggagatagtgactacactggtgtctgacttttttcctagagatttctccctgaaaaatacaagggctgttggtgagagcagacttgaggtgatgatagttggcctctggtctacaaagatttcataactccttggaaagcttcttataatcattcttaacttcttggtagctagaaatttagagtagttgcaatctttaggaatgaacttctgagggccaaaaaatgtgactgacgggaacaattcttaaactgattaactagctgtaatatagttttgtgaatttattgcactgatgttgtaccttgtggtatatctgtccctattaaataagtgttgttttctcctctttaatattgctgtgaacagtggtgcccattgtagcatatgtttgatttttttttattatttcataagaaaactacgttaattttaccttactttcattgtaaataagcctgtcttcctatctggattttttgtgtgcatacatattctactgattaactacttttgcagttttaatcctgtattatttcttctactttgttttgtgtaaaaggggaaaaaataaaaaaagctggaatcttaaaaaaaaaaaaaaaaaaaaaaaaaaaaaaaaaaaaagaaaaaagaaaaaaaaaaaaaaaaanncaagaaaaaaaaacaaaaagaaaaacaaaaaaacaaacgaaaaataaaatggagtacaataaaaatcagaacaaagatgaaaaaaaagaggggggcgggccgccgacaagaaaatccatgcgaactccgcggaaggaggaccagaaaagacaacgcaacaacagaagtatattaggaagaggaagacgcagacccacaaagaggagaaaatatatataaaaaaacgacagagcggcgcgcctctataaaacaacacgggagaagaaacaaaacgagcggggtgctt

SEQ ID NO: 314028 - DNA, 1700 bp, Homo sapiens
agcgggggaagggcggccgacccatataagcagcctgcggggcgttccctcgggttgtggttggtgtgcgggtttcggttggaggactcgttggggaggtggcctgcgcttgtagagactgcatccccgagacgatggcggagggagataatcgcagcaccaacctgctggctgcagagactgcaagtctggaagaacagctgcaaggatggggagaagtgatgctgatggctgataaagtcctccgatgggaaagagcctggtttccacctgccatcatgggtgtggtttctttggtgtttctgattatctactatctagatccatctgttctgtccggcgtttcctgttttgttatgtttttgtgcttggctgactaccttgttcccattctagcgcctagaatttttggctccaataaatggaccactgaacaacagcaaagattccatgaaatttgcagcaatctagtaaaaactcgacgcagagctgtgggttggtggaaacgcctcttcacactaaaggaagaaaaacctaagatgtacttcatgaccatgatcgtttcccttgctgcggttgcttgggtgggacaacaagtccacaacctgcttctcacctacctgatagtgacttccttactattgcttcctggactaaaccaacatggaatcattttgaagtacattggaatggccaagagggagataaacaaacttctcaaacaaaaagaaaagaaaaacgaatgattcatctgctttaatcagtgtgattaatgcagcacccattgccccgggaaccgtttctgctgtactatctggatactaaaatgttacggaagtagctctttgttctccctcactctgcccttagttaatagaaattcagactcgccaagtaaggcttcgtgcatagtgtcttcatgtcgcgtatagttgagcgcgttcttagcagttggcttcatggacaactcattagtgttttgacttttcttacccagcgttaattgaattcttgcttttagacaacttcctttttgtagtggtgaaccttgccctttagtacagttcaagtgaatctggataattgttcatctttgctttagcttagataccatgtagtggtctgtggctacaggaagctggttctgtctgcttccacagtctgcttaaaaaactgtctgacttcgtgaatatagagaccaagtttaccacttctgatgaagagaccaattaagattcattcctcattctgtttctttccagtgggagaagagtccccatgaaataagatgaaactgattccatgcactagtacatgtaggcttctcccttgtgcaaagcttagcaatttgtaggaaactttgatctttttgtccaagaaaaggaatgtctgacaggcttaagctttcgtccccttgcacttagactcgaagttagtaaatccttaaaggctttttaatagcagacttccaaaagattgcatttaggatttctagcatgcttttaatttcagattttcagctgacattagctatagtatacagtaggttaagactcatgtctatgactttcactctaagactggcaaaaggacagcagtcttctatgtttagtcaatattcatttcagtagaagataatctcacctcctaagtgtcccatgaaggccagacagatctgacattatggcacacttatgagg

SEQ ID NO: 314029 - DNA, 2638 bp, Homo sapiens
  misc_feature (2351)..(2352): n is a, c, g, or t
agcgggggaagggcggccgacccatataagcagcctgcggggcgttccctcgggttgtggttggtgtgcgggtttcggttggaggactcgttggggaggtggcctgcgcttgtagagactgcatccccgagacgatggcggagggagataatcgcagcaccaacctgctggctgcagagactgcaagtctggaagaacagctgcaaggatggggagaagtgatgctgatggctgataaagtcctccgatgggaaagagcctggtttccacctgccatcatgggtgtggtttctttggtgtttctgattatctactatctagatccatctgttctgtccggcgtttcctgttttgttatgtttttgtgcttggctgactaccttgttcccattctagcgcctagaatttttggctccaataaatggaccactgaacaacagcaaagattccatgaaatttgcagcaatctagtaaaaactcgacgcagagctgtgggttggtggaaacgcctcttcacactaaaggaagaaaaacctaagatgggtgggacaacaagtccacaacctgcttctcacctacctgatagtgacttccttactattgcttcctggactaaaccaacatggaatcattttgaagtacattggaatggccaagagggagataaacaaacttctcaaacaaaaagaaaagaaaaacgaatgattcatctgctttaatcagtgtgattaatgcagcacccattgccccgggaaccgtttctgctgtactatctggatactaaaatgttacggaagtagctctttgttctccctcactctgcccttagttaatagaaattcagactcgccaagtaaggcttcgtgcatagtgtcttcatgtcgcgtatagttgagcgcgttcttagcagttggcttcatggacaactcattagtgttttgacttttcttacccagcgttaattgaattcttgcttttagacaacttcctttttgtagtggtgaaccttgccctttagtacagttcaagtgaatctggataattgttcatctttgctttagcttagataccatgtagtggtctgtggctacaggaagctggttctgtctgcttccacagtctgcttaaaaaactgtctgacttcgtgaatatagagaccaagtttaccacttctgatgaagagaccaattaagattcattcctcattctgtttctttccagtgggagaagagtccccatgaaataagatgaaactgattccatgcactagtacatgtaggcttctcccttgtgcaaagcttagcaatttgtaggaaactttgatctttttgtccaagaaaaggaatgtctgacaggcttaagctttcgtccccttgcacttagactcgaagttagtaaatccttaaaggctttttaatagcagacttccaaaagattgcatttaggatttctagcatgcttttaatttcagattttcagctgacattagctatagtatacagtaggttaagactcatgtctatgactttcactctaagactggcaaaaggacagcagtcttctatgtttagtcaatattcatttcagtagaagataatcttatctaatttttgagaccagaataagccttttaaggtaaacctcaaaattatcattttatggtaatactgaccattttagtcccctaggtttgacatgggagatagtgactacactggtgtctgacttttttcctagagatttctccctgaaaaatacaagggctgttggtgagagcagacttgaggtgatgatagttggcctctggtctacaaagatttcataactccttggaaagcttcttataatcattcttaacttcttggtagctagaaatttagagtagttgcaatctttaggaatgaacttctgagggccaaaaaatgtgactgacgggaacaattcttaaactgattaactagctgtaatatagttttgtgaatttattgcactgatgttgtaccttgtggtatatctgtccctattaaataagtgttgttttctcctctttaatattgctgtgaacagtggtgcccattgtagcatatgtttgatttttttttattatttcataagaaaactacgttaattttaccttactttcattgtaaataagcctgtcttcctatctggattttttgtgtgcatacatattctactgattaactacttttgcagttttaatcctgtattatttcttctactttgttttgtgtaaaaggggaaaaaataaaaaaagctggaatcttaaaaaaaaaaaaaaaaaaaaaaaaaaaaaaaaaaaaagaaaaaagaaaaaaaaaaaaaaaaanncaagaaaaaaaaacaaaaagaaaaacaaaaaaacaaacgaaaaataaaatggagtacaataaaaatcagaacaaagatgaaaaaaaagaggggggcgggccgccgacaagaaaatccatgcgaactccgcggaaggaggaccagaaaagacaacgcaacaacagaagtatattaggaagaggaagacgcagacccacaaagaggagaaaatatatataaaaaaacgacagagcggcgcgcctctataaaacaacacgggagaagaaacaaaacgagcggggtgctt

SEQ ID NO: 314030 - DNA, 2261 bp, Homo sapiens
  misc_feature (1974)..(1975): n is a, c, g, or t
gctaaacctatgcgttggtggcgcggcctcttcacgcttagtggacgtggtccttactatgtccttacagtgaatcactgagtcgatgtacctcattggctgtcgggattgctctgccgattagtgagacaaacgacgtccgcgacgagaccatgcgtatcctgctaccttgacctgaatcctagacttgtgccgttcattggattggtcttccatggacatctatcaacatggaattcattcggactctgactttggaatggcccacccaggcgcatggagggagataaacaaacttctcaaacaaaaagaaaagaaaaacgaatgattcatctgctttaatcagtgtgattaatgcagcacccattgccccgggaaccgtttctgctgtactatctggatactaaaatgttacggaagtagctctttgttctccctcactctgcccttagttaatagaaattcagactcgccaagtaaggcttcgtgcatagtgtcttcatgtcgcgtatagttgagcgcgttcttagcagttggcttcatggacaactcattagtgttttgacttttcttacccagcgttaattgaattcttgcttttagacaacttcctttttgtagtggtgaaccttgccctttagtacagttcaagtgaatctggataattgttcatctttgctttagcttagataccatgtagtggtctgtggctacaggaagctggttctgtctgcttccacagtctgcttaaaaaactgtctgacttcgtgaatatagagaccaagtttaccacttctgatgaagagaccaattaagattcattcctcattctgtttctttccagtgggagaagagtccccatgaaataagatgaaactgattccatgcactagtacatgtaggcttctcccttgtgcaaagcttagcaatttgtaggaaactttgatctttttgtccaagaaaaggaatgtctgacaggcttaagctttcgtccccttgcacttagactcgaagttagtaaatccttaaaggctttttaatagcagacttccaaaagattgcatttaggatttctagcatgcttttaatttcagattttcagctgacattagctatagtatacagtaggttaagactcatgtctatgactttcactctaagactggcaaaaggacagcagtcttctatgtttagtcaatattcatttcagtagaagataatcttatctaatttttgagaccagaataagccttttaaggtaaacctcaaaattatcattttatggtaatactgaccattttagtcccctaggtttgacatgggagatagtgactacactggtgtctgacttttttcctagagatttctccctgaaaaatacaagggctgttggtgagagcagacttgaggtgatgatagttggcctctggtctacaaagatttcataactccttggaaagcttcttataatcattcttaacttcttggtagctagaaatttagagtagttgcaatctttaggaatgaacttctgagggccaaaaaatgtgactgacgggaacaattcttaaactgattaactagctgtaatatagttttgtgaatttattgcactgatgttgtaccttgtggtatatctgtccctattaaataagtgttgttttctcctctttaatattgctgtgaacagtggtgcccattgtagcatatgtttgatttttttttattatttcataagaaaactacgttaattttaccttactttcattgtaaataagcctgtcttcctatctggattttttgtgtgcatacatattctactgattaactacttttgcagttttaatcctgtattatttcttctactttgttttgtgtaaaaggggaaaaaataaaaaaagctggaatcttaaaaaaaaaaaaaaaaaaaaaaaaaaaaaaaaaaaaagaaaaaagaaaaaaaaaaaaaaaaanncaagaaaaaaaaacaaaaagaaaaacaaaaaaacaaacgaaaaataaaatggagtacaataaaaatcagaacaaagatgaaaaaaaagaggggggcgggccgccgacaagaaaatccatgcgaactccgcggaaggaggaccagaaaagacaacgcaacaacagaagtatattaggaagaggaagacgcagacccacaaagaggagaaaatatatataaaaaaacgacagagcggcgcgcctctataaaacaacacgggagaagaaacaaaacgagcggggtgctt

SEQ ID NO: 314031 - DNA, 1193 bp, Homo sapiens
agcgggggaagggcggccgacccatataagcagcctgcggggcgttccctcgggttgtggttggtgtgcgggtttcggttggaggactcgttggggaggtggcctgcgcttgtagagactgcatccccgagacgatggcggagggagataatcgcagcaccaacctgctggctgcagagactgcaagtctggaagaacagctgcaaggatggggagaagtgatgctgatggctgataaagtcctccgatgggaaagagcctggtttccacctgccatcatgggtgtggtttctttggtgtttctgattatctactatctagatccatctgttctgtccggcgtttcctgttttgttatgtttttgtgcttggctgactaccttgttcccattctagcgcctagaatttttggctccaataaatggaccactgaacaacagcaaagattccatgaaatttgcagcaatctagtaaaaactcgacgcagagctgtgggttggtggaaacgcctcttcacactaaaggaagaaaaacctaagatgatggtactttttttgctttgacttaagtacagtaaaattttaagatttgagtcaattcgcctttttgtcttaatagctataatttgaaaattattcattggttaattcctaagtacattcataaatgtttacctgtattaattagactgaatcattttaaagttaaaaattacatttttgcatttaattttttattctaataaaacaaaattcttctgtttcatttttcttactgaaataatagtaaaagacatatacttagaaagcatctgtttaggccgggcacagtggctaatgcctataatcccagctacatggaaggctgaggatcacttgagccctggaggtcgaggctgcagtgagctgtgtttgcgcagtgagctgtttgcaccactgcactccagcctttgtgacagaatgagactctgtctcaaaaaaaaaagctgttccgtgaagttattaactgaaaagatcgtataatttatatcataaaatatttacatacagaattgcagtaattctaggaagaaatgtatccaaattctataaagtagatccaatggaataggtttttaaatctaagaatttttaaagaaaagtgataataaaagctaaattatttcccgaactttgaaacacattcttctttaa

SEQ ID NO: 314032 - DNA, 543 bp, Homo sapiens
gccctttctttgcggaatcaccatggcggctgggaccctgtacacgtatcctgaaaactggagggccttcaaggctctcatcgctgctcagtacagcggggctcaggtccgcgtgctctccgcaccaccccacttccattttggccaaaccaaccgcacccctgaatttctccgcaaatttcctgccggcaaggtcccagcatttgagggtgatgatggattctgtgtgtttgagagcaacgccattgcctactatgtgagcaatgaggagtgctggatgcttacttgaagacgaggacttttctggtgggcgaacgagtgacattggctgacatcacagttgtctgcaccctgttgtggctctataagcaggttctagagccttctttccgccaggcctttcccaataccaactagtggtgacttaacctgatgaataaaaccgcttttacaatattaattttgagggaaaacacatttgtatagaatggtaggagtaattttacaaaaataagattttttgtaagcatttgtacgtgtccc

SEQ ID NO: 314033 - DNA, 1327 bp, Homo sapiens
gccctttctttgcggaatcaccatggcggctgggaccctgtacacgtatcctgaaaactggagggccttcaaggctctcatcgctgctcagtacagcggggctcaggtccgcgtgctctccgcaccaccccacttccattttggccaaaccaaccgcacccctgaatttctccgcaaatttcctgccggcaaggtcccagcatttgagggtgatgatggattctgtgtgtttgagagcaacgccattgcctactatgtgagcaatgaggagctgcggggaagtactccagagggcatcatgcaccacaacaaacaggccactgagaatgcaaaggaggaagtgaggcgaattctggggctgctggatgcttacttgaagacgaggacttttctggtgggcgaacgagtgacattggctgacatcacagttgtctgcaccctgttgtggctctataagcaggttctagagccttctttccgccaggcctttcccaataccaaccgctggttcctcacctgcattaaccagccccagttccgggctgtcttgggggaagtgaaactgtgtgagaagatggcccagtttgatgctaaaaagtttgcagagacccaacctaaaaaggacacaccacggaaagagaagggttcacgggaagagaagcagaagccccaggctgagcggaaggaggagaaaaaggcggctgcccctgctcctgaggaggagatggatgaatgtgagcaggcgctggctgctgagcccaaggccaaggaccccttcgctcacctgcccaagagtacctttgtgttggatgaatttaagcgcaagtactccaatgaggacacactctctgtggcactgccatatttctgggagcactttgataaggacggctggtccctgtggtactcagagtatcgcttccctgaagaactcactcagaccttcatgagctgcaatctcatcactggaatgttccagcgactggacaagctgaggaagaatgccttcgccagtgtcatcctttttggaaccaacaatagcagctccatttctggagtctgggtcttccgaggccaggagcttgcctttccgctgagtccagattggcaggtggactacgagtcatacacatggcggaaactggatcctggcagcgaggagacccagacgctggttcgagagtacttttcctgggagggggccttccagcatgtgggcaaagccttcaatcagggcaagatcttcaagtgaacatctcttgccatcacctagctgcctgcacctgcccttcagggagatgggggtcattaaaggaaactgaacatt

SEQ ID NO: 314034 - DNA, 1167 bp, Homo sapiens
gccctttctttgcggaatcaccatggcggctgggaccctgtacacgtatcctgaaaactggagggccttcaaggctctcatcgctgctcagtacagcggggctcaggtccgcgtgctctccgcaccaccccaggcatcatgcaccacaacaaacaggccactgagaatgcaaaggaggaagtgaggcgaattctggggctgctggatgcttacttgaagacgaggacttttctggtgggcgaacgagtgacattggctgacatcacagttgtctgcaccctgttgtggctctataagcaggttctagagccttctttccgccaggcctttcccaataccaaccgctggttcctcacctgcattaaccagccccagttccgggctgtcttgggggaagtgaaactgtgtgagaagatggcccagtttgatgctaaaaagtttgcagagacccaacctaaaaaggacacaccacggaaagagaagggttcacgggaagagaagcagaagccccaggctgagcggaaggaggagaaaaaggcggctgcccctgctcctgaggaggagatggatgaatgtgagcaggcgctggctgctgagcccaaggccaaggaccccttcgctcacctgcccaagagtacctttgtgttggatgaatttaagcgcaagtactccaatgaggacacactctctgtggcactgccatatttctgggagcactttgataaggacggctggtccctgtggtactcagagtatcgcttccctgaagaactcactcagaccttcatgagctgcaatctcatcactggaatgttccagcgactggacaagctgaggaagaatgccttcgccagtgtcatcctttttggaaccaacaatagcagctccatttctggagtctgggtcttccgaggccaggagcttgcctttccgctgagtccagattggcaggtggactacgagtcatacacatggcggaaactggatcctggcagcgaggagacccagacgctggttcgagagtacttttcctgggagggggccttccagcatgtgggcaaagccttcaatcagggcaagatcttcaagtgaacatctcttgccatcacctagctgcctgcacctgcccttcagggagatgggggtcattaaaggaaactgaacatt

SEQ ID NO: 314035 - DNA, 1027 bp, Homo sapiens
gccctttctttgcggaatcaccatggcggctgggaccctgtacacgtatcctgaaaactggagggccttcaaggctctcatcgctgctcagtacagcggggctcaggtccgcgtgctctccgcaccaccccacttccattttggccaaaccaaccgcacccctgaatttctccgcaaatttcctgccggcaaggtcccagcatttgagggtgatgatggattctgtgtgtttgagagcaacgccattgcctactatgtgagcaatgaggagctgcggggaagtactccagaggcagcagcccaggtggtgcagtgggtgagctttgctgattccgatatagtgcccccagccagtacctgggtgttccccaccttgggcatcatgcaccacaacaaacaggccactgagaatgcaaaggaggagatggatgaatgtgagcaggcgctggctgctgagcccaaggccaaggaccccttcgctcacctgcccaagagtacctttgtgttggatgaatttaagcgcaagtactccaatgaggacacactctctgtggcactgccatatttctgggagcactttgataaggacggctggtccctgtggtactcagagtatcgcttccctgaagaactcactcagaccttcatgagctgcaatctcatcactggaatgttccagcgactggacaagctgaggaagaatgccttcgccagtgtcatcctttttggaaccaacaatagcagctccatttctggagtctgggtcttccgaggccaggagcttgcctttccgctgagtccagattggcaggtggactacgagtcatacacatggcggaaactggatcctggcagcgaggagacccagacgctggttcgagagtacttttcctgggagggggccttccagcatgtgggcaaagccttcaatcagggcaagatcttcaagtgaacatctcttgccatcacctagctgcctgcacctgcccttcagggagatgggggtcattaaaggaaactgaacatt

SEQ ID NO: 314036 - DNA, 1462 bp, Homo sapiens
gccctttctttgcggaatcaccatggcggctgggaccctgtacacgtatcctgaaaactggagggccttcaaggctctcatcgctgctcagtacagcggggctcaggtccgcgtgctctccgcaccaccccacttccattttggccaaaccaaccgcacccctgaatttctccgcaaatttcctgccggcaaggtcccagcatttgagggtgatgatggattctgtgtgtttgagagcaacgccattgcctactatgtgagcaatgaggagctgcggggaagtactccagaggcagcagcccaggtggtgcagtgggtgagctttgctgattccgatatagtgcccccagccagtacctgggtgttccccaccttgggcacattcaatggccaacccacaaaccacaaccgaggcactgtgcaaaatgtcgcaacggagagggagatgtagagcggagatatacagtggaggcatgcatggaatgccttactttgaaagcaccggagggaattttacttgggtggggcgaaacacgaacgagtgacattggctgacatcacagttgtctgcaccctgttgtggctctataagcaggttctagagccttctttccgccaggcctttcccaataccaaccgctggttcctcacctgcattaaccagccccagttccgggctgtcttgggggaagtgaaactgtgtgagaagatggcccagtttgatgctaaaaagtttgcagagacccaacctaaaaaggacacaccacggaaagagaagggttcacgggaagagaagcagaagccccaggctgagcggaaggaggagaaaaaggcggctgcccctgctcctgaggaggagatggatgaatgtgagcaggcgctggctgctgagcccaaggccaaggaccccttcgctcacctgcccaagagtacctttgtgttggatgaatttaagcgcaagtactccaatgaggacacactctctgtggcactgccatatttctgggagcactttgataaggacggctggtccctgtggtactcagagtatcgcttccctgaagaactcactcagaccttcatgagctgcaatctcatcactggaatgttccagcgactggacaagctgaggaagaatgccttcgccagtgtcatcctttttggaaccaacaatagcagctccatttctggagtctgggtcttccgaggccaggagcttgcctttccgctgagtccagattggcaggtggactacgagtcatacacatggcggaaactggatcctggcagcgaggagacccagacgctggttcgagagtacttttcctgggagggggccttccagcatgtgggcaaagccttcaatcagggcaagatcttcaagtgaacatctcttgccatcacctagctgcctgcacctgcccttcagggagatgggggtcattaaaggaaactgaacatt

SEQ ID NO: 314037 - DNA, 1219 bp, Homo sapiens
actgggccatcttctcacacagtttcatttcccccaagacagcccggaactgggccatcggttcatgcagatgaggaaacacgcgaatggtattgtggtaaggcctgccggaaagaaggctctagaacctgcctatagagccacaacagggtgcagacaactgtgatgtcagccaatgtcactcggcatcatgcaccacaacaaacaggccactgagaatgcaaaggaggaagtgaggcgaattctggggctgctggatgcttacttgaagacgaggacttttctggtgggcgaacgagtgacattggctgacatcacagttgtctgcaccctgttgtggctctataagcaggttctagagccttctttccgccaggcctttcccaataccaaccgctggttcctcacctgcattaaccagccccagttccgggctgtcttgggggaagtgaaactgtgtgagaagatggcccagtttgatgctaaaaagtttgcagagacccaacctaaaaaggacacaccacggaaagagaagggttcacgggaagagaagcagaagccccaggctgagcggaaggaggagaaaaaggcggctgcccctgctcctgaggaggagatggatgaatgtgagcaggcgctggctgctgagcccaaggccaaggaccccttcgctcacctgcccaagagtacctttgtgttggatgaatttaagcgcaagtactccaatgaggacacactctctgtggcactgccatatttctgggagcactttgataaggacggctggtccctgtggtactcagagtatcgcttccctgaagaactcactcagaccttcatgagctgcaatctcatcactggaatgttccagcgactggacaagctgaggaagaatgccttcgccagtgtcatcctttttggaaccaacaatagcagctccatttctggagtctgggtcttccgaggccaggagcttgcctttccgctgagtccagattggcaggtggactacgagtcatacacatggcggaaactggatcctggcagcgaggagacccagacgctggttcgagagtacttttcctgggagggggccttccagcatgtgggcaaagccttcaatcagggcaagatcttcaagtgaacatctcttgccatcacctagctgcctgcacctgcccttcagggagatgggggtcattaaaggaaactgaacatt

SEQ ID NO: 314038 - DNA, 1102 bp, Homo sapiens
gccctttctttgcggaatcaccatggcggctgggaccctgtacacgtatcctgaaaactggagggccttcaaggctctcatcgctgctcagtacagcggggctcaggtccgcgtgctctccgcaccaccccacttccattttggccaaaccaaccgcacccctgaatttctccgcaaatttcctgccggcaaggtcccagcatttgagggtgatgatggattctgtgtgtttgagagcaacgccattgcctactatgtgagcaatgaggagctgcggggaagtactccagagggcatcatgcaccacaacaaacaggccactgagaatgcaaaggaggaagtgaggcgaattctggggctgctggatgcttacttgaagacgaggacttttctggtgggcgaacgagtgacattggctgacatcacagttgtctgcaccctgttgtggctctataagcaggttctagagccttctttccgccaggcctttcccaataccaaccgctggttcctcacctgcattaaccagccccagttccgggctgtcttgggggaagtgaaactgtgtgagaagatggcccagtttgatgctaaaaagtttgcagagacccaacctaaaaaggacacaccacggaaagagaagggttcacgggaagagaagcagaagccccaggctgagcggaaggaggagaaaaaggcggctgcccctgctcctgaggaggagatggatgaatgtgagcaggcgctggctgctgagcccaaggccaaggaccccttcgctcacctgcccaagagtacctttgtgttggatgaatttaagcgcaagtactccaatgaggacacactctctgtggcactgccatatttctgggagcactttgataaggacggctggtccctgtggtactcagagtatcgcttccctgaagaactcactcagaccttcatgagctgcaatctcatcactggaatgttccagcgactggacaagctgaggaagaatgccttcgccagtgtcatcctttttggaaccaacaatagcagctcatgaaggtctgagtgagttcttcagggaagcgatactactgagtaccacaggacc

SEQ ID NO: 314039 - DNA, 1278 bp, Homo sapiens
gccctttctttgcggaatcaccatggcggctgggaccctgtacacgtatcctgaaaactggagggccttcaaggctctcatcgctgctcagtacagcggggctcaggtccgcgtgctctccgcaccaccccacttccattttggccaaaccaaccgcacccctgaatttctccgcaaatttcctgccggcaaggtcccagcatttgagggtgatgatggattctgtgtgtttgagagcaacgccattgcctactatgtgagcaatgaggagctgcggggaagtactccagaggcagcagcccaggtggtgcagtgggtgagctttgctgattccgatatagtgcccccagccagtacctgggtgttccccaccttgggcatcatgcaccacaacaaacaggccactgagaatgcaaaggaggaagtgaggcgaattctggggctgctggatgcttacttgaagacgaggacttttctggtgggcgaacgagtgacattggctgacatcacagttgtctgcaccctgttgtggcttttgatgctaaaaagtttgcagagacccaacctaaaaaggacacaccacggaaagagaagggttcacgggaagagaagcagaagccccaggctgagcggaaggaggagaaaaaggcggctgcccctgctcctgaggaggagatggatgaatgtgagcaggcgctggctgctgagcccaaggccaaggaccccttcgctcacctgcccaagagtacctttgtgttggatgaatttaagcgcaagtactccaatgaggacacactctctgtggcactgccatatttctgggagcactttgataaggacggctggtccctgtggtactcagagtatcgcttccctgaagaactcactcagaccttcatgagctgcaatctcatcactggaatgttccagcgactggacaagctgaggaagaatgccttcgccagtgtcatcctttttggaaccaacaatagcagctccatttctggagtctgggtcttccgaggccaggagcttgcctttccgctgagtccagattggcaggtggactacgagtcatacacatggcggaaactggatcctggcagcgaggagacccagacgctggttcgagagtacttttcctgggagggggccttccagcatgtgggcaaagccttcaatcagggcaagatcttcaagtgaacatctcttgccatcacctagctgcctgcacctgcccttcagggagatgggggtcattaaaggaaactgaacatt

SEQ ID NO: 314040 - DNA, 414 bp, Homo sapiens
  misc_feature (138)..(138): n is a, c, g, or t
aagacaccaacctgtgtgctatccatgccaaacgtgtaacaattatgccaaaagacatccagctagcacgccgcatacgtggagaacgtgcttaagaatccactatgatgggaaacatttcattctcaaaaaaaaaanaaaaaaactcgagactagcgaggccaggagcttgcctttccgctgagtccagattggcaggtggactacgagtcatacacatggcggaaactggatcctggcagcgaggagacccagacgctggttcgagagtacttttcctgggagggggccttccagcatgtgggcaaagccttcaatcagggcaagatcttcaagtgaacatctcttgccatcacctagctgcctgcacctgcccttcagggagatgggggtcattaaaggaaactgaacatt

SEQ ID NO: 314041 - DNA, 1411 bp, Homo sapiens
gccctttctttgcggaatcaccatggcggctgggaccctgtacacgtatcctgaaaactggagggccttcaaggctctcatcgctgctcagtacagcggggctcaggtccgcgtgctctccgcaccaccccacttccattttggccaaaccaaccgcacccctgaatttctccgcaaatttcctgccggcaaggtcccagcatttgagggtgatgatggattctgtgtgtttgagagcaacgccattgcctactatgtgagcaatgaggagctgcggggaagtactccagaggcagcagcccaggtggtgcagtgggtgagctttgctgattccgatatagtgcccccagccagtacctgggtgttccccaccttgggcatcatgcaccacaacaaacaggccactgagaatgcaaaggaggaagtgaggcgaattctggggctgctggatgcttacttgaagacgaggacttttctggtgggcgaacgagtgacattggctgacatcacagttgtctgcaccctgttgtggctctataagcaggttctagagccttctttccgccaggcctttcccaataccaaccgctggttcctcacctgcattaaccagccccagttccgggctgtcttgggggaagtgaaactgtgtgagaagatggcccagtttgatgctaaaaagtttgcagagacccaacctaaaaaggacacaccacggaaagagaagggttcacgggaagagaagcagaagccccaggctgagcggaaggaggagaaaaaggcggctgcccctgctcctgaggaggagatggatgaatgtgagcaggcgctggctgctgagcccaaggccaaggaccccttcgctcacctgcccaagagtacctttgtgttggatgaatttaagcgcaagtactccaatgaggacacactctctgtggcactgccatatttctgggagcactttgataaggacggctggtccctgtggtactcagagtatcgcttccctgaagaactcactcagaccttcatgagctgcaatctcatcactggaatgttccagcgactggacaagctgaggaagaatgccttcgccagtgtcatcctttttggaaccaacaatagcagctccatttctggagtctgggtcttccgaggccaggagcttgcctttccgctgagtccagattggcaggtggactacgagtcatacacatggcggaaactggatcctggcagcgaggagacccagacgctggttcgagagtacttttcctgggagggggccttccagcatgtgggcaaagccttcaatcagggcaagatcttcaagtgaacatctcttgccatcacctagctgcctgcacctgcccttcagggagatgggggtcattaaaggaaactgaacatt

SEQ ID NO: 314042 - DNA, 1063 bp, Homo sapiens
gccctttctttgcggaatcaccatggcggctgggaccctgtacacgtatcctgaaaactggagggccttcaaggctctcatcgctgctcagtacagcggggctcaggtccgcgtgctctccgcaccaccccacttccattttggccaaaccaaccgcacccctgaatttctccgcaaatttcctgccggcaaggtcccagcatttgagggtgatgatggattctgtgtgtttgagagcaacgccattgcctactatgtgagcaatgaggagctgcggggaagtactccagaggcagcagcccaggtggtgcagtgggtgagctttgctgattccgatatagtgcccccagccagtacctgggtgttccccaccttgggcatcatgcaccacaacaaacaggccactgagaatgcaaaggaggaggagaaaaaggcggctgcccctgctcctgaggaggagatggatgaatgtgagcaggcgctggctgctgagcccaaggccaaggaccccttcgctcacctgcccaagagtacctttgtgttggatgaatttaagcgcaagtactccaatgaggacacactctctgtggcactgccatatttctgggagcactttgataaggacggctggtccctgtggtactcagagtatcgcttccctgaagaactcactcagaccttcatgagctgcaatctcatcactggaatgttccagcgactggacaagctgaggaagaatgccttcgccagtgtcatcctttttggaaccaacaatagcagctccatttctggagtctgggtcttccgaggccaggagcttgcctttccgctgagtccagattggcaggtggactacgagtcatacacatggcggaaactggatcctggcagcgaggagacccagacgctggttcgagagtacttttcctgggagggggccttccagcatgtgggcaaagccttcaatcagggcaagatcttcaagtgaacatctcttgccatcacctagctgcctgcacctgcccttcagggagatgggggtcattaaaggaaactgaacatt

SEQ ID NO: 314043 - DNA, 1360 bp, Homo sapiens
gccctttctttgcggaatcaccatggcggctgggaccctgtacacgtatcctgaaaactggagggccttcaaggctctcatcgctgctcagtacagcggggctcaggtccgcgtgctctccgcaccaccccacttccattttggccaaaccaaccgcacccctgaatttctccgcaaatttcctgccggcaaggtcccagcatttgagggtgatgatggattctgtgtgtttgagagcaacgccattgcctactatgtgagcaatgaggagctgcggggaagtactccagaggcagcagcccaggtggtgcagtgggtgagctttgctgattccgatatagtgcccccagccagtacctgggtgttccccaccttgggcatcatgcaccacaacaaacaggccactgagaatgcaaaggaggaagtgaggcgaattctggggctgctggatgcttacttgaagacgaggacttttctggtgggctataagcaggttctagagccttctttccgccaggcctttcccaataccaaccgctggttcctcacctgcattaaccagccccagttccgggctgtcttgggggaagtgaaactgtgtgagaagatggcccagtttgatgctaaaaagtttgcagagacccaacctaaaaaggacacaccacggaaagagaagggttcacgggaagagaagcagaagccccaggctgagcggaaggaggagaaaaaggcggctgcccctgctcctgaggaggagatggatgaatgtgagcaggcgctggctgctgagcccaaggccaaggaccccttcgctcacctgcccaagagtacctttgtgttggatgaatttaagcgcaagtactccaatgaggacacactctctgtggcactgccatatttctgggagcactttgataaggacggctggtccctgtggtactcagagtatcgcttccctgaagaactcactcagaccttcatgagctgcaatctcatcactggaatgttccagcgactggacaagctgaggaagaatgccttcgccagtgtcatcctttttggaaccaacaatagcagctccatttctggagtctgggtcttccgaggccaggagcttgcctttccgctgagtccagattggcaggtggactacgagtcatacacatggcggaaactggatcctggcagcgaggagacccagacgctggttcgagagtacttttcctgggagggggccttccagcatgtgggcaaagccttcaatcagggcaagatcttcaagtgaacatctcttgccatcacctagctgcctgcacctgcccttcagggagatgggggtcattaaaggaaactgaacatt

SEQ ID NO: 314044 - DNA, 1239 bp, Homo sapiens
gccctttctttgcggaatcaccatggcggctgggaccctgtacacgtatcctgaaaactggagggccttcaaggctctcatcgctgctcagtacagcggggctcaggtccgcgtgctctccgcaccaccccacttccattttggccaaaccaaccgcacccctgaatttctccgcaaatttcctgccggcaaggtcccagcatttgagggtgatgatggattctgtgtgtttgagagcaacgccattgcctactatgtgagcaatgaggagtgctggatgcttacttgaagacgaggacttttctggtgggcgaacgagtgacattggctgacatcacagttgtctgcaccctgttgtggctctataagcaggttctagagccttctttccgccaggcctttcccaataccaaccgctggttcctcacctgcattaaccagccccagttccgggctgtcttgggggaagtgaaactgtgtgagaagatggcccagtttgatgctaaaaagtttgcagagacccaacctaaaaaggacacaccacggaaagagaagggttcacgggaagagaagcagaagccccaggctgagcggaaggaggagaaaaaggcggctgcccctgctcctgaggaggagatggatgaatgtgagcaggcgctggctgctgagcccaaggccaaggaccccttcgctcacctgcccaagagtacctttgtgttggatgaatttaagcgcaagtactccaatgaggacacactctctgtggcactgccatatttctgggagcactttgataaggacggctggtccctgtggtactcagagtatcgcttccctgaagaactcactcagaccttcatgagctgcaatctcatcactggaatgttccagcgactggacaagctgaggaagaatgccttcgccagtgtcatcctttttggaaccaacaatagcagctccatttctggagtctgggtcttccgaggccaggagcttgcctttccgctgagtccagattggcaggtggactacgagtcatacacatggcggaaactggatcctggcagcgaggagacccagacgctggttcgagagtacttttcctgggagggggccttccagcatgtgggcaaagccttcaatcagggcaagatcttcaagtgaacatctcttgccatcacctagctgcctgcacctgcccttcagggagatgggggtcattaaaggaaactgaacatt

SEQ ID NO: 314045 - DNA, 1253 bp, Homo sapiens
gccctttctttgcggaatcaccatggcggctgggaccctgtacacgtatcctgaaaactggagggccttcaaggctctcatcgctgctcagtacagcggggctcaggtccgcgtgctctccgcaccaccccacttccattttggccaaaccaaccgcacccctgaatttctccgcaaatttcctgccggcaaggtcccagcatttgagggtgatgatggattctgtgtgtttgagagcaacgccattgcctactatgtgagcaatgaggagctgcggggaagtactccagaggcagcagcccaggtggtgcagtgggtgagctttgctgattccgatatagtgcccccagccagtacctgggtgttccccaccttgctataagcaggttctagagccttctttccgccaggcctttcccaataccaaccgctggttcctcacctgcattaaccagccccagttccgggctgtcttgggggaagtgaaactgtgtgagaagatggcccagtttgatgctaaaaagtttgcagagacccaacctaaaaaggacacaccacggaaagagaagggttcacgggaagagaagcagaagccccaggctgagcggaaggaggagaaaaaggcggctgcccctgctcctgaggaggagatggatgaatgtgagcaggcgctggctgctgagcccaaggccaaggaccccttcgctcacctgcccaagagtacctttgtgttggatgaatttaagcgcaagtactccaatgaggacacactctctgtggcactgccatatttctgggagcactttgataaggacggctggtccctgtggtactcagagtatcgcttccctgaagaactcactcagaccttcatgagctgcaatctcatcactggaatgttccagcgactggacaagctgaggaagaatgccttcgccagtgtcatcctttttggaaccaacaatagcagctccatttctggagtctgggtcttccgaggccaggagcttgcctttccgctgagtccagattggcaggtggactacgagtcatacacatggcggaaactggatcctggcagcgaggagacccagacgctggttcgagagtacttttcctgggagggggccttccagcatgtgggcaaagccttcaatcagggcaagatcttcaagtgaacatctcttgccatcacctagctgcctgcacctgcccttcagggagatgggggtcattaaaggaaactgaacatt

SEQ ID NO: 314046 - DNA, 751 bp, Homo sapiens
gccctttctttgcggaatcaccatggcggctgggaccctgtacacgtatcctgaaaactggagggccttcaaggctctcatcgctgctcagtacagcggggctcaggtccgcgtgctctccgcaccaccccacttccattttggccaaaccaaccgcacccctgaatttctccgcaaatttcctgccggcaaggtcccagcatttgagggtgatgatggattctgtgtgtttgagagcaacgccattgcctactatgtgagcaatgaggagctgcggggaagtactccagaggcagcagcccaggtggtgcagtgggtgagctttgctgattccgatatagtgcccccagccagtacctgggtgttccccaccttgggcatcatgcaccacaacaaacaggccactgagaatgcaaaggaggaagtgaggcgaattctggggctgctggatgcttacttgaagacgaggacttttctggtgggcgaacgagtgacattggctgacatcacagttgtctgcaccctgttgtggctctataagcaggttctagagccttctttccgccaggcctttcccaataccaaccgctggttcctcacctgcattaaccagccccagttccgggctgtcttgggggaagtgaaactgtgtgagaagatggcccagtttgatgctaaaaagtttgccatcacctagctgcctgcacctgcccttcagggagatgggggtcattaaaggaaactgaacatt

SEQ ID NO: 314047 - DNA, 4208 bp, Homo sapiens
caaacttttccgccctgggctcgggatcctggactccggggcctccccgtcctcccctttcccgggttccagctccggcctctggactaggaaccgacagcccccctccccgcgtccctccctctctctccagccgttttggggaggggctctccacgctccggatagttcccgagggtcatccgcgccgcactcgcctttccgtttcgccttcacctggatataatttccgagcgaagctgcccccaggatgaccacgctggccggcgctgtgcccaggatgatgcggccgggcccggggcagaactacccgcgtagcgggttcccgctggaagtgtccactcccctcggccagggccgcgtcaaccagctcggcggcgtttttatcaacggcaggccgctgcccaaccacatccgccacaagatcgtggagatggcccaccacggcatccggccctgcgtcatctcgcgccagctgcgcgtgtcccacggctgcgtctccaagatcctgtgcaggtaccaggagactggctccatacgtcctggtgccatcggcggcagcaagcccaagcaggtgacaacgcctgacgtggagaagaaaattgaggaatacaaaagagagaacccgggcatgttcagctgggaaatccgagacaaattactcaaggacgcggtctgtgatcgaaacaccgtgccgtcagtgagttccatcagccgcatcctgagaagtaaattcgggaaaggtgaagaggaggaggccgacttggagaggaaggaggcagaggaaagcgagaagaaggccaaacacagcatcgacggcatcctgagcgagcgagcctcagcaccccaatcagatgaaggctctgatattgactctgaaccagatttaccactaaagaggaaacagcgcagaagccgaaccaccttcacagcagaacagctggaggaactggagcgtgcttttgagagaactcattaccctgacatttatactagggaggaactggcccagagggcgaagctcaccgaggcccgagtacaggtctggtttagcaaccgccgtgcaagatggaggaagcaagctggggccaatcaactgatggctttcaaccatctcattcccggggggttccctcccactgccatgccgaccttgccaacgtaccagctgtcggagacctcttaccagcccacatctattccacaagctgtgtcagatcccagcagcaccgttcacagacctcaaccgcttcctccaagcactgtacaccaaagcacgattccttccaacccagacagcagctctgcctactgcctccccagcaccaggcatggattttccagctatacagacagctttgtgcctccgtcggggccctccaaccccatgaaccccaccattggcaatggcctctcacctcagaattcaattcgtcataatctgtccctacacagcaagttcattcgtgtgcagaatgaaggaactggaaaaagttcttggtggatgctcaatccagagggtggcaagagcgggaaatctcctaggagaagagctgcatccatggacaacaacagtaaatttgctaagagccgaagccgagctgccaagaagaaagcatctctccagtctggccaggagggtgctggggacagccctggatcacagttttccaaatggcctgcaagccctggctctcacagcaatgatgactttgataactggagtacatttcgccctcgaactagctcaaatgctagtactattagtgggagactctcacccattatgaccgaacaggatgatcttggagaaggggatgtgcattctatggtgtacccgccatctgccgcaaagatggcctctactttacccagtctgtctgagataagcaatcccgaaaacatggaaaatcttttggataatctcaaccttctctcatcaccaacatcattaactgtttcgacccagtcctcacctggcaccatgatgcagcagacgccgtgctactcgtttgcgccaccaaacaccagtttgaattcacccagcccaaactaccaaaaatatacatatggccaatccagcatgagccctttgccccagatgcctatacaaacacttcaggacaataagtcgagttatggaggtatgagtcagtataactgtgcgcctggactcttgaaggagttgctgacttctgactctcctccccataatgacattatgacaccagttgatcctggggtagcccagcccaacagccgggttctgggccagaacgtcatgatgggccctaattcggtcatgtcaacctatggcagccaggcatctcataacaaaatgatgaatcccagctcccatacccaccctggacatgctcagcagacatctgcagttaacgggcgtcccctgccccacacggtaagcaccatgccccacacctcgggtatgaaccgcctgacccaagtgaagacacctgtacaagtgcctctgccccaccccatgcagatgagtgccctggggggctactcctccgtgagcagctgcaatggctatggcagaatgggccttctccaccaggagaagctcccaagtgacttggatggcatgttcattgagcgcttagactgtgacatggaatccatcattcggaatgacctcatggatggagatacattggattttaactttgacaatgtgttgcccaaccaaagcttcccacacagtgtcaagacaacgacacatagctgggtgtcaggctgagggttagtgagcaggttacacttaaaagtacttcagattgtctgacagcaggaactgagagaagcagtccaaagatgtctttcaccaactcccttttagttttcttggttaaaaaaaaaaacaaaaaaaaaaaccctccttttttcctttcgtcagacttggcagcaaagacatttttcctgtacaggatgtttgcccaatgtgtgcaggttatgtgctgctgtagataaggactgtgccattggaaatttcattacaatgaagtgccaaactcactacaccatataattgcagaaaagattttcagatcctggtgtgctttcaagttttgtatataagcagtagatacagattgtatttgtgtgtgtttttggtttttctaaatatccaattggtccaaggaaagtttatactctttttgtaatactgtgatgggcctcatgtcttgataagttaaacttttgtttgtactacctgttttctgcggaactgacggatcacaaagaactgaatctccattctgcatctccattgaacagccttggacctgttcacgttgccacagaattcacatgagaaccaagtagcctgttatcaatctgctaaattaatggacttgttaaacttttggaaaaaaaaagattaaatgccagctttgtacaggtcttttctatttttttttgtttattttgttatttgcaaatttgtacaaacatttaaatggttctaatttccagataaatgatttttgatgttattgttgggacttaagaacatttttggaatagatattgaactgtaataatgttttcttaaaactagagtctactttgttacatagtcagcttgtaaattttgtggaaccacaggtatttgggggcagcattcataattttcattttgtattctaactggattagtactaattttatacatgcttaactggtttgtacactttgggatgctacttagtgatgtttctgactaatcttaaatcattgtaattagtacttgcatattcaacgtttcaggccctggttgggcaggaaagtgatgtatagttatggacactttgcgtttcttatttaggataacttaatatgtttttatgtatgtattttaaagaaatttcactgcttctctgaactatgcgtactgcatagcatcaagtcttctctagagacctctgtagtcctgggaggcctcataatgtttgtagatacagaaagggagactgcatctaaagcaatggtcctttgtcaaacgagggattttgatccacttcaccattttgagttgagctttagcaaaagtttccctcataattctttgctcttgtttcagtccaggtggaggttggttttgtagttctgccttgaggaattatgtcaacactcatacttcatctcattctcccttctgccctgcagattagattacttagcac

SEQ ID NO: 314048 - DNA, 964 bp, Homo sapiens
caaacttttccgccctgggctcgggatcctggactccggggcctccccgtcctcccctttcccgggttccagctccggcctctggactaggaaccgacagcccccctccccgcgtccctccctctctctccagccgttttggggaggggctctccacgctccggatagttcccgagggtcatccgcgccgcactcgcctttccgtttcgccttcacctggatataatttccgagcgaagctgcccccaggatgaccacgctggccggcgctgtgcccaggatgatgcggccgggcccggggcagaactacccgcgtagcgggttcccgctggaagtgtccactcccctcggccagggccgcgtcaaccagctcggcggcgtttttatcaacggcaggccgctgcccaaccacatccgccacaagatcgtggagatggcccaccacggcatccggccctgcgtcatctcgcgccagctgcgcgtgtcccacggctgcgtctccaagatcctgtgcaggtaccaggagactggctccatacgtcctggtgccatcggcggcagcaagcccaagcaggtgacaacgcctgacgtggagaagaaaattgaggaatacaaaagagagaacccgggcatgttcagctgggaaatccgagacaaattactcaaggacgcggtctgtgatcgaaacaccgtgccgtcagtgagttccatcagccgcatcctgagaagtaaattcgggaaaggtgaagaggaggaggccgacttggagaggaaggaggcagaggaaagcgagaagaaggccaaacacagcatcgacggcatcctgagcgagcgaggaaaggccctggtctccggagtttcctcgcattaaaggagagagagagagagtactcttttgggcaacggccctccaaaattgcccccacattggctgccttataaatatgtctgtgtgttgactggt

SEQ ID NO: 314049 - DNA, 1080 bp, Homo sapiens
cgcaagcacactgccacacacacacacacacacacacacacacacacaccaaggagagagagagaaaactgatggggaaaaccagctgtgtcttcttaactgccccagtgataaatgcaaccatttttaggaagctagactagctgtaaaggacctcctaaataaattatttgttactgtatcctcatttgtaatctagttgtcaataaatggcccggacatgtcttgctaacaggatatgggctaccaggaagaaggacttgtttccctttcctgtgtggggagaggtgtgtgacgtttttccagttcacatttatttggtagcccacctgggttggaggaagggcacggtggagagaaagtgacatgcattcacatatctgcttatcagtgtgcaatactgtgtacctcatggatgctttggcaatgcccaaggcgatataagcaaaatcagaagtatatttttgcaggtgcttttattttcacagcccataattcatagtgatagagtgcagtgatgtttgccatttgctggacaaccaacacccgggttgctcctttgattagagaccagatcagataattatgcttttaaactgattacgtttacattcttctcttttctatgaaaggcagggcaagaacagaagtgttcacatggctctcatgtacttttaaattatacaatgatatccaatattaaaagattataggaactgaggtttacatacgtttgtgtggtgacattttagaatgtcaataaatttgctttttgagatgttgagaggaacaagaaggtggaaggcagtgttatttatttctttctattcttggaaccacgaatgaggtaggcacaaatacattccttttagagttaagaactatgacgtagcgagttagtgagactagacatagtaccgaatttagttcatgcattggtcttagagggtgatggaacaagagaagtactatctttgtgttgcagcctcaaccaacaacaatgtgttgtaaaaatgtctttcatgtaaaaagtgcagtaaatatttactatttataatgaataaacagttatgaaaactt

SEQ ID NO: 314050 - DNA, 2399 bp, Homo sapiens
gttgagggtagggaggggagttcctgttgttcctactcctgctcagtgattcctgcccatggtcctcataaggttcatgggggctgttgttgcaagatcatggtgggtccctgaagcccctctactgacctttgacactaaactcttcttttactcctgacaattcgcccaaacaacacagaaggcagagaactcttgcatctatttgccctttcagtctggtttagcaaccgccgtgcaagatggaggaagcaagctggggccaatcaactgatggctttcaaccatctcattcccggggggttccctcccactgccatgccgaccttgccaacgtaccagctgtcggagacctcttaccagcccacatctattccacaagctgtgtcagatcccagcagcaccgttcacagacctcaaccgcttcctccaagcactgtacaccaaagcacgattccttccaacccagacagcagctctgcctactgcctccccagcaccaggcatggattttccagctatacagacagctttgtgcctccgtcggggccctccaaccccatgaaccccaccattggcaatggcctctcacctcaggtaatgggactcctgaccaaccacggtggggtacctcatcagccccagactgattacgcgctctcccctctcaccgggggtctggaacctaccaccacggtgtcggccagctgcagtcagagactagaccatatgaagagcttggacagtctgccaacatctcagtcctactgtccacccacctatagcaccacaggctacagtatggaccctgtcacaggctaccaatatgggcagtatggacaaagtgcctttcattatctcaagccagatatcgcgtaagtgaactgtccacttggagctaaaactggccctgtttctggtcttcgcagcctagatatgaagaatctgctctgaaaacaaaaaaaaattacccttttgttggggggggtggggcagtggtcccaataggagacaaaggagagtgattgattttcttcctccaatagttggtttcaaatccttttgaacacgttcgacaaaagcagtggagaagaggaagacctggagcaataaaagacaaatgcaacattttaaggcaatggtttcacatggttacatatcaaaacatcccaattctttagtgctgatcatcgaggagctagaacattccatttgcttgtgtgcgtgcgtgcgtgtgtgtgtgtgtgtgtgtattgagatttacccagactggtttgggcaagcagactgttctaaaatataatagaataccctaaagtataacatgtcgatgttcgatgctgatacttctacaactttaaaactgctcatttcatgaagcaagaatggaggaatccttgactcttacacactggaaattgaaataaagataaatgcaaccatttttaggaagctagactagctgtaaaggacctcctaaataaattatttgttactgtatcctcatttgtaatctagttgtcaataaatggcccggacatgtcttgctaacaggatatgggctaccaggaagaaggacttgtttccctttcctgtgtggggagaggtgtgtgacgtttttccagttcacatttatttggtagcccacctgggttggaggaagggcacggtggagagaaagtgacatgcattcacatatctgcttatcagtgtgcaatactgtgtacctcatggatgctttggcaatgcccaaggcgatataagcaaaatcagaagtatatttttgcaggtgcttttattttcacagcccataattcatagtgatagagtgcagtgatgtttgccatttgctggacaaccaacacccgggttgctcctttgattagagaccagatcagataattatgcttttaaactgattacgtttacattcttctcttttctatgaaaggcagggcaagaacagaagtgttcacatggctctcatgtacttttaaattatacaatgatatccaatattaaaagattataggaactgaggtttacatacgtttgtgtggtgacattttagaatgtcaataaatttgctttttgagatgttgagaggaacaagaaggtggaaggcagtgttatttatttctttctattcttggaaccacgaatgaggtaggcacaaatacattccttttagagttaagaactatgacgtagcgagttagtgagactagacatagtaccgaatttagttcatgcattggtcttagagggtgatggaacaagagaagtactatctttgtgttgcagcctcaaccaacaacaatgtgttgtaaaaatgtctttcatgtaaaaagtgcagtaaatatttactatttataatgaataaacagttatgaaaactt

SEQ ID NO: 314051 - DNA, 1902 bp, Homo sapiens
  misc_feature (1700)..(1700): n is a, c, g, or t
  misc_feature (1902)..(1902): n is a, c, g, or t
caaacttttccgccctgggctcgggatcctggactccggggcctccccgtcctcccctttcccgggttccagctccggcctctggactaggaaccgacagcccccctccccgcgtccctccctctctctccagccgttttggggaggggctctccacgctccggatagttcccgagggtcatccgcgccgcactcgcctttccgtttcgccttcacctggatataatttccgagcgaagctgcccccaggatgaccacgctggccggcgctgtgcccaggatgatgcggccgggcccggggcagaactacccgcgtagcgggttcccgctggaagtgtccactcccctcggccagggccgcgtcaaccagctcggcggcgtttttatcaacggcaggccgctgcccaaccacatccgccacaagatcgtggagatggcccaccacggcatccggccctgcgtcatctcgcgccagctgcgcgtgtcccacggctgcgtctccaagatcctgtgcaggtaccaggagactggctccatacgtcctggtgccatcggcggcagcaagcccaagcaggtgacaacgcctgacgtggagaagaaaattgaggaatacaaaagagagaacccgggcatgttcagctgggaaatccgagacaaattactcaaggacgcggtctgtgatcgaaacaccgtgccgtcagtgagttccatcagccgcatcctgagaagtaaattcgggaaaggtgaagaggaggaggccgacttggagaggaaggaggcagaggaaagcgagaagaaggccaaacacagcatcgacggcatcctgagcgagcgagcctcagcaccccaatcagatgaaggctctgatattgactctgaaccagatttaccactaaagaggaaacagcgcagaagccgaaccaccttcacagcagaacagctggaggaactggagcgtgcttttgagagaactcattaccctgacatttatactagggaggaactggcccagagggcgaagctcaccgaggcccgagtacaggtctggtttagcaaccgccgtgcaagatggaggaagcaagctggggccaatcaactgatggctttcaaccatctcattcccggggggttccctcccactgccatgccgaccttgccaacgtaccagctgtcggagacctcttaccagcccacatctattccacaagctgtgtcagatcccagcagcaccgttcacagacctcaaccgcttcctccaagcactgtacaccaaagcacgattccttccaacccagacagcagctctgcctactgcctccccagcaccaggcatggattttccagctatacagacagctttgtgcctccgtcggggccctccaaccccatgaaccccaccattggcaatggcctctcacctcaggtaatgggactcctgaccaaccacggtggggtacctcatcagccccagactgattacgcgctctcccctctcaccgggggtctggaacctaccaccacggtgtcggccagctgcagtcagagactagaccatatgaagagcttggacagtctgccaacatctcagtcctactgtccacccacctatagcaccacaggctacagtatggaccctgtcacaggctaccaatatgggcagtatggacaaagtaagccttggactttttagggggcaattnctcctggaagggagataaactcaactcttccttaagaaaggtgaattagaggcaagattaagccacacatgccggtatcaatttttttttttttttgcaaagccagctgactgttccagcaggggcttccttgtgtaattattttcttaactgatgtcaacaacatcttgcggttattaattgttgagacgtgaaacctgan

SEQ ID NO: 314052 - DNA, 536 bp, Homo sapiens
ttctagagcaagctagactctctaccagctgcagggtctcctaagttgccactccccgggcccgaaggggaagacgctttctctggggagaattattttgccccatttgctgtctttacacaagattacatgcgctatattgctgaataatttgaacaaatgtgattgaaaggaggtctgggtctgggagtccgatgtcgagcagtttcagcgtcggtgctgtaacatgaggataggacagaagactgcgaaattacgtgctgctgttctttgctttttattttcctccagtgacttttcccttgcttctctttttcaccttcccacagtgtccactcccctcggccagggccgcgtcaaccagctcggcggcgtttttatcaacggcaggccgctgcccaaccacatccgccacaagatcgtggagatggcccaccacggcatccggccctgcgtcatctcgcgccagctgcgcgtgtcccacggctgcgtctccaagatcctgtgcaggtaccaggagactggctccatacgtc

SEQ ID NO: 314053 - DNA, 1371 bp, Homo sapiens
caaacttttccgccctgggctcgggatcctggactccggggcctccccgtcctcccctttcccgggttccagctccggcctctggactaggaaccgacagcccccctccccgcgtccctccctctctctccagccgttttggggaggggctctccacgctccggatagttcccgagggtcatccgcgccgcactcgcctttccgtttcgccttcacctggatataatttccgagcgaagctgcccccaggatgaccacgctggccggcgctgtgcccaggatgatgcggccgggcccggggcagaactacccgcgtagcgggttcccgctggaagtgtccactcccctcggccagggccgcgtcaaccagctcggcggcgtttttatcaacggcaggccgctgcccaaccacatccgccacaagatcgtggagatggcccaccacggcatccggccctgcgtcatctcgcgccagctgcgcgtgtcccacggctgcgtctccaagatcctgtgcaggtaccaggagactggctccatacgtcctggtgccatcggcggcagcaagcccaagcaggtgacaacgcctgacgtggagaagaaaattgaggaatacaaaagagagaacccgggcatgttcagctgggaaatccgagacaaattactcaaggacgcggtctgtgatcgaaacaccgtgccgtcagtgagttccatcagccgcatcctgagaagtaaattcgggaaaggtgaagaggaggaggccgacttggagaggaaggaggcagaggaaagcgagaagaaggccaaacacagcatcgacggcatcctgagcgagcgaggtaagcggtggcgccttgggcggcgcacttgctgggtgacttggagggcatcggctagctgacattggtgatctgacggcagccaagcccagctcggatcaaggtcccttcatgcgcggtgtctctgcgcctgagtaacgacatggaactgaaagaccagaggacactaggaatcaaaacaaacatttctattctgcttagtttttctgttttgtaaatctttctttcttaccactttcagcccctgggattctagaactgtgaattgtgctctgttgtagggggcaggggaagctctcactctgttgccattaaatgtatgagactgggcatctctgagcaattgtagggcctgggatagagggtacttgaatcttcagaagttgaagtagcttttatgccctcaggaaaggccctggtctccggagtttcctcgcattaaaggagagagagagagagtactcttttgggcaacggccctccaaaattgcccccacattggctgccttataaatatgtctgtgtgttgactggt

SEQ ID NO: 314054 - DNA, 3225 bp, Homo sapiens
caaacttttccgccctgggctcgggatcctggactccggggcctccccgtcctcccctttcccgggttccagctccggcctctggactaggaaccgacagcccccctccccgcgtccctccctctctctccagccgttttggggaggggctctccacgctccggatagttcccgagggtcatccgcgccgcactcgcctttccgtttcgccttcacctggatataatttccgagcgaagctgcccccaggatgaccacgctggccggcgctgtgcccaggatgatgcggccgggcccggggcagaactacccgcgtagcgggttcccgctggaagtgtccactcccctcggccagggccgcgtcaaccagctcggcggcgtttttatcaacggcaggccgctgcccaaccacatccgccacaagatcgtggagatggcccaccacggcatccggccctgcgtcatctcgcgccagctgcgcgtgtcccacggctgcgtctccaagatcctgtgcaggtaccaggagactggctccatacgtcctggtgccatcggcggcagcaagcccaagcaggtgacaacgcctgacgtggagaagaaaattgaggaatacaaaagagagaacccgggcatgttcagctgggaaatccgagacaaattactcaaggacgcggtctgtgatcgaaacaccgtgccgtcagtgagttccatcagccgcatcctgagaagtaaattcgggaaaggtgaagaggaggaggccgacttggagaggaaggaggcagaggaaagcgagaagaaggccaaacacagcatcgacggcatcctgagcgagcgagcctcagcaccccaatcagatgaaggctctgatattgactctgaaccagatttaccactaaagaggaaacagcgcagaagccgaaccaccttcacagcagaacagctggaggaactggagcgtgcttttgagagaactcattaccctgacatttatactagggaggaactggcccagagggcgaagctcaccgaggcccgagtacaggtctggtttagcaaccgccgtgcaagatggaggaagcaagctggggccaatcaactgatggctttcaaccatctcattcccggggggttccctcccactgccatgccgaccttgccaacgtaccagctgtcggagacctcttaccagcccacatctattccacaagctgtgtcagatcccagcagcaccgttcacagacctcaaccgcttcctccaagcactgtacaccaaagcacgattccttccaacccagacagcagctctgcctactgcctccccagcaccaggcatggattttccagctatacagacagctttgtgcctccgtcggggccctccaaccccatgaaccccaccattggcaatggcctctcacctcaggtaatgggactcctgaccaaccacggtggggtacctcatcagccccagactgattacgcgctctcccctctcaccgggggtctggaacctaccaccacggtgtcggccagctgcagtcagagactagaccatatgaagagcttggacagtctgccaacatctcagtcctactgtccacccacctatagcaccacaggctacagtatggaccctgtcacaggctaccaatatgggcagtatggacaaagtgcctttcattatctcaagccagatatcgcgtaagtgaactgtccacttggagctaaaactggccctgtttctggtcttcgcagcctagatatgaagaatctgctctgaaaacaaaaaaaaattacccttttgttggggggggtggggcagtggtcccaataggagacaaaggagagtgattgattttcttcctccaatagttggtttcaaatccttttgaacacgttcgacaaaagcagtggagaagaggaagacctggagcaataaaagacaaatgcaacattttaaggcaatggtttcacatggttacatatcaaaacatcccaattctttagtgctgatcatcgaggagctagaacattccatttgcttgtgtgcgtgcgtgcgtgtgtgtgtgtgtgtgtgtattgagatttacccagactggtttgggcaagcagactgttctaaaatataatagaataccctaaagtataacatgtcgatgttcgatgctgatacttctacaactttaaaactgctcatttcatgaagcaagaatggaggaatccttgactcttacacactggaaattgaaataaagataaatgcaaccatttttaggaagctagactagctgtaaaggacctcctaaataaattatttgttactgtatcctcatttgtaatctagttgtcaataaatggcccggacatgtcttgctaacaggatatgggctaccaggaagaaggacttgtttccctttcctgtgtggggagaggtgtgtgacgtttttccagttcacatttatttggtagcccacctgggttggaggaagggcacggtggagagaaagtgacatgcattcacatatctgcttatcagtgtgcaatactgtgtacctcatggatgctttggcaatgcccaaggcgatataagcaaaatcagaagtatatttttgcaggtgcttttattttcacagcccataattcatagtgatagagtgcagtgatgtttgccatttgctggacaaccaacacccgggttgctcctttgattagagaccagatcagataattatgcttttaaactgattacgtttacattcttctcttttctatgaaaggcagggcaagaacagaagtgttcacatggctctcatgtacttttaaattatacaatgatatccaatattaaaagattataggaactgaggtttacatacgtttgtgtggtgacattttagaatgtcaataaatttgctttttgagatgttgagaggaacaagaaggtggaaggcagtgttatttatttctttctattcttggaaccacgaatgaggtaggcacaaatacattccttttagagttaagaactatgacgtagcgagttagtgagactagacatagtaccgaatttagttcatgcattggtcttagagggtgatggaacaagagaagtactatctttgtgttgcagcctcaaccaacaacaatgtgttgtaaaaatgtctttcatgtaaaaagtgcagtaaatatttactatttataatgaataaacagttatgaaaactt

SEQ ID NO: 314055 - DNA, 3101 bp, Homo sapiens
caaacttttccgccctgggctcgggatcctggactccggggcctccccgtcctcccctttcccgggttccagctccggcctctggactaggaaccgacagcccccctccccgcgtccctccctctctctccagccgttttggggaggggctctccacgctccggatagttcccgagggtcatccgcgccgcactcgcctttccgtttcgccttcacctggatataatttccgagcgaagctgcccccaggatgaccacgctggccggcgctgtgcccaggatgatgcggccgggcccggggcagaactacccgcgtagcgggttcccgctggaagtgtccactcccctcggccagggccgcgtcaaccagctcggcggcgtttttatcaacggcaggccgctgcccaaccacatccgccacaagatcgtggagatggcccaccacggcatccggccctgcgtcatctcgcgccagctgcgcgtgtcccacggctgcgtctccaagatcctgtgcaggtaccaggagactggctccatacgtcctggtgccatcggcggcagcaagcccaagcaggtgacaacgcctgacgtggagaagaaaattgaggaatacaaaagagagaacccgggcatgttcagctgggaaatccgagacaaattactcaaggacgcggtctgtgatcgaaacaccgtgccgtcagtgagttccatcagccgcatcctgagaagtaaattcgggaaaggtgaagaggaggaggccgacttggagaggaaggaggcagaggaaagcgagaagaaggccaaacacagcatcgacggcatcctgagcgagcgagcctcagcaccccaatcagatgaaggctctgatattgactctgaaccagatttaccactaaagaggaaacagcgcagaagccgaaccaccttcacagcagaacagctggaggaactggagcgtgcttttgagagaactcattaccctgacatttatactagggaggaactggcccagagggcgaagctcaccgaggcccgagtacaggtctggtttagcaaccgccgtgcaagatggaggaagcaagctggggccaatcaactgatggctttcaaccatctcattcccggggggttccctcccactgccatgccgaccttgccaacgtaccagctgtcggagacctcttaccagcccacatctattccacaagctgtgtcagatcccagcagcaccgttcacagacctcaaccgcttcctccaagcactgtacaccaaagcacgattccttccaacccagacagcagctctgcctactgcctccccagcaccaggcatggattttccagctatacagacagcttttctcccctctcaccgggggtctggaacctaccaccacggtgtcggccagctgcagtcagagactagaccatatgaagagcttggacagtctgccaacatctcagtcctactgtccacccacctatagcaccacaggctacagtatggaccctgtcacaggctaccaatatgggcagtatggacaaagtgcctttcattatctcaagccagatatcgcgtaagtgaactgtccacttggagctaaaactggccctgtttctggtcttcgcagcctagatatgaagaatctgctctgaaaacaaaaaaaaattacccttttgttggggggggtggggcagtggtcccaataggagacaaaggagagtgattgattttcttcctccaatagttggtttcaaatccttttgaacacgttcgacaaaagcagtggagaagaggaagacctggagcaataaaagacaaatgcaacattttaaggcaatggtttcacatggttacatatcaaaacatcccaattctttagtgctgatcatcgaggagctagaacattccatttgcttgtgtgcgtgcgtgcgtgtgtgtgtgtgtgtgtgtattgagatttacccagactggtttgggcaagcagactgttctaaaatataatagaataccctaaagtataacatgtcgatgttcgatgctgatacttctacaactttaaaactgctcatttcatgaagcaagaatggaggaatccttgactcttacacactggaaattgaaataaagataaatgcaaccatttttaggaagctagactagctgtaaaggacctcctaaataaattatttgttactgtatcctcatttgtaatctagttgtcaataaatggcccggacatgtcttgctaacaggatatgggctaccaggaagaaggacttgtttccctttcctgtgtggggagaggtgtgtgacgtttttccagttcacatttatttggtagcccacctgggttggaggaagggcacggtggagagaaagtgacatgcattcacatatctgcttatcagtgtgcaatactgtgtacctcatggatgctttggcaatgcccaaggcgatataagcaaaatcagaagtatatttttgcaggtgcttttattttcacagcccataattcatagtgatagagtgcagtgatgtttgccatttgctggacaaccaacacccgggttgctcctttgattagagaccagatcagataattatgcttttaaactgattacgtttacattcttctcttttctatgaaaggcagggcaagaacagaagtgttcacatggctctcatgtacttttaaattatacaatgatatccaatattaaaagattataggaactgaggtttacatacgtttgtgtggtgacattttagaatgtcaataaatttgctttttgagatgttgagaggaacaagaaggtggaaggcagtgttatttatttctttctattcttggaaccacgaatgaggtaggcacaaatacattccttttagagttaagaactatgacgtagcgagttagtgagactagacatagtaccgaatttagttcatgcattggtcttagagggtgatggaacaagagaagtactatctttgtgttgcagcctcaaccaacaacaatgtgttgtaaaaatgtctttcatgtaaaaagtgcagtaaatatttactatttataatgaataaacagttatgaaaactt

SEQ ID NO: 314056 - DNA, 8795 bp, Homo sapiens
  misc_feature (1)..(2): n is a, c, g, or t
  misc_feature (4)..(4): n is a, c, g, or t
nngngtgttttcagtctctccgggttgcatgtactgtatgtggagcagtgtacagtgaagcggaggcagagcggctccgcgagcttctctccactttcccatagagaaaccctgactggccgctgagggctagctacacacacgccctcacgcccggcgagcccgcgaggtcactatcatatgacaaaggctttgccgcagttcatcttcctccctgtgtactttccatttgccttcctggaatcctgctgcatcacagaagctggaagttctgatgttccactgaaatcacaatggaaagtcttgacttgactggtcacagtaatgaaaggcagtaatagaaataaggatcattcagcagaaggagaaggggttggaaaacgaccaaaacgaaagtgtcttcagtggcatccattgctagcaaagaaacttcttgatttttcagaagaggaagaagaggaagacgaagaggaggatattgataaggttcaacttcttggggccgatggcctagagcaagatgttggtgaaactgaagatgatgaatcaccagagcagcgagcccggagaccaatgaatgcatttcttttattttgcaaacgccatcgctctcttgtacgtcaggaacaccccaggcttgataaccgaggtgctaccaagatactagctgattggtgggctgttcttgatccaaaggaaaagcagaaatacacagacatggccaaggagtataaggatgcatttatgaaagcaaatcctggctacaaatggtgtcctaccacaaacaagcctgtgaaatccccaacacccactgtcaatccacgaaagaaactttgggccttcccatctgactcttcaagagacttgccaagccccaagaaagcaaagactgaagaaatgcctcagcttaactttggaatggctgatcctactcaaatgggaggcctgagtatgctgctgttagctggagaacatgctcttggcacaccagaggtatcctctggcacatgcaggcctgatgtttcagaatctcctgaattacgtcagaagtcaccattgtttcagtttgccgagatatcttcaagtacgtcccactctgatgcttctacaaagcagtgtcaaacatctgccttgtttcagtttgcagagatttcttcaaacacttcgcagttgggtggtgctgagcctgtaaaacgctgtggaaagtctgcactctttcaactggcagagatgtgcctggcatcagaagggatgaaaatggaagaatcaaagctaataaaagcaaaagaatccgatggtggaagaattaaagaattagagaagggaaaggaagaaaaagaaattaaaatggagaaaacagatgaaactaggttacagaaggaagcagaatttgaaaaatcggctaaggaaaatttaagagattctaaggaattgagaaattttgaggcattgcaaatagatgacataatggctataaaaatggaagatcccaaagaaattagaaaggaagagttagaagaagatcacaaatgtagtcattttcctgatttttcttattctgccagtagcaagataataattagtgatgttcccagtagaaaggatcatatgtgccatcctcatggaattatgatcattgaggatcccgcagcattaaacaagccagaaaagctaaaaaagaaaaagaagaaaagcaaaatggatcgacatggaaatgataaatccacacccaagaagacttgcaaaaagaggcagtcttcggaatctgacattgagagcgtcatatataccattgaagccgtcgcaaaaggagactggggcatagagaaacttggagatacccctcgcaagaaggtccgcacatcctcaagtggcaagggaagcattttggatgccaagccaccaaagaaaaaagtgaaatcaagagagaagaaaatgtcaaaggagaaatcctcagacaccaccaaagagtcaagacctccagatttcattagtatttctgctagcaagaacatttctggtgagacaccagagggtataaaagcagaaccattgacccctatggaagatgcactaccacccagcctatcaggacaggccaagcctgaggacagtgactgtcacagaaaaatagaaacttgtggttccaggaaatccgagaggtcttgcaaaggtgctctttataaaaccctggtgtctgagggcatgctcacctctctgcgagctaatgttgacagaggaaaacgaagctcaggaaaaggaaactcctctgatcatgaagggtgttggaatgaagaaagctggacatttagtcagagtgggaccagtgggagcaagaagttcaagaagacaaagccaaaagaagactgtctccttggctccgcaaagctggatgaagaatttgaaaaaaaattcaacagcctccctcaatatagtcctgttacatttgaccggaaatgtgtacctgtcccaagaaaaaagaagaagactggaaatgtgtcctcagaaccgactaaaaccagcaaaggaagtggggataaatggtcaaacaagcaactcttcttggatgccattcaccctacagaagccatattttcagaagacagaaacaccatggagcctgttcataaggttaaaaatatcccatccattttcaacactccagagccaacaacaacgcaagaacctttggtgggcagccaaaagagaaaagcaaggaaaaccaagattacacaccttgtcaggacagcagatggccgggtatcaccagcaggaggtactttggatgacaaaccaaaggaacaactgcagaggagtctccctaaagcaactgagacagactgcaatgacaaatgctcacacaacaccgaggtcggggagacgcggagcagtactccagaaatgcctgccgtgtctgcgttctttagcctcgctgcgctggctgaagtggcagccatggaaaatgtgcacagaggtcagaggtcaactccgctcacccatgatggacagccaaaagaaatgccgcaggctcctgtacttatttcctgcgctgaccagtgaagcgccctttcattgtaaaacattgtgctttacctactaccctagccttgtctttaccgagggatgctagtgagtccaagtggtggaaaatatagactgcaaacaagtgcttgttgccccacacggcccagattcacttgaagcagaagttagcatcctgggccagtttgttctctcagaacccagaatctttgagggtaaggttatctgtctgatactgagcagaaacagaatgatcctggagctttgctttctattgaaggcttttgacggtaataggtggtaacttggtaaaaggctgcctttactgtagctcacccagcatctcttttaccaaccagagagtgtgaaactagtttcatatattacctagttattctttcaaaacaaaacaaaaaaaaaacaaaaactgacgcactgcactagttattattagatattcttagtcttttttgtacatggagatttaagtttaagatggtttatataataggttatacctacatttatattgtagaataaatattaaaaagcctgttccagagactcccaagcagcctgggcaggcagatgtaccattgttagtggtgtatgctcggcctcgtggtccatatattctgcacttttatatttgccaccagaatggtagtttgctggcaaaaaaaaaaaaaagagagagagaaaaaattacaactcttacaatctgaatttttttcttagccttgagtgaccaagaagaatttgcttgaggcaaattgtggcaaatattttcccagacaggggaagagtcctgcagattacagattactggtgttttcatgccttgaggattcttttatttttacataggggtctaagtgaccaatggattgttcatacaaacaaaaaaaaagacaaaaatattattcagaagtgaccttagtattacttcactattctaaacacattgaagacactcacttcatgtggacttggagctacagaccttttacatccatcacagattggctggacgggttgcaattgctatgcacagcctgattggcactgcaggtttttagagccattttgagtttgtgttgtttaggaggtactgagtcaatgatgagggaggtatgcctgaccagagtgggactctcagtcatagatccacctgcaagtctctgtttcctttttgtgttttgttgcttttgaacataaaaccaaccatacataagcagcgccaagtggattaactggcttagaacattcaacatattgacttaaccacctgacattcacagtgtcttgtttcctagcaacagatgcaaagtgataaatcaaaattagtctgaggctacagattttacagggtatttgttctatagcacaaagtatttccccactcttgcgtcacagcacaaactaccaaattttaattattggattccagcaataatttttaatggttttcaaactggcggaattttgacagtgctagttcgagtttgaagcttttgaattagatctctaaatggtgacagtttacatggttttatctagctttcttatttatacttgactgaattgtaatgattttttttctaattgtaatttgacgtaatagccatacaaaaaatgactctattcatactaggtttagcttctcatggttgtagatattacttcagttccggtgctggaaaatatgtacaacatactaacaggattgaaaaaaaaatagaggtttttcttcttgtttttttttccaaagcaggtaaagagggtagcaaagcatcggaatgatgtgctcaaaaatgcatattcctggtggggatggaggaagaaggcattagtaaaaggttaatcaaacgttacaacttaaccccattcatgtaggaataaatcaagtgagcagttccagacttttgcataatatttttactatgatgctgttttattaatattttctaaatttcaaaacaaaaagtgaatgtttgaaattgctgggtcccgatgttggtggctgttggagttttggaccactcgctagcagtgatttgaagattataattagctaaaatccaaaacaaaaaaccaacaacaaaaattgtatggtgcggaacatgcaccttgacaatggtactaacttgttattctatagaacacgttagaatagatctatttttgccagagcaccctccttcagtcctccgattacatttcactagagttccttacgagattgctgtatattcctgggacctttttttaaaaaaaaaaaaagcaaaacaaaagattactttttttctatgtgattaatatcttacttgatctgcttttcctaaacctcagtggcttttcccttaggcagggttgggggtgggagggcaacttactggagatgactgttttcagatactttaaaacaaacctttttgtagaaatgcttaatttttaagcggttaggcactgagagtagcagaaatcctgcaaagctttatagttccttagactcaccttgtcgattctctgagtaaagtcttgatttcaataattgtgcttctcatgccctgaatctgctggagaggagtgttgttattttcaggtaacaacattcgttagcacaaatatttcagaccaatattagtgctctccaccccaccttttgttatcattttcatttcatttctctcattcttttttattttggaaaatcatattgctatagtgtgtactttaatctgccagcagataccatctacactaacatttgtcccacagcatcctcaagagaaaaagttgttgcaccttatatatatctcaagcaaaccaaaatatgatgctcttctgctttgttttattctaaattgttgtatcatatctttctgaaaccattctgaatttagttgaaattatcaatatttatgcttttaaccttaatttctggattcaagcctgtatataaatcttttgaaaaaaaattgtcctagcccttctctgcgatgctggaagtagaagattgcgtctcagatggagacgcagtactgttccagttttctttagccttttatttatttagttattctgggtatttcctatgtaattttgaagtgtgtagagtatattatagtaactgaagctgcagctgtaagaagctgagtgaaagaaaaaatactgtaagacatccttaaagtttttatttgtttgggtactgtatatgagatcaggaaaaagaaaaatgtcccacagccacattggaaatacaggttcttgtccccaaattaggttagttcccagattttagatcaaaactgttaattcattaaaaccccttttaaaaggtaaattctactgttgtaattccgatagtctttttcccacaaatatcagaaatatatttatttaattctgtcagatgagctttctaccgatgccatgtcccaaagccatgttaaaataattcccacgttatcattgtgattctacttcctgccactaaaattgctggagaaacaaaataatgatggaacactatgaacaaaaaggagcatctgaactggtctggttatttagaatccaatgtgttcaaatccttttgttttcttattaagtcagatgctactgtaagtcagataaaattttgtttgcactctgcagtctttggctcaatgtatggaaatgtttgcacctatgtaaagtcacaagctaattacaaattgctacagaacaggagtaagctgaaaactgaatgccatgttttgtttataaggtggggaggggagggaaaataccaaaaaactctgttccaagtttggcatttgacattaatgtgaagcagtgggaccatgctgcctgctaaactactgtatgaatcgtaaatgttctgaagacgagcagctggaggctggaggatggcattccatacagcaaaggagaagcacccaccacttcatctgggaaaaggaaggaaattgcaggaggcctggagccatcatttgtaaaggggatgttgcggggtgtgatgctgttgaggagattcaccttcaattgcactgctccacagagccctcatataaggccaatcctaatgggctacctcggctttaaaagttaatttcagtaagtcctgtttcaaaagtttgtctttttttgcttctaccttcagtgccactattttccactgcagtgttttgacttcacaaactgcctcctccagagagaacaatgtattgctgaaaatgggcagtagaagcaaatgctgttgttacatttgacctataaagtattcagagtgactgctaggtagaaattaaaacttagctttcccaaatagctccttattttgcaccttataaaaagtatactaattgttaattagatgttgcttttgtttatacaagcattcccaaagaactagatttggattttgttttgagtttttggatttttaaaaattatcttatttagattgactaacagcatacttacaattttaaaagaagctgttgttcagttcatcttaccagatgtgtctggcgaagtattcagggtttgatggactgctttactttcgtttggaagtgatagctaagtttattatactctatattaaacaactttgttcatttcactgaggaccttatcttccttatatttcagaacaaagaagcaacaagcgtgaataaaaagacaaatgtatttgactccctcataatccccatctgtatgtgctacccttccttcaaatatataaatgtgcatctttttttttaaaaaaaaaaaaaaaaaggttcctcttctggccaaatttgatctatggtggtatgattcatactgttaaattgagagaggaaaccttgtggttaaaaattatatggctgctgttttctttttgcagtcagtggtcaaaactgatcatgtgcttaaatcgatttttatgcacagaactagttattgtgaacattactgctccctccaaagatttcctgataacttgggccagaggtggttactgagtaacaaggatctaattcaatgcctcaaaactcttccacccacaatgcaaatcttacctcacaagctctaacctaaatcacagagacatgcatgtttcatgcattaacactgatttcgctctgtggcccaccagaggggtgggctcatgtcccctgactcctcacatgagtgcctcagctctaagagccgtggaacggggggtagggaaggtttgcgatctggagctcagcaactggctcagcaacgttttctccatttcattagcactaaacaagtctcttgctctcaggaatttgtcagaaaaaagaataaaatcacctgagactccacataccagattataaactcttctcgtaggtttgaattgcttactcacatgtcataaattaaccacagcttcatttgaccaccaggtctaaagtctgttgacagtttcagcatgactgaatcgctcattttttttttttgctttcagaaattggcttggttctctttagagttggtgtaaacatgccatgtaataaatgatttccacttaatggtacaacagaattattgctttcttagatgtatgtgtagtaaaagtcaatatacacatttatataatttctttcttcaaaatcttatacctaatttgatatttctaaaaattgcacatgtaagtcatgtgtataacatgctaaagtactttaactgtgatcttaaaactgaataaaaatatttaataaaactttgaa

SEQ ID NO: 314057 - DNA, 8932 bp, Homo sapiens
  misc_feature (1)..(2): n is a, c, g, or t
  misc_feature (4)..(4): n is a, c, g, or t
nngngtgttttcagtctctccgggttgcatgtactgtatgtggagcagtgtacagtgaagcggaggcagagcggctccgcgagcttctctccactttcccatagagaaaccctgactggccgctgagggctagctacacacacgccctcacgcccggcgagcccgcgaggtcactatcatatgacaaaggctttgccgcagttcatcttcctccctgtgtactttccatttgccttcctggaatcctgctgcatcacagaagctggaagttctgatgttccactgaaatcacaatggaaagtcttgacttgactggtcacagtaatgaaaggcagtaatagaaataaggatcattcagcagaaggagaaggggttggaaaacgaccaaaacgaaagtgtcttcagtggcatccattgctagcaaagaaacttcttgatttttcagaagaggaagaagaggaagacgaagaggaggatattgataaggttcaacttcttggggccgatggcctagagcaagatgttggtgaaactgaagatgatgaatcaccagagcagcgagcccggagaccaatgaatgcatttcttttattttgcaaacgccatcgctctcttgtacgtcaggaacaccccaggcttgataaccgaggtgctaccaagatactagctgattggtgggctgttcttgatccaaaggaaaagcagaaatacacagacatggccaaggagtataaggatgcatttatgaaagcaaatcctggctacaaatggtgtcctaccacaaacaagcctgtgaaatccccaacacccactgtcaatccacgaaagaaactttgggccttcccatctgactcttcaagagacttgccaagccccaagaaagcaaagactgaagaaatgcctcagcttaactttggaatggctgatcctactcaaatgggaggcctgagtatgctgctgttagctggagaacatgctcttggcacaccagaggtatcctctggcacatgcaggcctgatgtttcagaatctcctgaattacgtcagaagtcaccattgtttcagtttgccgagatatcttcaagtacgtcccactctgatgcttctacaaagcagtgtcaaacatctgccttgtttcagtttgcagagatttcttcaaacacttcgcagttgggtggtgctgagcctgtaaaacgctgtggaaagtctgcactctttcaactggcagagatgtgcctggcatcagaagggatgaaaatggaagaatcaaagctaataaaagcaaaagaatccgatggtggaagaattaaagaattagagaagggaaaggaagaaaaagaaattaaaatggagaaaacagatgaaactaggttacagaaggaagcagaatttgaaaaatcggctaaggaaaatttaagagattctaaggaattgagaaattttgaggcattgcaaatagatgacataatggctataaaaatggaagatcccaaagaaattagaaaggaagagttagaagaagatcacaaatgtagtcattttcctgatttttcttattctgccagtagcaagataataattagtgatgttcccagtagaaaggatcatatgtgccatcctcatggaattatgatcattgaggatcccgcagcattaaacaagccagaaaagctaaaaaagaaaaagaagaaaagcaaaatggatcgacatggaaatgataaatccacacccaagaagacttgcaaaaagaggcagtcttcggaatctgacattgagagcgtcatatataccattgaagccgtcgcaaaaggagactggggcatagagaaacttggagatacccctcgcaagaaggtccgcacatcctcaagtggcaagggaagcattttggatgccaagccaccaaagaaaaaagtgaaatcaagagagaagaaaatgtcaaaggagaaatcctcagacaccaccaaagagtcaagacctccagatttcattagtatttctgctagcaagaacatttctggtgagacaccagagggtataaaagcagaaccattgacccctatggaagatgcactaccacccagcctatcaggacaggccaagcctgaggacagtgactgtcacagaaaaatagaaacttgtggttccaggaaatccgagaggtcttgcaaaggtgctctttataaaaccctggtgtctgagggcatgctcacctctctgcgagctaatgttgacagaggaaaacgaagctcaggaaaaggaaactcctctgatcatgaagggtgttggaatgaagaaagctggacatttagtcagagtgggaccagtgggagcaagaagttcaagaagacaaagccaaaagaagactgtctccttggctccgcaaagctggatgaagaatttgaaaaaaaattcaacagcctccctcaatatagtcctgttacatttgaccggaaatgtgtacctgtcccaagaaaaaagaagaagactggaaatgtgtcctcagaaccgactaaaaccagcaaaggaagtggggataaatggtcaaacaagcaactcttcttggatgccattcaccctacagaagccatattttcagaagacagaaacaccatggagcctgttcataaggttaaaaatatcccatccattttcaacactccagagccaacaacaacgcaagaacctttggtgggcagccaaaagagaaaagcaaggaaaaccaagattacacaccttgtcaggacagcagatggccgggtatcaccagcaggaggtactttggatgacaaaccaaaggaacaactgcagaggagtctccctaaagcaactgagacagactgcaatgacaaatgctcacacaacaccgaggtcggggagacgcggagcagtactccagaaatgcctgccgtgtctgcgttctttagcctcgctgcgctggctgaagtggcagccatggaaaatgtgcacagaggtcagaggtcaactccgctcacccatgatggacagccaaaagaaatgccgcaggctcctgtacttatttcctgcgctgaccagtgaagcgccctttcattgtaaaacattgtgctttacctactaccctagccttgtctttaccgagggatgctagtgagtccaagtggtggaaaatatagactgcaaacaagtgcttgttgccccacacggcccagattcacttgaagcagaagttagcatcctgggccagtttgttctctcagaacccagaatctttgagggtaaggttatctgtctgatactgagcagaaacagaatgatcctggagctttgctttctattgaaggcttttgacggtaataggtggtaacttggtaaaaggctgcctttactgtagctcacccagcatctcttttaccaaccagagagtgtgaaactagtttcatatattacctagttattctttcaaaacaaaacaaaaaaaaaacaaaaactgacgcactgcactagttattattagatattcttagtcttttttgtacatggagatttaagtttaagatggtttatataataggttatacctacatttatattgtagaataaatattaaaaagcctgttccagagactcccaagcagcctgggcaggcagatgtaccattgttagtggtgtatgctcggcctcgtggtccatatattctgcacttttatatttgccaccagaatggtagtttgctggcaaaaaaaaaaaaaagagagagagaaaaaattacaactcttacaatctgaatttttttcttagccttgagtgaccaagaagaatttgcttgaggcaaattgtggcaaatattttcccagacaggggaagagtcctgcagattacagattactggtgttttcatgccttgaggattcttttatttttacataggggtctaagtgaccaatggattgttcatacaaacaaaaaaaaagacaaaaatattattcagaagtgaccttagtattacttcactattctaaacacattgaagacactcacttcatgtggacttggagctacagaccttttacatccatcacagattggctggacgggttgcaattgctatgcacagcctgattggcactgcaggtttttagagccattttgagtttgtgttgtttaggaggtactgagtcaatgatgagggaggtatgcctgaccagagtgggactctcagtcatagatccacctgcaagtctctgtttcctttttgtgttttgttgcttttgaacataaaaccaaccatacataagcagcgccaagtggattaactggcttagaacattcaacatattgacttaaccacctgacattcacagtgtcttgtttcctagcaacagatgcaaagtgataaatcaaaattagtctgaggctacagattttacagggtatttgttctatagcacaaagtatttccccactcttgcgtcacagcacaaactaccaaattttaattattggattccagcaataatttttaatggttttcaaactggcggaattttgacagtgctagttcgagtttgaagcttttgaattagatctctaaatggtgacagtttacatggttttatctagctttcttatttatacttgactgaattgtaatgattttttttctaattgtaatttgacgtaatagccatacaaaaaatgactctattcatactaggtttagcttctcatggttgtagatattacttcagttccggtgctggaaaatatgtacaacatactaacaggattgaaaaaaaaatagaggtttttcttcttgtttttttttccaaagcaggtaaagagggtagcaaagcatcggaatgatgtgctcaaaaatgcatattcctggtggggatggaggaagaaggcattagtaaaaggttaatcaaacgttacaacttaaccccattcatgtaggaataaatcaagtgagcagttccagacttttgcataatatttttactatgatgctgttttattaatattttctaaatttcaaaacaaaaagtgaatgtttgaaattgctgggtcccgatgttggtggctgttggagttttggaccactcgctagcagtgatttgaagattataattagctaaaatccaaaacaaaaaaccaacaacaaaaattgtatggtgcggaacatgcaccttgacaatggtactaacttgttattctatagaacacgttagaatagatctatttttgccagagcaccctccttcagtcctccgattacatttcactagagttccttacgagattgctgtatattcctgggacctttttttaaaaaaaaaaaaagcaaaacaaaagattactttttttctatgtgattaatatcttacttgatctgcttttcctaaacctcagtggcttttcccttaggcagggttgggggtgggagggcaacttactggagatgactgttttcagatactttaaaacaaacctttttgtagaaatgcttaatttttaagcggttaggcactgagagtagcagaaatcctgcaaagctttatagttccttagactcaccttgtcgattctctgagtaaagtcttgatttcaataattgtgcttctcatgccctgaatctgctggagaggagtgttgttattttcaggtaacaacattcgttagcacaaatatttcagaccaatattagtgctctccaccccaccttttgttatcattttcatttcatttctctcattcttttttattttggaaaatcatattgctatagtgtgtactttaatctgccagcagataccatctacactaacatttgtcccacagcatcctcaagagaaaaagttgttgcaccttatatatatctcaagcaaaccaaaatatgatgctcttctgctttgttttattctaaattgttgtatcatatctttctgaaaccattctgaatttagttgaaattatcaatatttatgcttttaaccttaatttctggattcaagcctgtatataaatcttttgaaaaaaaattgtcctagcccttctctgcgatgctggaagtagaagattgcgtctcagatggagacgcagtactgttccagttttctttagccttttatttatttagttattctgggtatttcctatgtaattttgaagtgtgtagagtatattatagtaactgaagctgcagctgtaagaagctgagtgaaagaaaaaatactgtaagacatccttaaagtttttatttgtttgggtactgtatatgagatcaggaaaaagaaaaatgtcccacagccacattggaaatacaggttcttgtccccaaattaggttagttcccagattttagatcaaaactgttaattcattaaaaccccttttaaaaggtaaattctactgttgtaattccgatagtctttttcccacaaatatcagaaatatatttatttaattctgtcagatgagctttctaccgatgccatgtcccaaagccatgttaaaataattcccacgttatcattgtgattctacttcctgccactaaaattgctggagaaacaaaataatgatggaacactatgaacaaaaaggagcatctgaactggtctggttatttagaatccaatgtgttcaaatccttttgttttcttattaagtcagatgctactgtaagtcagataaaattttgtttgcactctgcagtctttggctcaatgtatggaaatgtttgcacctatgtaaagtcacaagctaattacaaattgctacagaacaggagtaagctgaaaactgaatgccatgttttgtttataaggtggggaggggagggaaaataccaaaaaactctgttccaagtttggcatttgacattaatgtgaagcagtgggaccatgctgcctgctaaactactgtatgaatcgtaaatgttctgaagacgagcagctggaggctggaggatggcattccatacagcaaaggagaagcacccaccacttcatctgggaaaaggaaggaaattgcaggaggcctggagccatcatttgtaaaggggatgttgcggggtgtgatgctgttgaggagattcaccttcaattgcactgctccacagagccctcatataaggccaatcctaatgggctacctcggctttaaaagttaatttcagtaagtcctgtttcaaaagtttgtctttttttgcttctaccttcagtgccactattttccactgcagtgttttgacttcacaaactgcctcctccagagagaacaatgtattgctgaaaatgggcagtagaagcaaatgctgttgttacatttgacctataaagtattcagagtgactgctaggtagaaattaaaacttagctttcccaaatagctccttattttgcaccttataaaaagtatactaattgttaattagatgttgcttttgtttatacaagcattcccaaagaactagatttggattttgttttgagtttttggatttttaaaaattatcttatttagattgactaacagcatacttacaattttaaaagaagctgttgttcagttcatcttaccagatgtgtctggcgaagtattcagggtttgatggactgctttactttcgtttggaagtgatagctaagtttattatactctatattaaacaactttgttcatttcactgaggaccttatcttccttatatttcagaacaaagaagcaacaagcgtgaataaaaagacaaatgtatttgactccctcataatccccatctgtatgtgctacccttccttcaaatatataaatgtgcatctttttttttaaaaaaaaaaaaaaaaaggttcctcttctggccaaatttgatctatggtggtatgattcatactgttaaattgagagaggaaaccttgtggttaaaaattatatggctgctgttttctttttgcagtcagtggtcaaaactgatcatgtgcttaaatcgatttttatgcacagaactagttattgtgaacattactgctccctccaaagatttcctgataacttgggccagaggtggttactgagtaacaaggatctaattcaatgcctcaaaactcttccacccacaatgcaaatcttacctcacaagctctaacctaaatcacagagacatgcatgtttcatgcattaacactgatttcgctctgtggcccaccagaggggtgggctcatgtcccctgactcctcacatgagtgcctcagctctaagagccgtggaacggggggtagggaaggtttgcgatctggagctcagcaactggctcagcaacgttttctccatttcattagcactaaacaagtctcttgctctcaggaatttgtcagaaaaaagaataaaatcacctgagactccacataccagattataaactcttctcgtaggtttgaattgcttactcacatgtcataaattaaccacagcttcatttgaccaccaggtctaaagtctgttgacagtttcagcatgactgaatcgctcattttttttttttgctttcagaaattggcttggttctctttagagttggtgtaaacatgccatgtaataaatgatttccacttaatggtacaacagaattattgctttcttagatgtatgtgtagtaaaagtcaatatacacatttatataatttctttcttcaaaatcttatacctaatttgatatttctaaaaattgcacatgtaagtcatgtgtataacatgctaaagtactttaactgtgatcttaaaactgaataaaaatatttaataaaactttgaaatattttaaagatattattcaaatatatttctttatgttcacactactggccgtagagtatgtgcctttaatgtaccattttcactaaaaacagtaggaaaaatactaataaaagtaagatatttcaactaaaaaaa

SEQ ID NO: 314058 - DNA, 8742 bp, Homo sapiens
  misc_feature (1)..(2): n is a, c, g, or t
  misc_feature (4)..(4): n is a, c, g, or t
nngngtgttttcagtctctccgggttgcatgtactgtatgtggagcagtgtacagtgaagcggaggcagagcggctccgcgagcttctctccactttcccatagagaaaccctgactggccgctgagggctagctacacacacgccctcacgcccggcgagcccgcgaggtcactatcatatgacaaaggctttgccgcagttcatcttcctccctgtgtactttccatttgccttcctggaatcctgctgcatcacagaagctggaagttctgatgttccactgaaatcacaatggaaagtcttgacttgactggtcacagtaatgaaaggcagtaatagaaataaggatcattcagcagaaggagaaggggttggaaaacgaccaaaacgaaagtgtcttcagtggcatccattgctagcaaagaaacttcttgatttttcagaagaggaagaagaggaagacgaagaggaggatattgataaggttcaacttcttggggccgatggcctagagcaagatgttggtgaaactgaagatgatgaatcaccagagcagcgagcccggagaccaatgaatgcatttcttttattttgcaaacgccatcgctctcttgtacgtcaggaacaccccaggcttgataaccgaggtgctaccaagatactagctgattggtgggctgttcttgatccaaaggaaaagcagaaatacacagacatggccaaggagtataaggatgcatttatgaaagcaaatcctggctacaaatggtgtcctaccacaaacaagcctgtgaaatccccaacacccactgtcaatccacgaaagaaactttgggccttcccatctgactcttcaagagacttgccaagccccaagaaagcaaagactgaagaaatgcctcagcttaactttggaatggctgatcctactcaaatgggaggcctgagtatgctgctgttagctggagaacatgctcttggcacaccagaggtatcctctggcacatgcaggcctgatgtttcagaatctcctgaattacgtcagaagtcaccattgtttcagtttgccgagatatcttcaagtacgtcccactctgatgcttctacaaagcagtgtcaaacatctgccttgtttcagtttgcagagatttcttcaaacacttcgcagttgggtggtgctgagcctgtaaaacgctgtggaaagtctgcactctttcaactggcagagatgtgcctggcatcagaagggatgaaaatggaagaatcaaagctaataaaagcaaaagaatccgatggtggaagaattaaagaattagagaagggaaaggaagaaaaagaaattaaaatggagaaaacagatgaaactaggttacagaaggaagcagaatttgaaaaatcggctaaggaaaatttaagagattctaaggaattgagaaattttgaggcattgcaaatagatgacataatggctataaaaatggaagatcccaaagaaattagaaaggaagagttagaagaagatcacaaatgtagtcattttcctgatttttcttattctgccagtagcaagataataattagtgatgttcccagtagaaaggatcatatgtgccatcctcatggaattatgatcattgaggatcccgcagcattaaacaagccagaaaagctaaaaaagaaaaagaagaaaagcaaaatggatcgacatggaaatgataaatccacacccaagaagacttgcaaaaagaggcagtcttcggaatctgacattgagagcgtcatatataccattgaagccgtcgcaaaaggagactggggcatagagaaacttggagatacccctcgcaagaaggtccgcacatcctcaagtggcaagggaagcattttggatgccaagccaccaaagaaaaaagtgaaatcaagagagaagaaaatgtcaaaggagaaatcctcagacaccaccaaagagtcaagacctccagatttcattagtatttctgctagcaagaacatttctggtgagacaccagagggtataaaagcagaaccattgacccctatggaagatgcactaccacccagcctatcaggacaggccaagcctgaggacagtgactgtcacagaaaaatagaaacttgtggttccaggaaatccgagaggtcttgcaaaggtgctctttataaaaccctggtgtctgagggcatgctcacctctctgcgagctaatgttgacagaggaaaacgaagctcaggaaaaggaaactcctctgatcatgaagggtgttggaatgaagaaagctggacatttagtcagagtgggaccagtgggagcaagaagttcaagaagacaaagccaaaagaagactgtctccttggctccgcaaagctggatgaagaatttgaaaaaaaattcaacagcctccctcaatatagtcctgttacatttgaccggaaatgtgtacctgtcccaagaaaaaagaagaagactggaaatgtgtcctcagaaccgactaaaaccagcaaaggaagtggggataaatggtcaaacaagcaactcttcttggatgccattcaccctacagaagccatattttcagaagacagaaacaccatggagcctgttcataaggttaaaaatatcccatccattttcaacactccagagccaacaacaacgcaagaacctttggtgggcagccaaaagagaaaagcaaggaaaaccaagattacacaccttgtcaggacagcagatggccgggtatcaccagcaggaggtactttggatgacaaaccaaaggaacaactgcagaggagtctccctaaagcaactgagacagactgcaatgacaaatgctcacacaacaccgaggtcggggagacgcggagcagtactccagaaatgcctgccgtgtctgcgttctttagcctcgctgcgctggctgaagtggcagccatggaaaatgtgcacagaggtcagaggtcaactccgctcacccatgatggacagccaaaagaaatgccgcaggctcctgtacttatttcctgcgctgaccagtgaagcgccctttcattgtaaaacattgtgctttacctactaccctagccttgtctttaccgagggatgctagtgagtccaagtggtggaaaatatagactgcaaacaagtgcttgttgccccacacggcccagattcacttgaagcagaagttagcatcctgggccagtttgttctctcagaacccagaatctttgagggtaaggttatctgtctgatactgagcagaaacagaatgatcctggagctttgctttctattgaaggcttttgacggtaataggtggtaacttggtaaaaggctgcctttactgtagctcacccagcatctcttttaccaaccagagagtgtgaaactagtttcatatattacctagttattctttcaaaacaaaacaaaaaaaaaacaaaaactgacgcactgcactagttattattagatattcttagtcttttttgtacatggagatttaagtttaagatggtttatataataggttatacctacatttatattgtagaataaatattaaaaagcctgttccagagactcccaagcagcctgggcaggcagatgtaccattgttagtggtgtatgctcggcctcgtggtccatatattctgcacttttatatttgccaccagaatggtagtttgctggcaaaaaaaaaaaaaagagagagagaaaaaattacaactcttacaatctgaatttttttcttagccttgagtgaccaagaagaatttgcttgaggcaaattgtggcaaatattttcccagacaggggaagagtcctgcagattacagattactggtgttttcatgccttgaggattcttttatttttacataggggtctaagtgaccaatggattgttcatacaaacaaaaaaaaagacaaaaatattattcagaagtgaccttagtattacttcactattctaaacacattgaagacactcacttcatgtggacttggagctacagaccttttacatccatcacagattggctggacgggttgcaattgctatgcacagcctgattggcactgcaggtttttagagccattttgagtttgtgttgtttaggaggtactgagtcaatgatgagggaggtatgcctgaccagagtgggactctcagtcatagatccacctgcaagtctctgtttcctttttgtgttttgttgcttttgaacataaaaccaaccatacataagcagcgccaagtggattaactggcttagaacattcaacatattgacttaaccacctgacattcacagtgtcttgtttcctagcaacagatgcaaagtgataaatctatttccccactcttgcgtcacagcacaaactaccaaattttaattattggattccagcaataatttttaatggttttcaaactggcggaattttgacagtgctagttcgagtttgaagcttttgaattagatctctaaatggtgacagtttacatggttttatctagctttcttatttatacttgactgaattgtaatgattttttttctaattgtaatttgacgtaatagccatacaaaaaatgactctattcatactaggtttagcttctcatggttgtagatattacttcagttccggtgctggaaaatatgtacaacatactaacaggattgaaaaaaaaatagaggtttttcttcttgtttttttttccaaagcaggtaaagagggtagcaaagcatcggaatgatgtgctcaaaaatgcatattcctggtggggatggaggaagaaggcattagtaaaaggttaatcaaacgttacaacttaaccccattcatgtaggaataaatcaagtgagcagttccagacttttgcataatatttttactatgatgctgttttattaatattttctaaatttcaaaacaaaaagtgaatgtttgaaattgctgggtcccgatgttggtggctgttggagttttggaccactcgctagcagtgatttgaagattataattagctaaaatccaaaacaaaaaaccaacaacaaaaattgtatggtgcggaacatgcaccttgacaatggtactaacttgttattctatagaacacgttagaatagatctatttttgccagagcaccctccttcagtcctccgattacatttcactagagttccttacgagattgctgtatattcctgggacctttttttaaaaaaaaaaaaagcaaaacaaaagattactttttttctatgtgattaatatcttacttgatctgcttttcctaaacctcagtggcttttcccttaggcagggttgggggtgggagggcaacttactggagatgactgttttcagatactttaaaacaaacctttttgtagaaatgcttaatttttaagcggttaggcactgagagtagcagaaatcctgcaaagctttatagttccttagactcaccttgtcgattctctgagtaaagtcttgatttcaataattgtgcttctcatgccctgaatctgctggagaggagtgttgttattttcaggtaacaacattcgttagcacaaatatttcagaccaatattagtgctctccaccccaccttttgttatcattttcatttcatttctctcattcttttttattttggaaaatcatattgctatagtgtgtactttaatctgccagcagataccatctacactaacatttgtcccacagcatcctcaagagaaaaagttgttgcaccttatatatatctcaagcaaaccaaaatatgatgctcttctgctttgttttattctaaattgttgtatcatatctttctgaaaccattctgaatttagttgaaattatcaatatttatgcttttaaccttaatttctggattcaagcctgtatataaatcttttgaaaaaaaattgtcctagcccttctctgcgatgctggaagtagaagattgcgtctcagatggagacgcagtactgttccagttttctttagccttttatttatttagttattctgggtatttcctatgtaattttgaagtgtgtagagtatattatagtaactgaagctgcagctgtaagaagctgagtgaaagaaaaaatactgtaagacatccttaaagtttttatttgtttgggtactgtatatgagatcaggaaaaagaaaaatgtcccacagccacattggaaatacaggttcttgtccccaaattaggttagttcccagattttagatcaaaactgttaattcattaaaaccccttttaaaaggtaaattctactgttgtaattccgatagtctttttcccacaaatatcagaaatatatttatttaattctgtcagatgagctttctaccgatgccatgtcccaaagccatgttaaaataattcccacgttatcattgtgattctacttcctgccactaaaattgctggagaaacaaaataatgatggaacactatgaacaaaaaggagcatctgaactggtctggttatttagaatccaatgtgttcaaatccttttgttttcttattaagtcagatgctactgtaagtcagataaaattttgtttgcactctgcagtctttggctcaatgtatggaaatgtttgcacctatgtaaagtcacaagctaattacaaattgctacagaacaggagtaagctgaaaactgaatgccatgttttgtttataaggtggggaggggagggaaaataccaaaaaactctgttccaagtttggcatttgacattaatgtgaagcagtgggaccatgctgcctgctaaactactgtatgaatcgtaaatgttctgaagacgagcagctggaggctggaggatggcattccatacagcaaaggagaagcacccaccacttcatctgggaaaaggaaggaaattgcaggaggcctggagccatcatttgtaaaggggatgttgcggggtgtgatgctgttgaggagattcaccttcaattgcactgctccacagagccctcatataaggccaatcctaatgggctacctcggctttaaaagttaatttcagtaagtcctgtttcaaaagtttgtctttttttgcttctaccttcagtgccactattttccactgcagtgttttgacttcacaaactgcctcctccagagagaacaatgtattgctgaaaatgggcagtagaagcaaatgctgttgttacatttgacctataaagtattcagagtgactgctaggtagaaattaaaacttagctttcccaaatagctccttattttgcaccttataaaaagtatactaattgttaattagatgttgcttttgtttatacaagcattcccaaagaactagatttggattttgttttgagtttttggatttttaaaaattatcttatttagattgactaacagcatacttacaattttaaaagaagctgttgttcagttcatcttaccagatgtgtctggcgaagtattcagggtttgatggactgctttactttcgtttggaagtgatagctaagtttattatactctatattaaacaactttgttcatttcactgaggaccttatcttccttatatttcagaacaaagaagcaacaagcgtgaataaaaagacaaatgtatttgactccctcataatccccatctgtatgtgctacccttccttcaaatatataaatgtgcatctttttttttaaaaaaaaaaaaaaaaaggttcctcttctggccaaatttgatctatggtggtatgattcatactgttaaattgagagaggaaaccttgtggttaaaaattatatggctgctgttttctttttgcagtcagtggtcaaaactgatcatgtgcttaaatcgatttttatgcacagaactagttattgtgaacattactgctccctccaaagatttcctgataacttgggccagaggtggttactgagtaacaaggatctaattcaatgcctcaaaactcttccacccacaatgcaaatcttacctcacaagctctaacctaaatcacagagacatgcatgtttcatgcattaacactgatttcgctctgtggcccaccagaggggtgggctcatgtcccctgactcctcacatgagtgcctcagctctaagagccgtggaacggggggtagggaaggtttgcgatctggagctcagcaactggctcagcaacgttttctccatttcattagcactaaacaagtctcttgctctcaggaatttgtcagaaaaaagaataaaatcacctgagactccacataccagattataaactcttctcgtaggtttgaattgcttactcacatgtcataaattaaccacagcttcatttgaccaccaggtctaaagtctgttgacagtttcagcatgactgaatcgctcattttttttttttgctttcagaaattggcttggttctctttagagttggtgtaaacatgccatgtaataaatgatttccacttaatggtacaacagaattattgctttcttagatgtatgtgtagtaaaagtcaatatacacatttatataatttctttcttcaaaatcttatacctaatttgatatttctaaaaattgcacatgtaagtcatgtgtataacatgctaaagtactttaactgtgatcttaaaactgaataaaaatatttaataaaactttgaa

SEQ ID NO: 314059 - DNA, 8741 bp, Homo sapiens
  misc_feature (1)..(2): n is a, c, g, or t
  misc_feature (4)..(4): n is a, c, g, or t
nngngtgttttcagtctctccgggttgcatgtactgtatgtggagcagtgtacagtgaagcggaggcagagcggctccgcgagcttctctccactttcccatagagaaaccctgactggccgctgagggctagctacacacacgccctcacgcccggcgagcccgcgaggtcactatcatatgacaaaggctttgccgcagttcatcttcctccctgtgtactttccatttgccttcctggaatcctgctgcatcacagaagctggaagttctgatgttccactgaaatcacaatggaaagtcttgacttgactggtcacagtaatgaaaggcagtaatagaaataaggatcattcagcagaaggagaaggggttggaaaacgaccaaaacgaaagtgtcttcagtggcatccattgctagcaaagaaacttcttgatttttcagaagaggaagaagaggaagacgaagaggaggatattgataaggttcaacttcttggggccgatggcctagagcaagatgttggtgaaactgaagatgatgaatcaccagagcagcgagcccggagaccaatgaatgcatttcttttattttgcaaacgccatcgctctcttgtacgtcaggaacaccccaggcttgataaccgaggtgctaccaagatactagctgattggtgggctgttcttgatccaaaggaaaagcagaaatacacagacatggccaaggagtataaggatgcatttatgaaagcaaatcctggctacaaatggtgtcctaccacaaacaagcctgtgaaatccccaacacccactgtcaatccacgaaagaaactttgggccttcccatctgactcttcaagagacttgccaagccccaagaaagcaaagactgaagaaatgcctcagcttaactttggaatggctgatcctactcaaatgggaggcctgagtatgctgctgttagctggagaacatgctcttggcacaccagaggtatcctctggcacatgcaggcctgatgtttcagaatctcctgaattacgtcagaagtcaccattgtttcagtttgccgagatatcttcaagtacgtcccactctgatgcttctacaaagcagtgtcaaacatctgccttgtttcagtttgcagagatttcttcaaacacttcgcagttgggtggtgctgagcctgtaaaacgctgtggaaagtctgcactctttcaactggcagagatgtgcctggcatcagaagggatgaaaatggaagaatcaaagctaataaaagcaaaagaatccgatggtggaagaattaaagaattagagaagggaaaggaagaaaaagaaattaaaatggagaaaacagatgaaactaggttacagaaggaagcagaatttgaaaaatcggctaaggaaaatttaagagattctaaggaattgagaaattttgaggcattgcaaatagatgacataatggctataaaaatggaagatcccaaagaaattagaaaggaagagttagaagaagatcacaaatgtagtcattttcctgatttttcttattctgccagtagcaagataataattagtgatgttcccagtagaaaggatcatatgtgccatcctcatggaattatgatcattgaggatcccgcagcattaaacaagccagaaaagctaaaaaagaaaaagaagaaaagcaaaatggatcgacatggaaatgataaatccacacccaagaagacttgcaaaaagaggcagtcttcggaatctgacattgagagcgtcatatataccattgaagccgtcgcaaaaggagactggggcatagagaaacttggagatacccctcgcaagaaggtccgcacatcctcaagtggcaagggaagcattttggatgccaagccaccaaagaaaaaagtgaaatcaagagagaagaaaatgtcaaaggagaaatcctcagacaccaccaaagagtcaagacctccagatttcattagtatttctgctagcaagaacatttctggtgagacaccagagggtataaaagcagaaccattgacccctatggaagatgcactaccacccagcctatcaggacaggccaagcctgaggacagtgactgtcacagaaaaatagaaacttgtggttccaggaaatccgagaggtcttgcaaaggtgctctttataaaaccctggtgtctgagggcatgctcacctctctgcgagctaatgttgacagaggaaaacgaagctcaggaaaaggaaactcctctgatcatgaagggtgttggaatgaagaaagctggacatttagtcagagtgggaccagtgggagcaagaagttcaagaagacaaagccaaaagaagactgtctccttggctccgcaaagctggatgaagaatttgaaaaaaaattcaacagcctccctcaatatagtcctgttacatttgaccggaaatgtgtacctgtcccaagaaaaaagaagaagactggaaatgtgtcctcagaaccgactaaaaccagcaaaggaagtggggataaatggtcaaacaagcaactcttcttggatgccattcaccctacagaagccatattttcagaagacagaaacaccatggagcctgttcataaggttaaaaatatcccatccattttcaacactccagagccaacaacaacgcaagaacctttggtgggcagccaaaagagaaaagcaaggaaaaccaagattacacaccttgtcaggacagcagatggccgggtatcaccagcaggaggtactttggatgacaaaccaaaggaacaactgcagaggagtctccctaaagcaactgagacagactgcaatgacaaatgctcacacaacaccgaggtcggggagacgcggagcagtactccagaaatgcctgccgtgtctgcgttctttagcctcgctgcgctggctgaagtggcagccatggaaaatgtgcacagaggtcagaggtcaactccgctcacccatgatggacagccaaaagaaatgccgcaggctcctgtacttatttcctgcgctgaccagtgaagcgccctttcattgtaaaacattgtgctttacctactaccctagccttgtctttaccgagggatgctagtgagtccaagtggtggaaaatatagactgcaaacaagtgcttgttgccccacacggcccagattcacttgaagcagaagttagcatcctgggccagtttgttctctcagaacccagaatctttgagggtaaggttatctgtctgatactgagcagaaacagaatgatcctggagctttgctttctattgaaggcttttgacggtaataggtggtaacttggtaaaaggctgcctttactgtagctcacccagcatctcttttaccaaccagagagtgtgaaactagtttcatatattacctagttattctttcaaaacaaaacaaaaaaaaaacaaaaactgacgcactgcactagttattattagatattcttagtcttttttgtacatggagatttaagtttaagatggtttatataataggttatacctacatttatattgtagaataaatattaaaaagcctgttccagagactcccaagcagcctgggcaggcagatgtaccattgttagtggtgtatgctcggcctcgtggtccatatattctgcacttttatatttgccaccagaatggtagtttgctggcaaaaaaaaaaaaaagagagagagaaaaaattacaactcttacaatctgaatttttttcttagccttgagtgaccaagaagaatttgcttgaggcaaattgtggcaaatattttcccagacaggggaagagtcctgcagattacagattactggtgttttcatgccttgaggattcttttatttttacataggggtctaagtgaccaatggattgttcatacaaacaaaaaaaaagacaaaaatattattcagaagtgaccttagtattacttcactattctaaacacattgaagacactcacttcatgtggacttggagctacagaccttttacatccatcacagattggctggacgggttgcaattgctatgcacagcctgattggcactgcaggtttttagagccattttgagtttgtgttgtttaggaggtactgagtcaatgatgagggaggtatgcctgaccagagtgggactctcagtcatagatccacctgcaagtctctgtttcctttttgtgttttgttgcttttgaacataaatattgacttaaccacctgacattcacagtgtcttgtttcctagcaacagatgcaaagtgataaatcaaaattagtctgaggctacagattttacagggtatttgttctatagcacaaagtatttccccactcttgcgtcacagcacaaactaccaaattttaattattggattccagcaataatttttaatggttttcaaactggcggaattttgacagtgctagttcgagtttgaagcttttgaattagatctctaaatggtgacagtttacatggttttatctagctttcttatttatacttgactgaattgtaatgattttttttctaattgtaatttgacgtaatagccatacaaaaaatgactctattcatactaggtttagcttctcatggttgtagatattacttcagttccggtgctggaaaatatgtacaacatactaacaggattgaaaaaaaaatagaggtttttcttcttgtttttttttccaaagcaggtaaagagggtagcaaagcatcggaatgatgtgctcaaaaatgcatattcctggtggggatggaggaagaaggcattagtaaaaggttaatcaaacgttacaacttaaccccattcatgtaggaataaatcaagtgagcagttccagacttttgcataatatttttactatgatgctgttttattaatattttctaaatttcaaaacaaaaagtgaatgtttgaaattgctgggtcccgatgttggtggctgttggagttttggaccactcgctagcagtgatttgaagattataattagctaaaatccaaaacaaaaaaccaacaacaaaaattgtatggtgcggaacatgcaccttgacaatggtactaacttgttattctatagaacacgttagaatagatctatttttgccagagcaccctccttcagtcctccgattacatttcactagagttccttacgagattgctgtatattcctgggacctttttttaaaaaaaaaaaaagcaaaacaaaagattactttttttctatgtgattaatatcttacttgatctgcttttcctaaacctcagtggcttttcccttaggcagggttgggggtgggagggcaacttactggagatgactgttttcagatactttaaaacaaacctttttgtagaaatgcttaatttttaagcggttaggcactgagagtagcagaaatcctgcaaagctttatagttccttagactcaccttgtcgattctctgagtaaagtcttgatttcaataattgtgcttctcatgccctgaatctgctggagaggagtgttgttattttcaggtaacaacattcgttagcacaaatatttcagaccaatattagtgctctccaccccaccttttgttatcattttcatttcatttctctcattcttttttattttggaaaatcatattgctatagtgtgtactttaatctgccagcagataccatctacactaacatttgtcccacagcatcctcaagagaaaaagttgttgcaccttatatatatctcaagcaaaccaaaatatgatgctcttctgctttgttttattctaaattgttgtatcatatctttctgaaaccattctgaatttagttgaaattatcaatatttatgcttttaaccttaatttctggattcaagcctgtatataaatcttttgaaaaaaaattgtcctagcccttctctgcgatgctggaagtagaagattgcgtctcagatggagacgcagtactgttccagttttctttagccttttatttatttagttattctgggtatttcctatgtaattttgaagtgtgtagagtatattatagtaactgaagctgcagctgtaagaagctgagtgaaagaaaaaatactgtaagacatccttaaagtttttatttgtttgggtactgtatatgagatcaggaaaaagaaaaatgtcccacagccacattggaaatacaggttcttgtccccaaattaggttagttcccagattttagatcaaaactgttaattcattaaaaccccttttaaaaggtaaattctactgttgtaattccgatagtctttttcccacaaatatcagaaatatatttatttaattctgtcagatgagctttctaccgatgccatgtcccaaagccatgttaaaataattcccacgttatcattgtgattctacttcctgccactaaaattgctggagaaacaaaataatgatggaacactatgaacaaaaaggagcatctgaactggtctggttatttagaatccaatgtgttcaaatccttttgttttcttattaagtcagatgctactgtaagtcagataaaattttgtttgcactctgcagtctttggctcaatgtatggaaatgtttgcacctatgtaaagtcacaagctaattacaaattgctacagaacaggagtaagctgaaaactgaatgccatgttttgtttataaggtggggaggggagggaaaataccaaaaaactctgttccaagtttggcatttgacattaatgtgaagcagtgggaccatgctgcctgctaaactactgtatgaatcgtaaatgttctgaagacgagcagctggaggctggaggatggcattccatacagcaaaggagaagcacccaccacttcatctgggaaaaggaaggaaattgcaggaggcctggagccatcatttgtaaaggggatgttgcggggtgtgatgctgttgaggagattcaccttcaattgcactgctccacagagccctcatataaggccaatcctaatgggctacctcggctttaaaagttaatttcagtaagtcctgtttcaaaagtttgtctttttttgcttctaccttcagtgccactattttccactgcagtgttttgacttcacaaactgcctcctccagagagaacaatgtattgctgaaaatgggcagtagaagcaaatgctgttgttacatttgacctataaagtattcagagtgactgctaggtagaaattaaaacttagctttcccaaatagctccttattttgcaccttataaaaagtatactaattgttaattagatgttgcttttgtttatacaagcattcccaaagaactagatttggattttgttttgagtttttggatttttaaaaattatcttatttagattgactaacagcatacttacaattttaaaagaagctgttgttcagttcatcttaccagatgtgtctggcgaagtattcagggtttgatggactgctttactttcgtttggaagtgatagctaagtttattatactctatattaaacaactttgttcatttcactgaggaccttatcttccttatatttcagaacaaagaagcaacaagcgtgaataaaaagacaaatgtatttgactccctcataatccccatctgtatgtgctacccttccttcaaatatataaatgtgcatctttttttttaaaaaaaaaaaaaaaaaggttcctcttctggccaaatttgatctatggtggtatgattcatactgttaaattgagagaggaaaccttgtggttaaaaattatatggctgctgttttctttttgcagtcagtggtcaaaactgatcatgtgcttaaatcgatttttatgcacagaactagttattgtgaacattactgctccctccaaagatttcctgataacttgggccagaggtggttactgagtaacaaggatctaattcaatgcctcaaaactcttccacccacaatgcaaatcttacctcacaagctctaacctaaatcacagagacatgcatgtttcatgcattaacactgatttcgctctgtggcccaccagaggggtgggctcatgtcccctgactcctcacatgagtgcctcagctctaagagccgtggaacggggggtagggaaggtttgcgatctggagctcagcaactggctcagcaacgttttctccatttcattagcactaaacaagtctcttgctctcaggaatttgtcagaaaaaagaataaaatcacctgagactccacataccagattataaactcttctcgtaggtttgaattgcttactcacatgtcataaattaaccacagcttcatttgaccaccaggtctaaagtctgttgacagtttcagcatgactgaatcgctcattttttttttttgctttcagaaattggcttggttctctttagagttggtgtaaacatgccatgtaataaatgatttccacttaatggtacaacagaattattgctttcttagatgtatgtgtagtaaaagtcaatatacacatttatataatttctttcttcaaaatcttatacctaatttgatatttctaaaaattgcacatgtaagtcatgtgtataacatgctaaagtactttaactgtgatcttaaaactgaataaaaatatttaataaaactttgaa

SEQ ID NO: 314060 - DNA, 8998 bp, Homo sapiens
  misc_feature (1)..(2): n is a, c, g, or t
  misc_feature (4)..(4): n is a, c, g, or t
nngngtgttttcagtctctccgggttgcatgtactgtatgtggagcagtgtacagtgaagcggaggcagagcggctccgcgagcttctctccactttcccatagagaaaccctgactggccgctgagggctagctacacacacgccctcacgcccggcgagcccgcgaggtcactatcatatgacaaaggctttgccgcagttcatcttcctccctgtgtactttccatttgccttcctggaatcctgctgcatcacagaagctggaagttctgatgttccactgaaatcacaatggaaagtcttgacttgactggtcacagtaatgaaaggcagtaatagaaataaggatcattcagcagaaggagaaggggttggaaaacgaccaaaacgaaagtgtcttcagtggcatccattgctagcaaagaaacttcttgatttttcagaagaggaagaagaggaagacgaagaggaggatattgataaggttcaacttcttggggccgatggcctagagcaagatgttggtgaaactgaagatgatgaatcaccagagcagcgagcccggagaccaatgaatgcatttcttttattttgcaaacgccatcgctctcttgtacgtcaggaacaccccaggcttgataaccgaggtgctaccaagatactagctgattggtgggctgttcttgatccaaaggaaaagcagaaatacacagacatggccaaggagtataaggatgcatttatgaaagcaaatcctggctacaaatggtgtcctaccacaaacaagcctgtgaaatccccaacacccactgtcaatccacgaaagaaactttgggccttcccatctgactcttcaagagacttgccaagccccaagaaagcaaagactgaagaaatgcctcagcttaactttggaatggctgatcctactcaaatgggaggcctgagtatgctgctgttagctggagaacatgctcttggcacaccagaggtatcctctggcacatgcaggcctgatgtttcagaatctcctgaattacgtcagaagtcaccattgtttcagtttgccgagatatcttcaagtacgtcccactctgatgcttctacaaagcagtgtcaaacatctgccttgtttcagtttgcagagatttcttcaaacacttcgcagttgggtggtgctgagcctgtaaaacgctgtggaaagtctgcactctttcaactggcagagatgtgcctggcatcagaagggatgaaaatggaagaatcaaagctaataaaagcaaaagaatccgatggtggaagaattaaagaattagagaagggaaaggaagaaaaagaaattaaaatggagaaaacagatgaaactaggttacagaaggaagcagaatttgaaaaatcggctaaggaaaatttaagagattctaaggaattgagaaattttgaggcattgcaaatagatgacataatggctataaaaatggaagatcccaaagaaattagaaaggaagagttagaagaagatcacaaatgtagtcattttcctgatttttcttattctgccagtagcaagataataattagtgatgttcccagtagaaaggatcatatgtgccatcctcatggaattatgatcattgaggatcccgcagcattaaacaagccagaaaagctaaaaaagaaaaagaagaaaagcaaaatggatcgacatggaaatgataaatccacacccaagaagacttgcaaaaagaggcagtcttcggaatctgacattgagagcgtcatatataccattgaagccgtcgcaaaaggagactggggcatagagaaacttggagatacccctcgcaagaaggtccgcacatcctcaagtggcaagggaagcattttggatgccaagccaccaaagaaaaaagtgaaatcaagagagaagaaaatgtcaaaggagaaatcctcagacaccaccaaagagtcaagacctccagatttcattagtatttctgctagcaagaacatttctggtgagacaccagagggtataaaagcagaaccattgacccctatggaagatgcactaccacccagcctatcaggacaggccaagcctgaggacagtgactgtcacagaaaaatagaaacttgtggttccaggaaatccgagaggtcttgcaaaggtgctctttataaaaccctggtgtctgagggcatgctcacctctctgcgagctaatgttgacagaggaaaacgaagctcaggaaaaggaaactcctctgatcatgaagggtgttggaatgaagaaagctggacatttagtcagagtgggaccagtgggagcaagaagttcaagaagacaaagccaaaagaagactgtctccttggctccgcaaagctggatgaagaatttgaaaaaaaattcaacagcctccctcaatatagtcctgttacatttgaccggaaatgtgtacctgtcccaagaaaaaagaagaagactggaaatgtgtcctcagaaccgactaaaaccagcaaaggaagtggggataaatggtcaaacaagcaactcttcttggatgccattcaccctacagaagccatattttcagaagacagaaacaccatggagcctgttcataaggttaaaaatatcccatccattttcaacactccagagccaacaacaacgcaagaacctttggtgggcagccaaaagagaaaagcaaggaaaaccaagattacacaccttgtcaggacagcagatggccgggtatcaccagcaggaggtactttggatgacaaaccaaaggaacaactgcagaggagtctccctaaagcaactgagacagactgcaatgacaaatgctcacacaacaccgaggtcggggagacgcggagcagtactccagaaatgcctgccgtgtctgcgttctttagcctcgctgcgctggctgaagtggcagccatggaaaatgtgcacagaggtcagaggtcaactccgctcacccatgatggacagccaaaagaaatgccgcaggctcctgtacttatttcctgcgctgaccagtgaagcgccctttcattgtaaaacattgtgctttacctactaccctagccttgtctttaccgagggatgctagtgagtccaagtggtggaaaatatagactgcaaacaagtgcttgttgccccacacggcccagattcacttgaagcagaagttagcatcctgggccagtttgttctctcagaacccagaatctttgagggtaaggttatctgtctgatactgagcagaaacagaatgatcctggagctttgctttctattgaaggcttttgacggtaataggtggtaacttggtaaaaggctgcctttactgtagctcacccagcatctcttttaccaaccagagagtgtgaaactagtttcatatattacctagttattctttcaaaacaaaacaaaaaaaaaacaaaaactgacgcactgcactagttattattagatattcttagtcttttttgtacatggagatttaagtttaagatggtttatataataggttatacctacatttatattgtagaataaatattaaaaagcctgttccagagactcccaagcagcctgggcaggcagatgtaccattgttagtggtgtatgctcggcctcgtggtccatatattctgcacttttatatttgccaccagaatggtagtttgctggcaaaaaaaaaaaaaagagagagagaaaaaattacaactcttacaatctgaatttttttcttagccttgagtgaccaagaagaatttgcttgaggcaaattgtggcaaatattttcccagacaggggaagagtcctgcagattacagattactggtgttttcatgccttgaggattcttttatttttacataggggtctaagtgaccaatggattgttcatacaaacaaaaaaaaagacaaaaatattattcagaagtgaccttagtattacttcactattctaaacacattgaagacactcacttcatgtggacttggagctacagaccttttacatccatcacagattggctggacgggttgcaattgctatgcacagcctgattggcactgcaggtttttagagccattttgagtttgtgttgtttaggaggtactgagtcaatgatgagggaggtatgcctgaccagagtgggactctcagtcatagatccacctgcaagtctctgtttcctttttgtgttttgttgcttttgaacataaaaccaaccatacataagcagcgccaagtggattaactggcttagaacattcaacatattgacttaaccacctgacattcacagtgtcttgtttcctagcaacagatgcaaagtgataaatcaaaattagtctgaggctacagattttacagggtatttgttctatagcacaaagtatttccccactcttgcgtcacagcacaaactaccaaattttaattattggattccagcaataatttttaatggttttcaaactggcggaattttgacagtgctagttcgagtttgaagcttttgaattagatctctaaatggtgacagtttacatggttttatctagctttcttatttatacttgactgaattgtaatgattttttttctaattgtaatttgacgtaatagccatacaaaaaatgactctattcatactaggtttagcttctcatggttgtagatattacttcagttccggtgctggaaaatatgtacaacatactaacaggattgaaaaaaaaatagaggtttttcttcttgtttttttttccaaagcaggtaaagagggtagcaaagcatcggaatgatgtgctcaaaaatgcatattcctggtggggatggaggaagaaggcattagtaaaaggttaatcaaacgttacaacttaaccccattcatgtaggaataaatcaagtgagcagttccagacttttgcataatatttttactatgatgctgttttattaatattttctaaatttcaaaacaaaaagtgaatgtttgaaattgctgggtcccgatgttggtggctgttggagttttggaccactcgctagcagtgatttgaagattataattagctaaaatccaaaacaaaaaaccaacaacaaaaattgtatggtgcggaacatgcaccttgacaatggtactaacttgttattctatagaacacgttagaatagatctatttttgccagagcaccctccttcagtcctccgattacatttcactagagttccttacgagattgctgtatattcctgggacctttttttaaaaaaaaaaaaagcaaaacaaaagattactttttttctatgtgattaatatcttacttgatctgcttttcctaaacctcagtggcttttcccttaggcagggttgggggtgggagggcaacttactggagatgactgttttcagatactttaaaacaaacctttttgtagaaatgcttaatttttaagcggttaggcactgagagtagcagaaatcctgcaaagctttatagttccttagactcaccttgtcgattctctgagtaaagtcttgatttcaataattgtgcttctcatgccctgaatctgctggagaggagtgttgttattttcaggtaacaacattcgttagcacaaatatttcagaccaatattagtgctctccaccccaccttttgttatcattttcatttcatttctctcattcttttttattttggaaaatcatattgctatagtgtgtactttaatctgccagcagataccatctacactaacatttgtcccacagcatcctcaagagaaaaagttgttgcaccttatatatatctcaagcaaaccaaaatatgatgctcttctgctttgttttattctaaattgttgtatcatatctttctgaaaccattctgaatttagttgaaattatcaatatttatgcttttaaccttaatttctggattcaagcctgtatataaatcttttgaaaaaaaattgtcctagcccttctctgcgatgctggaagtagaagattgcgtctcagatggagacgcagtactgttccagttttctttagccttttatttatttagttattctgggtatttcctatgtaattttgaagtgtgtagagtatattatagtaactgaagctgcagctgtaagaagctgagtgaaagaaaaaatactgtaagacatccttaaagtttttatttgtttgggtactgtatatgagatcaggaaaaagaaaaatgtcccacagccacattggaaatacaggttcttgtccccaaattaggttagttcccagattttagatcaaaactgttaattcattaaaaccccttttaaaaggtaaattctactgttgtaattccgatagtctttttcccacaaatatcagaaatatatttatttaattctgtcagatgagctttctaccgatgccatgtcccaaagccatgttaaaataattcccacgttatcattgtgattctacttcctgccactaaaattgctggagaaacaaaataatgatggaacactatgaacaaaaaggagcatctgaactggtctggttatttagaatccaatgtgttcaaatccttttgttttcttattaagtcagatgctactgtaagtcagataaaattttgtttgcactctgcagtctttggctcaatgtatggaaatgtttgcacctatgtaaagtcacaagctaattacaaattgctacagaacaggagtaagctgaaaactgaatgccatgttttgtttataaggtggggaggggagggaaaataccaaaaaactctgttccaagtttggcatttgacattaatgtgaagcagtgggaccatgctgcctgctaaactactgtatgaatcgtaaatgttctgaagacgagcagctggaggctggaggatggcattccatacagcaaaggagaagcacccaccacttcatctgggaaaaggaaggaaattgcaggaggcctggagccatcatttgtaaaggggatgttgcggggtgtgatgctgttgaggagattcaccttcaattgcactgctccacagagccctcatataaggccaatcctaatgggctacctcggctttaaaagttaatttcagtaagtcctgtttcaaaagtttgtctttttttgcttctaccttcagtgccactattttccactgcagtgttttgacttcacaaactgcctcctccagagagaacaatgtattgctgaaaatgggcagtagaagcaaatgctgttgttacatttgacctataaagtattcagagtgactgctaggtagaaattaaaacttagctttcccaaatagctccttattttgcaccttataaaaagtatactaattgttaattagatgttgcttttgtttatacaagcattcccaaagaactagatttggattttgttttgagtttttggatttttaaaaattatcttatttagattgactaacagcatacttacaattttaaaagaagctgttgttcagttcatcttaccagatgtgtctggcgaagtattcagggtttgatggactgctttactttcgtttggaagtgatagctaagtttattatactctatattaaacaactttgttcatttcactgaggaccttatcttccttatatttcagaacaaagaagcaacaagcgtgaataaaaagacaaatgtatttgactccctcataatccccatctgtatgtgctacccttccttcaaatatataaatgtgcatctttttttttaaaaaaaaaaaaaaaaaggttcctcttctggccaaatttgatctatggtggtatgattcatactgttaaattgagagaggaaaccttgtggttaaaaattatatggctgctgttttctttttgcagtcagtggtcaaaactgatcatgtgcttaaatcgatttttatgcacagaactagttattgtgaacattactgctccctccaaagatttcctgataacttgggccagaggtggttactgagtaacaaggatctaattcaatgcctcaaaactcttccacccacaatgcaaatcttacctcacaagctctaacctaaatcacagagacatgcatgtttcatgcattaacactgatttcgctctgtggcccaccagaggggtgggctcatgtcccctgactcctcacatgagtgcctcagctctaagagccgtggaacggggggtagggaaggtttgcgatctggagctcagcaactggctcagcaacgttttctccatttcattagcactaaacaagtctcttgctctcaggaatttgtcagaaaaaagaataaaatcacctgagactccacataccagattataaactcttctcgtaggtttgaattgcttactcacatgtcataaattaaccacagcttcatttgaccaccaggtctaaagtctgttgacagtttcagcatgactgaatcgctcattttttttttttgctttcagaaattggcttggttctctttagagttggtgtaaacatgccatgtaataaatgatttccacttaatggtacaacagaattattgctttcttagatgtatgtgtagtaaaagtcaatatacacatttatataatttctttcttcaaaatcttatacctaatttgatatttctaaaaattgcacatgtaagtcatgtgtataacatgctaaagtactttaactgtgatcttaaaactgaataaaaatatttaataaaactttgaaatattttaaagatattattcaaatatatttctttatgttccacccctcaaaaaaaaaaaaaaaaaaacaacacaaaacacaacacaacaaagccggagcacgcaacaaaaaaaacccaagcaaagagacaaaaaacacaaacaatcttcacaaacgccaacaaaaagaattatcaaacacaaaaccacgccacaaaaaaaatc

SEQ ID NO: 314061 - DNA, 8973 bp, Homo sapiens
  misc_feature (1)..(2): n is a, c, g, or t
  misc_feature (4)..(4): n is a, c, g, or t
nngngtgttttcagtctctccgggttgcatgtactgtatgtggagcagtgtacagtgaagcggaggcagagcggctccgcgagcttctctccactttcccatagagaaaccctgactggccgctgagggctagctacacacacgccctcacgcccggcgagcccgcgaggtcactatcatatgacaaaggctttgccgcagttcatcttcctccctgtgtactttccatttgccttcctggaatcctgctgcatcacagaagctggaagttctgatgttccactgaaatcacaatggaaagtcttgacttgactggtaagagctgttgtgaaggtacatcttacttacttacctggaagcagtgaggcagtcaagaattatgtgctgtcagagctggtctcagcatgatcaaggaagtgtgatcattggatatttttttcttgtcaattttattattttttaaagtgtgacttttattgatctccattatcaagtcacagtaatgaaaggcagtaatagaaataaggatcattcagcagaaggagaaggggttggaaaacgaccaaaacgaaagtgtcttcagtggcatccattgctagcaaagaaacttcttgatttttcagaagaggaagaagaggaagacgaagaggaggatattgataaggttcaacttcttggggccgatggcctagagcaagatgttggtgaaactgaagatgatgaatcaccagagcagcgagcccggagaccaatgaatgcatttcttttattttgcaaacgccatcgctctcttgtacgtcaggaacaccccaggcttgataaccgaggtgctaccaagatactagctgattggtgggctgttcttgatccaaaggaaaagcagaaatacacagacatggccaaggagtataaggatgcatttatgaaagcaaatcctggctacaaatggtgtcctaccacaaacaagcctgtgaaatccccaacacccactgtcaatccacgaaagaaactttgggccttcccatctgactcttcaagagacttgccaagccccaagaaagcaaagactgaagaaatgcctcagcttaactttggaatggctgatcctactcaaatgggaggcctgagtatgctgctgttagctggagaacatgctcttggcacaccagaggtatcctctggcacatgcaggcctgatgtttcagaatctcctgaattacgtcagaagtcaccattgtttcagtttgccgagatatcttcaagtacgtcccactctgatgcttctacaaagcagtgtcaaacatctgccttgtttcagtttgcagagatttcttcaaacacttcgcagttgggtggtgctgagcctgtaaaacgctgtggaaagtctgcactctttcaactggcagagatgtgcctggcatcagaagggatgaaaatggaagaatcaaagctaataaaagcaaaagaatccgatggtggaagaattaaagaattagagaagggaaaggaagaaaaagaaattaaaatggagaaaacagatgaaactaggttacagaaggaagcagaatttgaaaaatcggctaaggaaaatttaagagattctaaggaattgagaaattttgaggcattgcaaatagatgacataatggctataaaaatggaagatcccaaagaaattagaaaggaagagttagaagaagatcacaaatgtagtcattttcctgatttttcttattctgccagtagcaagataataattagtgatgttcccagtagaaaggatcatatgtgccatcctcatggaattatgatcattgaggatcccgcagcattaaacaagccagaaaagctaaaaaagaaaaagaagaaaagcaaaatggatcgacatggaaatgataaatccacacccaagaagacttgcaaaaagaggcagtcttcggaatctgacattgagagcgtcatatataccattgaagccgtcgcaaaaggagactggggcatagagaaacttggagatacccctcgcaagaaggtccgcacatcctcaagtggcaagggaagcattttggatgccaagccaccaaagaaaaaagtgaaatcaagagagaagaaaatgtcaaaggagaaatcctcagacaccaccaaagagtcaagacctccagatttcattagtatttctgctagcaagaacatttctggtgagacaccagagggtataaaagcagaaccattgacccctatggaagatgcactaccacccagcctatcaggacaggccaagcctgaggacagtgactgtcacagaaaaatagaaacttgtggttccaggaaatccgagaggtcttgcaaaggtgctctttataaaaccctggtgtctgagggcatgctcacctctctgcgagctaatgttgacagaggaaaacgaagctcaggaaaaggaaactcctctgatcatgaagggtgttggaatgaagaaagctggacatttagtcagagtgggaccagtgggagcaagaagttcaagaagacaaagccaaaagaagactgtctccttggctccgcaaagctggatgaagaatttgaaaaaaaattcaacagcctccctcaatatagtcctgttacatttgaccggaaatgtgtacctgtcccaagaaaaaagaagaagactggaaatgtgtcctcagaaccgactaaaaccagcaaaggaagtggggataaatggtcaaacaagcaactcttcttggatgccattcaccctacagaagccatattttcagaagacagaaacaccatggagcctgttcataaggttaaaaatatcccatccattttcaacactccagagccaacaacaacgcaagaacctttggtgggcagccaaaagagaaaagcaaggaaaaccaagattacacaccttgtcaggacagcagatggccgggtatcaccagcaggaggtactttggatgacaaaccaaaggaacaactgcagaggagtctccctaaagcaactgagacagactgcaatgacaaatgctcacacaacaccgaggtcggggagacgcggagcagtactccagaaatgcctgccgtgtctgcgttctttagcctcgctgcgctggctgaagtggcagccatggaaaatgtgcacagaggtcagaggtcaactccgctcacccatgatggacagccaaaagaaatgccgcaggctcctgtacttatttcctgcgctgaccagtgaagcgccctttcattgtaaaacattgtgctttacctactaccctagccttgtctttaccgagggatgctagtgagtccaagtggtggaaaatatagactgcaaacaagtgcttgttgccccacacggcccagattcacttgaagcagaagttagcatcctgggccagtttgttctctcagaacccagaatctttgagggtaaggttatctgtctgatactgagcagaaacagaatgatcctggagctttgctttctattgaaggcttttgacggtaataggtggtaacttggtaaaaggctgcctttactgtagctcacccagcatctcttttaccaaccagagagtgtgaaactagtttcatatattacctagttattctttcaaaacaaaacaaaaaaaaaacaaaaactgacgcactgcactagttattattagatattcttagtcttttttgtacatggagatttaagtttaagatggtttatataataggttatacctacatttatattgtagaataaatattaaaaagcctgttccagagactcccaagcagcctgggcaggcagatgtaccattgttagtggtgtatgctcggcctcgtggtccatatattctgcacttttatatttgccaccagaatggtagtttgctggcaaaaaaaaaaaaaagagagagagaaaaaattacaactcttacaatctgaatttttttcttagccttgagtgaccaagaagaatttgcttgaggcaaattgtggcaaatattttcccagacaggggaagagtcctgcagattacagattactggtgttttcatgccttgaggattcttttatttttacataggggtctaagtgaccaatggattgttcatacaaacaaaaaaaaagacaaaaatattattcagaagtgaccttagtattacttcactattctaaacacattgaagacactcacttcatgtggacttggagctacagaccttttacatccatcacagattggctggacgggttgcaattgctatgcacagcctgattggcactgcaggtttttagagccattttgagtttgtgttgtttaggaggtactgagtcaatgatgagggaggtatgcctgaccagagtgggactctcagtcatagatccacctgcaagtctctgtttcctttttgtgttttgttgcttttgaacataaaaccaaccatacataagcagcgccaagtggattaactggcttagaacattcaacatattgacttaaccacctgacattcacagtgtcttgtttcctagcaacagatgcaaagtgataaatcaaaattagtctgaggctacagattttacagggtatttgttctatagcacaaagtatttccccactcttgcgtcacagcacaaactaccaaattttaattattggattccagcaataatttttaatggttttcaaactggcggaattttgacagtgctagttcgagtttgaagcttttgaattagatctctaaatggtgacagtttacatggttttatctagctttcttatttatacttgactgaattgtaatgattttttttctaattgtaatttgacgtaatagccatacaaaaaatgactctattcatactaggtttagcttctcatggttgtagatattacttcagttccggtgctggaaaatatgtacaacatactaacaggattgaaaaaaaaatagaggtttttcttcttgtttttttttccaaagcaggtaaagagggtagcaaagcatcggaatgatgtgctcaaaaatgcatattcctggtggggatggaggaagaaggcattagtaaaaggttaatcaaacgttacaacttaaccccattcatgtaggaataaatcaagtgagcagttccagacttttgcataatatttttactatgatgctgttttattaatattttctaaatttcaaaacaaaaagtgaatgtttgaaattgctgggtcccgatgttggtggctgttggagttttggaccactcgctagcagtgatttgaagattataattagctaaaatccaaaacaaaaaaccaacaacaaaaattgtatggtgcggaacatgcaccttgacaatggtactaacttgttattctatagaacacgttagaatagatctatttttgccagagcaccctccttcagtcctccgattacatttcactagagttccttacgagattgctgtatattcctgggacctttttttaaaaaaaaaaaaagcaaaacaaaagattactttttttctatgtgattaatatcttacttgatctgcttttcctaaacctcagtggcttttcccttaggcagggttgggggtgggagggcaacttactggagatgactgttttcagatactttaaaacaaacctttttgtagaaatgcttaatttttaagcggttaggcactgagagtagcagaaatcctgcaaagctttatagttccttagactcaccttgtcgattctctgagtaaagtcttgatttcaataattgtgcttctcatgccctgaatctgctggagaggagtgttgttattttcaggtaacaacattcgttagcacaaatatttcagaccaatattagtgctctccaccccaccttttgttatcattttcatttcatttctctcattcttttttattttggaaaatcatattgctatagtgtgtactttaatctgccagcagataccatctacactaacatttgtcccacagcatcctcaagagaaaaagttgttgcaccttatatatatctcaagcaaaccaaaatatgatgctcttctgctttgttttattctaaattgttgtatcatatctttctgaaaccattctgaatttagttgaaattatcaatatttatgcttttaaccttaatttctggattcaagcctgtatataaatcttttgaaaaaaaattgtcctagcccttctctgcgatgctggaagtagaagattgcgtctcagatggagacgcagtactgttccagttttctttagccttttatttatttagttattctgggtatttcctatgtaattttgaagtgtgtagagtatattatagtaactgaagctgcagctgtaagaagctgagtgaaagaaaaaatactgtaagacatccttaaagtttttatttgtttgggtactgtatatgagatcaggaaaaagaaaaatgtcccacagccacattggaaatacaggttcttgtccccaaattaggttagttcccagattttagatcaaaactgttaattcattaaaaccccttttaaaaggtaaattctactgttgtaattccgatagtctttttcccacaaatatcagaaatatatttatttaattctgtcagatgagctttctaccgatgccatgtcccaaagccatgttaaaataattcccacgttatcattgtgattctacttcctgccactaaaattgctggagaaacaaaataatgatggaacactatgaacaaaaaggagcatctgaactggtctggttatttagaatccaatgtgttcaaatccttttgttttcttattaagtcagatgctactgtaagtcagataaaattttgtttgcactctgcagtctttggctcaatgtatggaaatgtttgcacctatgtaaagtcacaagctaattacaaattgctacagaacaggagtaagctgaaaactgaatgccatgttttgtttataaggtggggaggggagggaaaataccaaaaaactctgttccaagtttggcatttgacattaatgtgaagcagtgggaccatgctgcctgctaaactactgtatgaatcgtaaatgttctgaagacgagcagctggaggctggaggatggcattccatacagcaaaggagaagcacccaccacttcatctgggaaaaggaaggaaattgcaggaggcctggagccatcatttgtaaaggggatgttgcggggtgtgatgctgttgaggagattcaccttcaattgcactgctccacagagccctcatataaggccaatcctaatgggctacctcggctttaaaagttaatttcagtaagtcctgtttcaaaagtttgtctttttttgcttctaccttcagtgccactattttccactgcagtgttttgacttcacaaactgcctcctccagagagaacaatgtattgctgaaaatgggcagtagaagcaaatgctgttgttacatttgacctataaagtattcagagtgactgctaggtagaaattaaaacttagctttcccaaatagctccttattttgcaccttataaaaagtatactaattgttaattagatgttgcttttgtttatacaagcattcccaaagaactagatttggattttgttttgagtttttggatttttaaaaattatcttatttagattgactaacagcatacttacaattttaaaagaagctgttgttcagttcatcttaccagatgtgtctggcgaagtattcagggtttgatggactgctttactttcgtttggaagtgatagctaagtttattatactctatattaaacaactttgttcatttcactgaggaccttatcttccttatatttcagaacaaagaagcaacaagcgtgaataaaaagacaaatgtatttgactccctcataatccccatctgtatgtgctacccttccttcaaatatataaatgtgcatctttttttttaaaaaaaaaaaaaaaaaggttcctcttctggccaaatttgatctatggtggtatgattcatactgttaaattgagagaggaaaccttgtggttaaaaattatatggctgctgttttctttttgcagtcagtggtcaaaactgatcatgtgcttaaatcgatttttatgcacagaactagttattgtgaacattactgctccctccaaagatttcctgataacttgggccagaggtggttactgagtaacaaggatctaattcaatgcctcaaaactcttccacccacaatgcaaatcttacctcacaagctctaacctaaatcacagagacatgcatgtttcatgcattaacactgatttcgctctgtggcccaccagaggggtgggctcatgtcccctgactcctcacatgagtgcctcagctctaagagccgtggaacggggggtagggaaggtttgcgatctggagctcagcaactggctcagcaacgttttctccatttcattagcactaaacaagtctcttgctctcaggaatttgtcagaaaaaagaataaaatcacctgagactccacataccagattataaactcttctcgtaggtttgaattgcttactcacatgtcataaattaaccacagcttcatttgaccaccaggtctaaagtctgttgacagtttcagcatgactgaatcgctcattttttttttttgctttcagaaattggcttggttctctttagagttggtgtaaacatgccatgtaataaatgatttccacttaatggtacaacagaattattgctttcttagatgtatgtgtagtaaaagtcaatatacacatttatataatttctttcttcaaaatcttatacctaatttgatatttctaaaaattgcacatgtaagtcatgtgtataacatgctaaagtactttaactgtgatcttaaaactgaataaaaatatttaataaaactttgaa

SEQ ID NO: 314062 - DNA, 8373 bp, Homo sapiens
  misc_feature (1)..(2): n is a, c, g, or t
  misc_feature (4)..(4): n is a, c, g, or t
nngngtgttttcagtctctccgggttgcatgtactgtatgtggagcagtgtacagtgaagcggaggcagagcggctccgcgagcttctctccactttcccatagagaaaccctgactggccgctgagggctagctacacacacgccctcacgcccggcgagcccgcgaggtcactatcatatgacaaaggctttgccgcagttcatcttcctccctgtgtactttccatttgccttcctggaatcctgctgcatcacagaagctggaagttctgatgttccactgaaatcacaatggaaagtcttgacttgactggtcacagtaatgaaaggcagtaatagaaataaggatcattcagcagaaggagaaggggttggaaaacgaccaaaacgaaagtgtcttcagtggcatccattgctagcaaagaaacttcttgatttttcagaagaggaagaagaggaagacgaagaggaggatattgataaggttcaacttcttggggccgatggcctagagcaagatgttggtgaaactgaagatgatgaatcaccagagcagcgagcccggagaccaatgaatgcatttcttttattttgcaaacgccatcgctctcttgtacgtcaggaacaccccaggcttgataaccgaggtgctaccaagatactagctgattggtgggctgttcttgatccaaaggaaaagcagaaatacacagacatggccaaggagtataaggatgcatttatgaaagcaaatcctggctacaaatggtgtcctaccacaaacaagcctgtgaaatccccaacacccactgtcaatccacgaaagaaactttgggccttcccatctgactcttcaagagacttgccaagccccaagaaagcaaagactgaagaaatgcctcagcttaactttggaatggctgatcctactcaaatgggaggcctgagtatgctgctgttagctggagaacatgctcttggcacaccagaggtatcctctggcacatgcaggcctgatgtttcagaatctcctgaattacgtcagaagtcaccattgtttcagtttgccgagatatcttcaagtacgtcccactctgatgcttctacaaagcagtgtcaaacatctgccttgtttcagtttgcagagatttcttcaaacacttcgcagttgggtggtgctgagcctgtaaaacgctgtggaaagtctgcactctttcaactggcagagatgtgcctggcatcagaagggatgaaaatggaagaatcaaagctaataaaagcaaaagaatccgatggtggaagaattaaagaattagagaagggaaaggaagaaaaagaaattaaaatggagaaaacagatgaaactaggttacagaaggaagcagaatttgaaaaatcggctaaggaaaatttaagagattctaaggaattgagaaattttgaggcattgcaaatagatgacataatggctataaaaatggaagatcccaaagaaattagaaaggaagagttagaagaagatcacaaatgtagtcattttcctgatttttcttattctgccagtagcaagataataattagtgatgttcccagtagaaaggatcatatgtgccatcctcatggaattatgatcattgaggatcccgcagcattaaacaagccagaaaagctaaaaaagaaaaagaagaaaagcaaaatggatcgacatggaaatgataaatccacacccaagaagacttgcaaaaagaggcagtcttcggaatctgacattgagagcgtcatatataccattgaagccgtcgcaaaaggagactggggcatagagaaacttggagatacccctcgcaagaaggtccgcacatcctcaagtggcaagggaagcattttggatgccaagccaccaaagaaaaaagtgaaatcaagagagaagaaaatgtcaaaggagaaatcctcagacaccaccaaagagtcaagacctccagatttcattagtatttctgctagcaagaacatttctggtgagacaccagagggtataaaagcagaaccattgacccctatggaagatgcactaccacccagcctatcaggacaggccaagcctgaggacagtgactgtcacagaaaaatagaaacttgtggttccaggaaatccgagaggtcttgcaaaggtgctctttataaaaccctggtgtctgagggcatgctcacctctctgcgagctaatgttgacagaggaaaacgaagctcaggaaaaggaaactcctctgatcatgaagggtgttggaatgaagaaagctggacatttagtcagagtgggaccagtgggagcaagaagttcaagaagacaaagccaaaagaagactgtctccttggctccgcaaagctggatgaagaatttgaaaaaaaattcaacagcctccctcaatatagtcctgttacatttgaccggaaatgtgtacctgtcccaagaaaaaagaagaagactggaaatgtgtcctcagaaccgactaaaaccagcaaaggaagtggggataaatggtcaaacaagcaactcttcttggatgccattcaccctacagaagccatattttcagaagacagaaacaccatggagcctgttcataaggttaaaaatatcccatccattttcaacactccagagccaacaacaacgcaagaacctttggtgggcagccaaaagagaaaagcaaggaaaaccaagattacacaccttgtcaggacagcagatggccgggtatcaccagcaggaggtactttggatgacaaaccaaaggaacaactgcagaggagtctccctaaagcaactgagacagactgcaatgacaaatgctcacacaacaccgaggtcggggagacgcggagcagtactccagaaatgcctgccgtgtctgcgttctttagcctcgctgcgctggctgaagtggcagccatggaaaatgtgcacagaggtcagaggtcaactccgctcacccatgatggacagccaaaagaaatgccgcaggctcctgtacttatttcctgcgctgaccagtgaagcgccctttcattgtaaaacattgtgctttacctactaccctagccttgtctttaccgagggatgctagtgagtccaagtggtggaaaatatagactgcaaacaagtgcttgttgccccacacggcccagattcacttgaagcagaagttagcatcctgggccagtttgttctctcagaacccagaatctttgagggtaaggttatctgtctgatactgagcagaaacagaatgatcctggagctttgctttctattgaaggcttttgacggtaataggtggtaacttggtaaaaggctgcctttactgtagctcacccagcatctcttttaccaaccagagagtgtgaaactagtttcatatattacctagttattctttcaaaacaaaacaaaaaaaaaacaaaaactgacgcactgcactagttattattagatattcttagtcttttttgtacatggagatttaagtttaagatggtttatataataggttatacctacatttatattgtagaataaatattaaaaagcctgttccagagactcccaagcagcctgggcaggcagatgtaccattgttagtggtgtatgctcggcctcgtggtccatatattctgcacttttatatttgccaccagaatggtagtttgctggcaaaaaaaaaaaaaagagagagagaaaaaattacaactcttacaatctgaatttttttcttagccttgagtgaccaagaagaatttgcttgaggcaaattgtggcaaatattttcccagacaggggaagagtcctgcagattacagattactggtgttttcatgccttgaggattcttttatttttacataggggtctaagtgaccaatggattgttcatacaaacaaaaaaaaagacaaaaatattattcagaagtgaccttagtattacttcactattctaaacacattgaagacactcacttcatgtggacttggagctacagaccttttacatccatcacagattggctggacgggttgcaattgctatgcacagcctgattggcactgcaggtttttagagccattttgagtttgtgttgtttaggaggtactgagtcaatgatgagggaggtatgcctgaccagagtgggactctcagtcatagatccacctgcaagtctctgtttcctttttgtgttttgttgcttttgaacataaaaccaaccatacataagcagcgccaagtggattaactggcttagaacattcaacatattgacttaaccacctgacattcacagtgtcttgtttcctagcaacagatgcaaagtgataaatcaaaattagtctgaggctacagattttacagggtatttgttctatagcacaaagtatttccccactcttgcgtcacagcacaaactaccaaattttaattattggattccagcaataatttttaatggttttcaaactggcggaattttgacagtgctagttcgagtttgaagcttttgaattagatctctaaatggtgacagtttacatggttttatctagctttcttatttatacttgactgaattgtaatgattttttttctaattgtaatttgacgtaatagccatacaaaaaatgactctattcatactaggtttagcttctcatggttgtagatattacttcagttccggtgctggaaaatatgtacaacatactaacaggattgaaaaaaaaatagaggtttttcttcttgtttttttttccaaagcaggtaaagagggtagcaaagcatcggaatgatgtgctcaaaaatgcatattcctggtggggatggaggaagaaggcattagtaaaaggttaatcaaacgttacaacttaaccccattcatgtaggaataaatcaagtgagcagttccagacttttgcataatatttttactatgatgctgttttattaatattttctaaatttcaaaacaaaaagtgaatgtttgaaattgctgggtcccgatgttggtggctgttggagttttggaccactcgctagcagtgatttgaagattataattagctaaaatccaaaacaaaaaaccaacaacaaaaattgtatggtgcggaacatgcaccttgacaatggtactaacttgttattctatagaacacgttagaatagatctatttttgccagagcaccctccttcagtcctccgattacatttcactagagttccttacgagattgctgtatattcctgggacctttttttaaaaaaaaaaaaagcaaaacaaaagattactttttttctatgtgattaatatcttacttgatctgcttttcctaaacctcagtggcttttcccttaggcagggttgggggtgggagggcaacttactggagatgactgttttcagatactttaaaacaaacctttttgtagaaatgcttaatttttaagcggttaggcactgagagtagcagaaatcctgcaaagctttatagttccttagactcaccttgtcgattctctgagtaaagtcttgatttcaataattgtgcttctcatgccctgaatctgctggagaggagtgttgttattttcaggtaacaacattcgttagcacaaatatttcagaccaatattagtgctctccaccccaccttttgttatcattttcatttcatttctctcattcttttttattttggaaaatcatattgctatagtgtgtactttaatctgccagcagataccatctacactaacatttgtcccacagcatcctcaagagaaaaagttgttgcaccttatatatatctcaagcaaaccaaaatatgatgctcttctgctttgttttattctaaattgttgtatcatatctttctgaaaccattctgaatttagttgaaattatcaatatttatgcttttaaccttaatttctggattcaagcctgtatataaatcttttgaaaaaaaattgtcctagcccttctctgcgatgctggaagtagaagattgcgtctcagatggagacgcagtactgttccagttttctttagccttttatttatttagttattctgggtatttcctatgtaattttgaagtgtgtagagtatattatagtaactgaagctgcagctgtaagaagctgagtgaaagaaaaaatactgtaagacatccttaaagtttttatttgtttgggtactgtatatgagatcaggaaaaagaaaaatgtcccacagccacattggaaatacaggttcttgtccccaaattaggttagttcccagattttagatcaaaactgttaattcattaaaaccccttttaaaaggtaaattctactgttgtaattccgatagtctttttcccacaaatatcagaaatatatttatttaattctgtcagatgagctttctaccgatgccatgtcccaaagccatgttaaaataattcccacgttatcattgtgattctacttcctgccactaaaattgctggagaaacaaaataatgatggaacactatgaacaaaaaggagcatctgaactggtctggttatttagaatccaatgtgttcaaatccttttgttttcttattaagtcagatgctactgtaagtcagataaaattttgtttgcactctgcagtctttggctcaatgtatggaaatgtttgcacctatgtaaagtcacaagctaattacaaattgctacagaacaggagtaagctgaaaactgaatgccatgttttgtttataaggtggggaggggagggaaaataccaaaaaactctgttccaagtttggcatttgacattaatgtgaagcagtgggaccatgctgcctgctaaactactgtatgaatcgtaaatgttctgaagacgagcagctggaggctggaggatggcattccatacagcaaaggagaagcacccaccacttcatctgggaaaaggaaggaaattgcaggaggcctggagccatcatttgtaaaggggatgttgcggggtgtgatgctgttgaggagattcaccttcaattgcactgctccacagagccctcatataaggccaatcctaatgggctacctcggctttaaaagttaatttcagtaagtcctgtttcaaaagtttgtctttttttgcttctaccttcagtgccactattttccactgcagtgttttgacttcacaaactgcctcctccagagagaacaatgtattgctgaaaatgggcagtagaagcaaatgctgttgttacatttgacctataaagtattcagagtgactgctaggtagaaattaaaacttagctttcccaaatagctccttattttgcaccttataaaaagtatactaattgttaattagatgttgcttttgtttatacaagcattcccaaagaactagatttggattttgttttgagtttttggatttttaaaaattatcttatttagattgactaacagcatacttacaattttaaaagaagctgttgttcagttcatcttaccagatgtgtctggcgaagtattcagggtttgatggactgctttactttcgtttggaagtgatagctaagtttattatactctatattaaacaactttgttcatttcactgaggaccttatcttccttatatttcagaacaaagaagcaacaagcgtgaataaaaagacaaatgtatttgactccctcataatccccatctgtatgtgctacccttccttcaaatatataaatgtgcatctttttttttaaaaaaaaaaaaaaaaaggttcctcttctggccaaatttgatctatggtggtatgattcatactgttaaattgagagaggaaaccttgtggttaaaaattatatggctgctgttttctttttgcagtcagtggtcaaaactgatcatgtgcttaaatcgatttttatgcacagaactagttattgtgaacattactgctccctccaaagatttcctgataacttgggccagaggtggttactgagtaacaaggatctaattcaatgcctcaaaactcttccacccacaatgcaaatcttacctcacaagctctaacctaaatcacagagacatgcatgtttcatgcattaacactgatttcgctctgtggcccaccagaggggtgggctcatgtcccctgactcctcacatgagtgcctcagctctaagagccgtggaacggggggtagggaaggtttgcgatctggagctcagcgaagcttaaatgccatgtgcatatacaacacgcagcatgaagtaggccccaagtatccagtcagtcactcgacaaacatttaggg

SEQ ID NO: 314063 - DNA, 8709 bp, Homo sapiens
agcaggcacgggcacggggacaccccactcgttgctcctccgttatggaaaggtgtttagcagacttttacgcccggagtgtggtcactatcatatgacaaaggctttgccgcagttcatcttcctccctgtgtactttccatttgccttcctggaatcctgctgcatcacagaagctggaagttctgatgttccactgaaatcacaatggaaagtcttgacttgactggtcacagtaatgaaaggcagtaatagaaataaggatcattcagcagaaggagaaggggttggaaaacgaccaaaacgaaagtgtcttcagtggcatccattgctagcaaagaaacttcttgatttttcagaagaggaagaagaggaagacgaagaggaggatattgataaggttcaacttcttggggccgatggcctagagcaagatgttggtgaaactgaagatgatgaatcaccagagcagcgagcccggagaccaatgaatgcatttcttttattttgcaaacgccatcgctctcttgtacgtcaggaacaccccaggcttgataaccgaggtgctaccaagatactagctgattggtgggctgttcttgatccaaaggaaaagcagaaatacacagacatggccaaggagtataaggatgcatttatgaaagcaaatcctggctacaaatggtgtcctaccacaaacaagcctgtgaaatccccaacacccactgtcaatccacgaaagaaactttgggccttcccatctgactcttcaagagacttgccaagccccaagaaagcaaagactgaagaaatgcctcagcttaactttggaatggctgatcctactcaaatgggaggcctgagtatgctgctgttagctggagaacatgctcttggcacaccagaggtatcctctggcacatgcaggcctgatgtttcagaatctcctgaattacgtcagaagtcaccattgtttcagtttgccgagatatcttcaagtacgtcccactctgatgcttctacaaagcagtgtcaaacatctgccttgtttcagtttgcagagatttcttcaaacacttcgcagttgggtggtgctgagcctgtaaaacgctgtggaaagtctgcactctttcaactggcagagatgtgcctggcatcagaagggatgaaaatggaagaatcaaagctaataaaagcaaaagaatccgatggtggaagaattaaagaattagagaagggaaaggaagaaaaagaaattaaaatggagaaaacagatgaaactaggttacagaaggaagcagaatttgaaaaatcggctaaggaaaatttaagagattctaaggaattgagaaattttgaggcattgcaaatagatgacataatggctataaaaatggaagatcccaaagaaattagaaaggaagagttagaagaagatcacaaatgtagtcattttcctgatttttcttattctgccagtagcaagataataattagtgatgttcccagtagaaaggatcatatgtgccatcctcatggaattatgatcattgaggatcccgcagcattaaacaagccagaaaagctaaaaaagaaaaagaagaaaagcaaaatggatcgacatggaaatgataaatccacacccaagaagacttgcaaaaagaggcagtcttcggaatctgacattgagagcgtcatatataccattgaagccgtcgcaaaaggagactggggcatagagaaacttggagatacccctcgcaagaaggtccgcacatcctcaagtggcaagggaagcattttggatgccaagccaccaaagaaaaaagtgaaatcaagagagaagaaaatgtcaaaggagaaatcctcagacaccaccaaagagtcaagacctccagatttcattagtatttctgctagcaagaacatttctggtgagacaccagagggtataaaagcagaaccattgacccctatggaagatgcactaccacccagcctatcaggacaggccaagcctgaggacagtgactgtcacagaaaaatagaaacttgtggttccaggaaatccgagaggtcttgcaaaggtgctctttataaaaccctggtgtctgagggcatgctcacctctctgcgagctaatgttgacagaggaaaacgaagctcaggaaaaggaaactcctctgatcatgaagggtgttggaatgaagaaagctggacatttagtcagagtgggaccagtgggagcaagaagttcaagaagacaaagccaaaagaagactgtctccttggctccgcaaagctggatgaagaatttgaaaaaaaattcaacagcctccctcaatatagtcctgttacatttgaccggaaatgtgtacctgtcccaagaaaaaagaagaagactggaaatgtgtcctcagaaccgactaaaaccagcaaaggaagtggggataaatggtcaaacaagcaactcttcttggatgccattcaccctacagaagccatattttcagaagacagaaacaccatggagcctgttcataaggttaaaaatatcccatccattttcaacactccagagccaacaacaacgcaagaacctttggtgggcagccaaaagagaaaagcaaggaaaaccaagattacacaccttgtcaggacagcagatggccgggtatcaccagcaggaggtactttggatgacaaaccaaaggaacaactgcagaggagtctccctaaagcaactgagacagactgcaatgacaaatgctcacacaacaccgaggtcggggagacgcggagcagtactccagaaatgcctgccgtgtctgcgttctttagcctcgctgcgctggctgaagtggcagccatggaaaatgtgcacagaggtcagaggtcaactccgctcacccatgatggacagccaaaagaaatgccgcaggctcctgtacttatttcctgcgctgaccagtgaagcgccctttcattgtaaaacattgtgctttacctactaccctagccttgtctttaccgagggatgctagtgagtccaagtggtggaaaatatagactgcaaacaagtgcttgttgccccacacggcccagattcacttgaagcagaagttagcatcctgggccagtttgttctctcagaacccagaatctttgagggtaaggttatctgtctgatactgagcagaaacagaatgatcctggagctttgctttctattgaaggcttttgacggtaataggtggtaacttggtaaaaggctgcctttactgtagctcacccagcatctcttttaccaaccagagagtgtgaaactagtttcatatattacctagttattctttcaaaacaaaacaaaaaaaaaacaaaaactgacgcactgcactagttattattagatattcttagtcttttttgtacatggagatttaagtttaagatggtttatataataggttatacctacatttatattgtagaataaatattaaaaagcctgttccagagactcccaagcagcctgggcaggcagatgtaccattgttagtggtgtatgctcggcctcgtggtccatatattctgcacttttatatttgccaccagaatggtagtttgctggcaaaaaaaaaaaaaagagagagagaaaaaattacaactcttacaatctgaatttttttcttagccttgagtgaccaagaagaatttgcttgaggcaaattgtggcaaatattttcccagacaggggaagagtcctgcagattacagattactggtgttttcatgccttgaggattcttttatttttacataggggtctaagtgaccaatggattgttcatacaaacaaaaaaaaagacaaaaatattattcagaagtgaccttagtattacttcactattctaaacacattgaagacactcacttcatgtggacttggagctacagaccttttacatccatcacagattggctggacgggttgcaattgctatgcacagcctgattggcactgcaggtttttagagccattttgagtttgtgttgtttaggaggtactgagtcaatgatgagggaggtatgcctgaccagagtgggactctcagtcatagatccacctgcaagtctctgtttcctttttgtgttttgttgcttttgaacataaaaccaaccatacataagcagcgccaagtggattaactggcttagaacattcaacatattgacttaaccacctgacattcacagtgtcttgtttcctagcaacagatgcaaagtgataaatcaaaattagtctgaggctacagattttacagggtatttgttctatagcacaaagtatttccccactcttgcgtcacagcacaaactaccaaattttaattattggattccagcaataatttttaatggttttcaaactggcggaattttgacagtgctagttcgagtttgaagcttttgaattagatctctaaatggtgacagtttacatggttttatctagctttcttatttatacttgactgaattgtaatgattttttttctaattgtaatttgacgtaatagccatacaaaaaatgactctattcatactaggtttagcttctcatggttgtagatattacttcagttccggtgctggaaaatatgtacaacatactaacaggattgaaaaaaaaatagaggtttttcttcttgtttttttttccaaagcaggtaaagagggtagcaaagcatcggaatgatgtgctcaaaaatgcatattcctggtggggatggaggaagaaggcattagtaaaaggttaatcaaacgttacaacttaaccccattcatgtaggaataaatcaagtgagcagttccagacttttgcataatatttttactatgatgctgttttattaatattttctaaatttcaaaacaaaaagtgaatgtttgaaattgctgggtcccgatgttggtggctgttggagttttggaccactcgctagcagtgatttgaagattataattagctaaaatccaaaacaaaaaaccaacaacaaaaattgtatggtgcggaacatgcaccttgacaatggtactaacttgttattctatagaacacgttagaatagatctatttttgccagagcaccctccttcagtcctccgattacatttcactagagttccttacgagattgctgtatattcctgggacctttttttaaaaaaaaaaaaagcaaaacaaaagattactttttttctatgtgattaatatcttacttgatctgcttttcctaaacctcagtggcttttcccttaggcagggttgggggtgggagggcaacttactggagatgactgttttcagatactttaaaacaaacctttttgtagaaatgcttaatttttaagcggttaggcactgagagtagcagaaatcctgcaaagctttatagttccttagactcaccttgtcgattctctgagtaaagtcttgatttcaataattgtgcttctcatgccctgaatctgctggagaggagtgttgttattttcaggtaacaacattcgttagcacaaatatttcagaccaatattagtgctctccaccccaccttttgttatcattttcatttcatttctctcattcttttttattttggaaaatcatattgctatagtgtgtactttaatctgccagcagataccatctacactaacatttgtcccacagcatcctcaagagaaaaagttgttgcaccttatatatatctcaagcaaaccaaaatatgatgctcttctgctttgttttattctaaattgttgtatcatatctttctgaaaccattctgaatttagttgaaattatcaatatttatgcttttaaccttaatttctggattcaagcctgtatataaatcttttgaaaaaaaattgtcctagcccttctctgcgatgctggaagtagaagattgcgtctcagatggagacgcagtactgttccagttttctttagccttttatttatttagttattctgggtatttcctatgtaattttgaagtgtgtagagtatattatagtaactgaagctgcagctgtaagaagctgagtgaaagaaaaaatactgtaagacatccttaaagtttttatttgtttgggtactgtatatgagatcaggaaaaagaaaaatgtcccacagccacattggaaatacaggttcttgtccccaaattaggttagttcccagattttagatcaaaactgttaattcattaaaaccccttttaaaaggtaaattctactgttgtaattccgatagtctttttcccacaaatatcagaaatatatttatttaattctgtcagatgagctttctaccgatgccatgtcccaaagccatgttaaaataattcccacgttatcattgtgattctacttcctgccactaaaattgctggagaaacaaaataatgatggaacactatgaacaaaaaggagcatctgaactggtctggttatttagaatccaatgtgttcaaatccttttgttttcttattaagtcagatgctactgtaagtcagataaaattttgtttgcactctgcagtctttggctcaatgtatggaaatgtttgcacctatgtaaagtcacaagctaattacaaattgctacagaacaggagtaagctgaaaactgaatgccatgttttgtttataaggtggggaggggagggaaaataccaaaaaactctgttccaagtttggcatttgacattaatgtgaagcagtgggaccatgctgcctgctaaactactgtatgaatcgtaaatgttctgaagacgagcagctggaggctggaggatggcattccatacagcaaaggagaagcacccaccacttcatctgggaaaaggaaggaaattgcaggaggcctggagccatcatttgtaaaggggatgttgcggggtgtgatgctgttgaggagattcaccttcaattgcactgctccacagagccctcatataaggccaatcctaatgggctacctcggctttaaaagttaatttcagtaagtcctgtttcaaaagtttgtctttttttgcttctaccttcagtgccactattttccactgcagtgttttgacttcacaaactgcctcctccagagagaacaatgtattgctgaaaatgggcagtagaagcaaatgctgttgttacatttgacctataaagtattcagagtgactgctaggtagaaattaaaacttagctttcccaaatagctccttattttgcaccttataaaaagtatactaattgttaattagatgttgcttttgtttatacaagcattcccaaagaactagatttggattttgttttgagtttttggatttttaaaaattatcttatttagattgactaacagcatacttacaattttaaaagaagctgttgttcagttcatcttaccagatgtgtctggcgaagtattcagggtttgatggactgctttactttcgtttggaagtgatagctaagtttattatactctatattaaacaactttgttcatttcactgaggaccttatcttccttatatttcagaacaaagaagcaacaagcgtgaataaaaagacaaatgtatttgactccctcataatccccatctgtatgtgctacccttccttcaaatatataaatgtgcatctttttttttaaaaaaaaaaaaaaaaaggttcctcttctggccaaatttgatctatggtggtatgattcatactgttaaattgagagaggaaaccttgtggttaaaaattatatggctgctgttttctttttgcagtcagtggtcaaaactgatcatgtgcttaaatcgatttttatgcacagaactagttattgtgaacattactgctccctccaaagatttcctgataacttgggccagaggtggttactgagtaacaaggatctaattcaatgcctcaaaactcttccacccacaatgcaaatcttacctcacaagctctaacctaaatcacagagacatgcatgtttcatgcattaacactgatttcgctctgtggcccaccagaggggtgggctcatgtcccctgactcctcacatgagtgcctcagctctaagagccgtggaacggggggtagggaaggtttgcgatctggagctcagcaactggctcagcaacgttttctccatttcattagcactaaacaagtctcttgctctcaggaatttgtcagaaaaaagaataaaatcacctgagactccacataccagattataaactcttctcgtaggtttgaattgcttactcacatgtcataaattaaccacagcttcatttgaccaccaggtctaaagtctgttgacagtttcagcatgactgaatcgctcattttttttttttgctttcagaaattggcttggttctctttagagttggtgtaaacatgccatgtaataaatgatttccacttaatggtacaacagaattattgctttcttagatgtatgtgtagtaaaagtcaatatacacatttatataatttctttcttcaaaatcttatacctaatttgatatttctaaaaattgcacatgtaagtcatgtgtataacatgctaaagtactttaactgtgatcttaaaactgaataaaaatatttaataaaactttgaa

SEQ ID NO: 314064 - DNA, 9176 bp, Homo sapiens
  misc_feature (1)..(2): n is a, c, g, or t
  misc_feature (4)..(4): n is a, c, g, or t
nngngtgttttcagtctctccgggttgcatgtactgtatgtggagcagtgtacagtgaagcggaggcagagcggctccgcgagcttctctccactttcccatagagaaaccctgactggccgctgagggctagctacacacacgccctcacgcccggcgagcccgcgaggtcactatcatatgacaaaggctttgccgcagttcatcttcctccctgtgtactttccatttgccttcctggaatcctgctgcatcacagaagctggaagttctgatgttccactgaaatcacaatggaaagtcttgacttgactggtaagagctgttgtgaaggtacatcttacttacttacctggaagcagtgaggcagtcaagaattatgtgctgtcagagctggtctcagcatgatcaaggaagtgtgatcattggatatttttttcttgtcaattttattattttttaaagtgtgacttttattgatctccattatcaaatggggaaactgaagaacagagaggtgaaattatctgcccaaggttacgctgctaataagtggcaaagctggaattcaaactcaggctgtctggctgcagggtttgttctcctaaccacaccaccacactgcctgtagattatcctcacatgtttgggtatccttttacattcatgtgcatgaatgcactgtttatttttaacgtcacagtaatgaaaggcagtaatagaaataaggatcattcagcagaaggagaaggggttggaaaacgaccaaaacgaaagtgtcttcagtggcatccattgctagcaaagaaacttcttgatttttcagaagaggaagaagaggaagacgaagaggaggatattgataaggttcaacttcttggggccgatggcctagagcaagatgttggtgaaactgaagatgatgaatcaccagagcagcgagcccggagaccaatgaatgcatttcttttattttgcaaacgccatcgctctcttgtacgtcaggaacaccccaggcttgataaccgaggtgctaccaagatactagctgattggtgggctgttcttgatccaaaggaaaagcagaaatacacagacatggccaaggagtataaggatgcatttatgaaagcaaatcctggctacaaatggtgtcctaccacaaacaagcctgtgaaatccccaacacccactgtcaatccacgaaagaaactttgggccttcccatctgactcttcaagagacttgccaagccccaagaaagcaaagactgaagaaatgcctcagcttaactttggaatggctgatcctactcaaatgggaggcctgagtatgctgctgttagctggagaacatgctcttggcacaccagaggtatcctctggcacatgcaggcctgatgtttcagaatctcctgaattacgtcagaagtcaccattgtttcagtttgccgagatatcttcaagtacgtcccactctgatgcttctacaaagcagtgtcaaacatctgccttgtttcagtttgcagagatttcttcaaacacttcgcagttgggtggtgctgagcctgtaaaacgctgtggaaagtctgcactctttcaactggcagagatgtgcctggcatcagaagggatgaaaatggaagaatcaaagctaataaaagcaaaagaatccgatggtggaagaattaaagaattagagaagggaaaggaagaaaaagaaattaaaatggagaaaacagatgaaactaggttacagaaggaagcagaatttgaaaaatcggctaaggaaaatttaagagattctaaggaattgagaaattttgaggcattgcaaatagatgacataatggctataaaaatggaagatcccaaagaaattagaaaggaagagttagaagaagatcacaaatgtagtcattttcctgatttttcttattctgccagtagcaagataataattagtgatgttcccagtagaaaggatcatatgtgccatcctcatggaattatgatcattgaggatcccgcagcattaaacaagccagaaaagctaaaaaagaaaaagaagaaaagcaaaatggatcgacatggaaatgataaatccacacccaagaagacttgcaaaaagaggcagtcttcggaatctgacattgagagcgtcatatataccattgaagccgtcgcaaaaggagactggggcatagagaaacttggagatacccctcgcaagaaggtccgcacatcctcaagtggcaagggaagcattttggatgccaagccaccaaagaaaaaagtgaaatcaagagagaagaaaatgtcaaaggagaaatcctcagacaccaccaaagagtcaagacctccagatttcattagtatttctgctagcaagaacatttctggtgagacaccagagggtataaaagcagaaccattgacccctatggaagatgcactaccacccagcctatcaggacaggccaagcctgaggacagtgactgtcacagaaaaatagaaacttgtggttccaggaaatccgagaggtcttgcaaaggtgctctttataaaaccctggtgtctgagggcatgctcacctctctgcgagctaatgttgacagaggaaaacgaagctcaggaaaaggaaactcctctgatcatgaagggtgttggaatgaagaaagctggacatttagtcagagtgggaccagtgggagcaagaagttcaagaagacaaagccaaaagaagactgtctccttggctccgcaaagctggatgaagaatttgaaaaaaaattcaacagcctccctcaatatagtcctgttacatttgaccggaaatgtgtacctgtcccaagaaaaaagaagaagactggaaatgtgtcctcagaaccgactaaaaccagcaaaggaagtggggataaatggtcaaacaagcaactcttcttggatgccattcaccctacagaagccatattttcagaagacagaaacaccatggagcctgttcataaggttaaaaatatcccatccattttcaacactccagagccaacaacaacgcaagaacctttggtgggcagccaaaagagaaaagcaaggaaaaccaagattacacaccttgtcaggacagcagatggccgggtatcaccagcaggaggtactttggatgacaaaccaaaggaacaactgcagaggagtctccctaaagcaactgagacagactgcaatgacaaatgctcacacaacaccgaggtcggggagacgcggagcagtactccagaaatgcctgccgtgtctgcgttctttagcctcgctgcgctggctgaagtggcagccatggaaaatgtgcacagaggtcagaggtcaactccgctcacccatgatggacagccaaaagaaatgccgcaggctcctgtacttatttcctgcgctgaccagtgaagcgccctttcattgtaaaacattgtgctttacctactaccctagccttgtctttaccgagggatgctagtgagtccaagtggtggaaaatatagactgcaaacaagtgcttgttgccccacacggcccagattcacttgaagcagaagttagcatcctgggccagtttgttctctcagaacccagaatctttgagggtaaggttatctgtctgatactgagcagaaacagaatgatcctggagctttgctttctattgaaggcttttgacggtaataggtggtaacttggtaaaaggctgcctttactgtagctcacccagcatctcttttaccaaccagagagtgtgaaactagtttcatatattacctagttattctttcaaaacaaaacaaaaaaaaaacaaaaactgacgcactgcactagttattattagatattcttagtcttttttgtacatggagatttaagtttaagatggtttatataataggttatacctacatttatattgtagaataaatattaaaaagcctgttccagagactcccaagcagcctgggcaggcagatgtaccattgttagtggtgtatgctcggcctcgtggtccatatattctgcacttttatatttgccaccagaatggtagtttgctggcaaaaaaaaaaaaaagagagagagaaaaaattacaactcttacaatctgaatttttttcttagccttgagtgaccaagaagaatttgcttgaggcaaattgtggcaaatattttcccagacaggggaagagtcctgcagattacagattactggtgttttcatgccttgaggattcttttatttttacataggggtctaagtgaccaatggattgttcatacaaacaaaaaaaaagacaaaaatattattcagaagtgaccttagtattacttcactattctaaacacattgaagacactcacttcatgtggacttggagctacagaccttttacatccatcacagattggctggacgggttgcaattgctatgcacagcctgattggcactgcaggtttttagagccattttgagtttgtgttgtttaggaggtactgagtcaatgatgagggaggtatgcctgaccagagtgggactctcagtcatagatccacctgcaagtctctgtttcctttttgtgttttgttgcttttgaacataaaaccaaccatacataagcagcgccaagtggattaactggcttagaacattcaacatattgacttaaccacctgacattcacagtgtcttgtttcctagcaacagatgcaaagtgataaatcaaaattagtctgaggctacagattttacagggtatttgttctatagcacaaagtatttccccactcttgcgtcacagcacaaactaccaaattttaattattggattccagcaataatttttaatggttttcaaactggcggaattttgacagtgctagttcgagtttgaagcttttgaattagatctctaaatggtgacagtttacatggttttatctagctttcttatttatacttgactgaattgtaatgattttttttctaattgtaatttgacgtaatagccatacaaaaaatgactctattcatactaggtttagcttctcatggttgtagatattacttcagttccggtgctggaaaatatgtacaacatactaacaggattgaaaaaaaaatagaggtttttcttcttgtttttttttccaaagcaggtaaagagggtagcaaagcatcggaatgatgtgctcaaaaatgcatattcctggtggggatggaggaagaaggcattagtaaaaggttaatcaaacgttacaacttaaccccattcatgtaggaataaatcaagtgagcagttccagacttttgcataatatttttactatgatgctgttttattaatattttctaaatttcaaaacaaaaagtgaatgtttgaaattgctgggtcccgatgttggtggctgttggagttttggaccactcgctagcagtgatttgaagattataattagctaaaatccaaaacaaaaaaccaacaacaaaaattgtatggtgcggaacatgcaccttgacaatggtactaacttgttattctatagaacacgttagaatagatctatttttgccagagcaccctccttcagtcctccgattacatttcactagagttccttacgagattgctgtatattcctgggacctttttttaaaaaaaaaaaaagcaaaacaaaagattactttttttctatgtgattaatatcttacttgatctgcttttcctaaacctcagtggcttttcccttaggcagggttgggggtgggagggcaacttactggagatgactgttttcagatactttaaaacaaacctttttgtagaaatgcttaatttttaagcggttaggcactgagagtagcagaaatcctgcaaagctttatagttccttagactcaccttgtcgattctctgagtaaagtcttgatttcaataattgtgcttctcatgccctgaatctgctggagaggagtgttgttattttcaggtaacaacattcgttagcacaaatatttcagaccaatattagtgctctccaccccaccttttgttatcattttcatttcatttctctcattcttttttattttggaaaatcatattgctatagtgtgtactttaatctgccagcagataccatctacactaacatttgtcccacagcatcctcaagagaaaaagttgttgcaccttatatatatctcaagcaaaccaaaatatgatgctcttctgctttgttttattctaaattgttgtatcatatctttctgaaaccattctgaatttagttgaaattatcaatatttatgcttttaaccttaatttctggattcaagcctgtatataaatcttttgaaaaaaaattgtcctagcccttctctgcgatgctggaagtagaagattgcgtctcagatggagacgcagtactgttccagttttctttagccttttatttatttagttattctgggtatttcctatgtaattttgaagtgtgtagagtatattatagtaactgaagctgcagctgtaagaagctgagtgaaagaaaaaatactgtaagacatccttaaagtttttatttgtttgggtactgtatatgagatcaggaaaaagaaaaatgtcccacagccacattggaaatacaggttcttgtccccaaattaggttagttcccagattttagatcaaaactgttaattcattaaaaccccttttaaaaggtaaattctactgttgtaattccgatagtctttttcccacaaatatcagaaatatatttatttaattctgtcagatgagctttctaccgatgccatgtcccaaagccatgttaaaataattcccacgttatcattgtgattctacttcctgccactaaaattgctggagaaacaaaataatgatggaacactatgaacaaaaaggagcatctgaactggtctggttatttagaatccaatgtgttcaaatccttttgttttcttattaagtcagatgctactgtaagtcagataaaattttgtttgcactctgcagtctttggctcaatgtatggaaatgtttgcacctatgtaaagtcacaagctaattacaaattgctacagaacaggagtaagctgaaaactgaatgccatgttttgtttataaggtggggaggggagggaaaataccaaaaaactctgttccaagtttggcatttgacattaatgtgaagcagtgggaccatgctgcctgctaaactactgtatgaatcgtaaatgttctgaagacgagcagctggaggctggaggatggcattccatacagcaaaggagaagcacccaccacttcatctgggaaaaggaaggaaattgcaggaggcctggagccatcatttgtaaaggggatgttgcggggtgtgatgctgttgaggagattcaccttcaattgcactgctccacagagccctcatataaggccaatcctaatgggctacctcggctttaaaagttaatttcagtaagtcctgtttcaaaagtttgtctttttttgcttctaccttcagtgccactattttccactgcagtgttttgacttcacaaactgcctcctccagagagaacaatgtattgctgaaaatgggcagtagaagcaaatgctgttgttacatttgacctataaagtattcagagtgactgctaggtagaaattaaaacttagctttcccaaatagctccttattttgcaccttataaaaagtatactaattgttaattagatgttgcttttgtttatacaagcattcccaaagaactagatttggattttgttttgagtttttggatttttaaaaattatcttatttagattgactaacagcatacttacaattttaaaagaagctgttgttcagttcatcttaccagatgtgtctggcgaagtattcagggtttgatggactgctttactttcgtttggaagtgatagctaagtttattatactctatattaaacaactttgttcatttcactgaggaccttatcttccttatatttcagaacaaagaagcaacaagcgtgaataaaaagacaaatgtatttgactccctcataatccccatctgtatgtgctacccttccttcaaatatataaatgtgcatctttttttttaaaaaaaaaaaaaaaaaggttcctcttctggccaaatttgatctatggtggtatgattcatactgttaaattgagagaggaaaccttgtggttaaaaattatatggctgctgttttctttttgcagtcagtggtcaaaactgatcatgtgcttaaatcgatttttatgcacagaactagttattgtgaacattactgctccctccaaagatttcctgataacttgggccagaggtggttactgagtaacaaggatctaattcaatgcctcaaaactcttccacccacaatgcaaatcttacctcacaagctctaacctaaatcacagagacatgcatgtttcatgcattaacactgatttcgctctgtggcccaccagaggggtgggctcatgtcccctgactcctcacatgagtgcctcagctctaagagccgtggaacggggggtagggaaggtttgcgatctggagctcagcaactggctcagcaacgttttctccatttcattagcactaaacaagtctcttgctctcaggaatttgtcagaaaaaagaataaaatcacctgagactccacataccagattataaactcttctcgtaggtttgaattgcttactcacatgtcataaattaaccacagcttcatttgaccaccaggtctaaagtctgttgacagtttcagcatgactgaatcgctcattttttttttttgctttcagaaattggcttggttctctttagagttggtgtaaacatgccatgtaataaatgatttccacttaatggtacaacagaattattgctttcttagatgtatgtgtagtaaaagtcaatatacacatttatataatttctttcttcaaaatcttatacctaatttgatatttctaaaaattgcacatgtaagtcatgtgtataacatgctaaagtactttaactgtgatcttaaaactgaataaaaatatttaataaaactttgaa

SEQ ID NO: 314065 - DNA, 9084 bp, Homo sapiens
  misc_feature (1)..(2): n is a, c, g, or t
  misc_feature (4)..(4): n is a, c, g, or t
nngngtgttttcagtctctccgggttgcatgtactgtatgtggagcagtgtacagtgaagcggaggcagagcggctccgcgagcttctctccactttcccatagagaaaccctgactggccgctgagggctagctacacacacgccctcacgcccggcgagcccgcgaggtcactatcatatgacaaaggctttgccgcagttcatcttcctccctgtgtactttccatttgccttcctggaatcctgctgcatcacagaagctggaagttctgatgttccactgaaatcacaatggaaagtcttgacttgactggtaagagctgttgtgaaggtacatcttacttacttacctggaagcagtgaggcagtcaagaattatgtgctgtcagagctggtctcagcatgatcaaggaagtgtgatcattggatatttttttcttgtcaattttattattttttaaagtgtgacttttattgatctccattatcaagcatatgggccactgaaaacttctgagcaatggatataaatgagatggaacagaaggaaaaaaaggtagacattggaaagactggtttagggggctttactattatcctaggtcacagtaatgaaaggcagtaatagaaataaggatcattcagcagaaggagaaggggttggaaaacgaccaaaacgaaagtgtcttcagtggcatccattgctagcaaagaaacttcttgatttttcagaagaggaagaagaggaagacgaagaggaggatattgataaggttcaacttcttggggccgatggcctagagcaagatgttggtgaaactgaagatgatgaatcaccagagcagcgagcccggagaccaatgaatgcatttcttttattttgcaaacgccatcgctctcttgtacgtcaggaacaccccaggcttgataaccgaggtgctaccaagatactagctgattggtgggctgttcttgatccaaaggaaaagcagaaatacacagacatggccaaggagtataaggatgcatttatgaaagcaaatcctggctacaaatggtgtcctaccacaaacaagcctgtgaaatccccaacacccactgtcaatccacgaaagaaactttgggccttcccatctgactcttcaagagacttgccaagccccaagaaagcaaagactgaagaaatgcctcagcttaactttggaatggctgatcctactcaaatgggaggcctgagtatgctgctgttagctggagaacatgctcttggcacaccagaggtatcctctggcacatgcaggcctgatgtttcagaatctcctgaattacgtcagaagtcaccattgtttcagtttgccgagatatcttcaagtacgtcccactctgatgcttctacaaagcagtgtcaaacatctgccttgtttcagtttgcagagatttcttcaaacacttcgcagttgggtggtgctgagcctgtaaaacgctgtggaaagtctgcactctttcaactggcagagatgtgcctggcatcagaagggatgaaaatggaagaatcaaagctaataaaagcaaaagaatccgatggtggaagaattaaagaattagagaagggaaaggaagaaaaagaaattaaaatggagaaaacagatgaaactaggttacagaaggaagcagaatttgaaaaatcggctaaggaaaatttaagagattctaaggaattgagaaattttgaggcattgcaaatagatgacataatggctataaaaatggaagatcccaaagaaattagaaaggaagagttagaagaagatcacaaatgtagtcattttcctgatttttcttattctgccagtagcaagataataattagtgatgttcccagtagaaaggatcatatgtgccatcctcatggaattatgatcattgaggatcccgcagcattaaacaagccagaaaagctaaaaaagaaaaagaagaaaagcaaaatggatcgacatggaaatgataaatccacacccaagaagacttgcaaaaagaggcagtcttcggaatctgacattgagagcgtcatatataccattgaagccgtcgcaaaaggagactggggcatagagaaacttggagatacccctcgcaagaaggtccgcacatcctcaagtggcaagggaagcattttggatgccaagccaccaaagaaaaaagtgaaatcaagagagaagaaaatgtcaaaggagaaatcctcagacaccaccaaagagtcaagacctccagatttcattagtatttctgctagcaagaacatttctggtgagacaccagagggtataaaagcagaaccattgacccctatggaagatgcactaccacccagcctatcaggacaggccaagcctgaggacagtgactgtcacagaaaaatagaaacttgtggttccaggaaatccgagaggtcttgcaaaggtgctctttataaaaccctggtgtctgagggcatgctcacctctctgcgagctaatgttgacagaggaaaacgaagctcaggaaaaggaaactcctctgatcatgaagggtgttggaatgaagaaagctggacatttagtcagagtgggaccagtgggagcaagaagttcaagaagacaaagccaaaagaagactgtctccttggctccgcaaagctggatgaagaatttgaaaaaaaattcaacagcctccctcaatatagtcctgttacatttgaccggaaatgtgtacctgtcccaagaaaaaagaagaagactggaaatgtgtcctcagaaccgactaaaaccagcaaaggaagtggggataaatggtcaaacaagcaactcttcttggatgccattcaccctacagaagccatattttcagaagacagaaacaccatggagcctgttcataaggttaaaaatatcccatccattttcaacactccagagccaacaacaacgcaagaacctttggtgggcagccaaaagagaaaagcaaggaaaaccaagattacacaccttgtcaggacagcagatggccgggtatcaccagcaggaggtactttggatgacaaaccaaaggaacaactgcagaggagtctccctaaagcaactgagacagactgcaatgacaaatgctcacacaacaccgaggtcggggagacgcggagcagtactccagaaatgcctgccgtgtctgcgttctttagcctcgctgcgctggctgaagtggcagccatggaaaatgtgcacagaggtcagaggtcaactccgctcacccatgatggacagccaaaagaaatgccgcaggctcctgtacttatttcctgcgctgaccagtgaagcgccctttcattgtaaaacattgtgctttacctactaccctagccttgtctttaccgagggatgctagtgagtccaagtggtggaaaatatagactgcaaacaagtgcttgttgccccacacggcccagattcacttgaagcagaagttagcatcctgggccagtttgttctctcagaacccagaatctttgagggtaaggttatctgtctgatactgagcagaaacagaatgatcctggagctttgctttctattgaaggcttttgacggtaataggtggtaacttggtaaaaggctgcctttactgtagctcacccagcatctcttttaccaaccagagagtgtgaaactagtttcatatattacctagttattctttcaaaacaaaacaaaaaaaaaacaaaaactgacgcactgcactagttattattagatattcttagtcttttttgtacatggagatttaagtttaagatggtttatataataggttatacctacatttatattgtagaataaatattaaaaagcctgttccagagactcccaagcagcctgggcaggcagatgtaccattgttagtggtgtatgctcggcctcgtggtccatatattctgcacttttatatttgccaccagaatggtagtttgctggcaaaaaaaaaaaaaagagagagagaaaaaattacaactcttacaatctgaatttttttcttagccttgagtgaccaagaagaatttgcttgaggcaaattgtggcaaatattttcccagacaggggaagagtcctgcagattacagattactggtgttttcatgccttgaggattcttttatttttacataggggtctaagtgaccaatggattgttcatacaaacaaaaaaaaagacaaaaatattattcagaagtgaccttagtattacttcactattctaaacacattgaagacactcacttcatgtggacttggagctacagaccttttacatccatcacagattggctggacgggttgcaattgctatgcacagcctgattggcactgcaggtttttagagccattttgagtttgtgttgtttaggaggtactgagtcaatgatgagggaggtatgcctgaccagagtgggactctcagtcatagatccacctgcaagtctctgtttcctttttgtgttttgttgcttttgaacataaaaccaaccatacataagcagcgccaagtggattaactggcttagaacattcaacatattgacttaaccacctgacattcacagtgtcttgtttcctagcaacagatgcaaagtgataaatcaaaattagtctgaggctacagattttacagggtatttgttctatagcacaaagtatttccccactcttgcgtcacagcacaaactaccaaattttaattattggattccagcaataatttttaatggttttcaaactggcggaattttgacagtgctagttcgagtttgaagcttttgaattagatctctaaatggtgacagtttacatggttttatctagctttcttatttatacttgactgaattgtaatgattttttttctaattgtaatttgacgtaatagccatacaaaaaatgactctattcatactaggtttagcttctcatggttgtagatattacttcagttccggtgctggaaaatatgtacaacatactaacaggattgaaaaaaaaatagaggtttttcttcttgtttttttttccaaagcaggtaaagagggtagcaaagcatcggaatgatgtgctcaaaaatgcatattcctggtggggatggaggaagaaggcattagtaaaaggttaatcaaacgttacaacttaaccccattcatgtaggaataaatcaagtgagcagttccagacttttgcataatatttttactatgatgctgttttattaatattttctaaatttcaaaacaaaaagtgaatgtttgaaattgctgggtcccgatgttggtggctgttggagttttggaccactcgctagcagtgatttgaagattataattagctaaaatccaaaacaaaaaaccaacaacaaaaattgtatggtgcggaacatgcaccttgacaatggtactaacttgttattctatagaacacgttagaatagatctatttttgccagagcaccctccttcagtcctccgattacatttcactagagttccttacgagattgctgtatattcctgggacctttttttaaaaaaaaaaaaagcaaaacaaaagattactttttttctatgtgattaatatcttacttgatctgcttttcctaaacctcagtggcttttcccttaggcagggttgggggtgggagggcaacttactggagatgactgttttcagatactttaaaacaaacctttttgtagaaatgcttaatttttaagcggttaggcactgagagtagcagaaatcctgcaaagctttatagttccttagactcaccttgtcgattctctgagtaaagtcttgatttcaataattgtgcttctcatgccctgaatctgctggagaggagtgttgttattttcaggtaacaacattcgttagcacaaatatttcagaccaatattagtgctctccaccccaccttttgttatcattttcatttcatttctctcattcttttttattttggaaaatcatattgctatagtgtgtactttaatctgccagcagataccatctacactaacatttgtcccacagcatcctcaagagaaaaagttgttgcaccttatatatatctcaagcaaaccaaaatatgatgctcttctgctttgttttattctaaattgttgtatcatatctttctgaaaccattctgaatttagttgaaattatcaatatttatgcttttaaccttaatttctggattcaagcctgtatataaatcttttgaaaaaaaattgtcctagcccttctctgcgatgctggaagtagaagattgcgtctcagatggagacgcagtactgttccagttttctttagccttttatttatttagttattctgggtatttcctatgtaattttgaagtgtgtagagtatattatagtaactgaagctgcagctgtaagaagctgagtgaaagaaaaaatactgtaagacatccttaaagtttttatttgtttgggtactgtatatgagatcaggaaaaagaaaaatgtcccacagccacattggaaatacaggttcttgtccccaaattaggttagttcccagattttagatcaaaactgttaattcattaaaaccccttttaaaaggtaaattctactgttgtaattccgatagtctttttcccacaaatatcagaaatatatttatttaattctgtcagatgagctttctaccgatgccatgtcccaaagccatgttaaaataattcccacgttatcattgtgattctacttcctgccactaaaattgctggagaaacaaaataatgatggaacactatgaacaaaaaggagcatctgaactggtctggttatttagaatccaatgtgttcaaatccttttgttttcttattaagtcagatgctactgtaagtcagataaaattttgtttgcactctgcagtctttggctcaatgtatggaaatgtttgcacctatgtaaagtcacaagctaattacaaattgctacagaacaggagtaagctgaaaactgaatgccatgttttgtttataaggtggggaggggagggaaaataccaaaaaactctgttccaagtttggcatttgacattaatgtgaagcagtgggaccatgctgcctgctaaactactgtatgaatcgtaaatgttctgaagacgagcagctggaggctggaggatggcattccatacagcaaaggagaagcacccaccacttcatctgggaaaaggaaggaaattgcaggaggcctggagccatcatttgtaaaggggatgttgcggggtgtgatgctgttgaggagattcaccttcaattgcactgctccacagagccctcatataaggccaatcctaatgggctacctcggctttaaaagttaatttcagtaagtcctgtttcaaaagtttgtctttttttgcttctaccttcagtgccactattttccactgcagtgttttgacttcacaaactgcctcctccagagagaacaatgtattgctgaaaatgggcagtagaagcaaatgctgttgttacatttgacctataaagtattcagagtgactgctaggtagaaattaaaacttagctttcccaaatagctccttattttgcaccttataaaaagtatactaattgttaattagatgttgcttttgtttatacaagcattcccaaagaactagatttggattttgttttgagtttttggatttttaaaaattatcttatttagattgactaacagcatacttacaattttaaaagaagctgttgttcagttcatcttaccagatgtgtctggcgaagtattcagggtttgatggactgctttactttcgtttggaagtgatagctaagtttattatactctatattaaacaactttgttcatttcactgaggaccttatcttccttatatttcagaacaaagaagcaacaagcgtgaataaaaagacaaatgtatttgactccctcataatccccatctgtatgtgctacccttccttcaaatatataaatgtgcatctttttttttaaaaaaaaaaaaaaaaaggttcctcttctggccaaatttgatctatggtggtatgattcatactgttaaattgagagaggaaaccttgtggttaaaaattatatggctgctgttttctttttgcagtcagtggtcaaaactgatcatgtgcttaaatcgatttttatgcacagaactagttattgtgaacattactgctccctccaaagatttcctgataacttgggccagaggtggttactgagtaacaaggatctaattcaatgcctcaaaactcttccacccacaatgcaaatcttacctcacaagctctaacctaaatcacagagacatgcatgtttcatgcattaacactgatttcgctctgtggcccaccagaggggtgggctcatgtcccctgactcctcacatgagtgcctcagctctaagagccgtggaacggggggtagggaaggtttgcgatctggagctcagcaactggctcagcaacgttttctccatttcattagcactaaacaagtctcttgctctcaggaatttgtcagaaaaaagaataaaatcacctgagactccacataccagattataaactcttctcgtaggtttgaattgcttactcacatgtcataaattaaccacagcttcatttgaccaccaggtctaaagtctgttgacagtttcagcatgactgaatcgctcattttttttttttgctttcagaaattggcttggttctctttagagttggtgtaaacatgccatgtaataaatgatttccacttaatggtacaacagaattattgctttcttagatgtatgtgtagtaaaagtcaatatacacatttatataatttctttcttcaaaatcttatacctaatttgatatttctaaaaattgcacatgtaagtcatgtgtataacatgctaaagtactttaactgtgatcttaaaactgaataaaaatatttaataaaactttgaa

SEQ ID NO: 314066 - DNA, 8913 bp, Homo sapiens
  misc_feature (1)..(2): n is a, c, g, or t
  misc_feature (4)..(4): n is a, c, g, or t
nngngtgttttcagtctctccgggttgcatgtactgtatgtggagcagtgtacagtgaagcggaggcagagcggctccgcgagcttctctccactttcccatagagaaaccctgactggccgctgagggctagctacacacacgccctcacgcccggcgagcccgcgaggtcactatcatatgacaaaggctttgccgcagttcatcttcctccctgtgtactttccatttgccttcctgggaatatccttggaattaatatacctggaacaattctttctgcagttaaagattggtgcctggccagaaatgcctgtgaaacagctgtggtttaagcttcaactgtaaaagacagacggaatcctgctgcatcacagaagctggaagttctgatgttccactgaaatcacaatggaaagtcttgacttgactggtcacagtaatgaaaggcagtaatagaaataaggatcattcagcagaaggagaaggggttggaaaacgaccaaaacgaaagtgtcttcagtggcatccattgctagcaaagaaacttcttgatttttcagaagaggaagaagaggaagacgaagaggaggatattgataaggttcaacttcttggggccgatggcctagagcaagatgttggtgaaactgaagatgatgaatcaccagagcagcgagcccggagaccaatgaatgcatttcttttattttgcaaacgccatcgctctcttgtacgtcaggaacaccccaggcttgataaccgaggtgctaccaagatactagctgattggtgggctgttcttgatccaaaggaaaagcagaaatacacagacatggccaaggagtataaggatgcatttatgaaagcaaatcctggctacaaatggtgtcctaccacaaacaagcctgtgaaatccccaacacccactgtcaatccacgaaagaaactttgggccttcccatctgactcttcaagagacttgccaagccccaagaaagcaaagactgaagaaatgcctcagcttaactttggaatggctgatcctactcaaatgggaggcctgagtatgctgctgttagctggagaacatgctcttggcacaccagaggtatcctctggcacatgcaggcctgatgtttcagaatctcctgaattacgtcagaagtcaccattgtttcagtttgccgagatatcttcaagtacgtcccactctgatgcttctacaaagcagtgtcaaacatctgccttgtttcagtttgcagagatttcttcaaacacttcgcagttgggtggtgctgagcctgtaaaacgctgtggaaagtctgcactctttcaactggcagagatgtgcctggcatcagaagggatgaaaatggaagaatcaaagctaataaaagcaaaagaatccgatggtggaagaattaaagaattagagaagggaaaggaagaaaaagaaattaaaatggagaaaacagatgaaactaggttacagaaggaagcagaatttgaaaaatcggctaaggaaaatttaagagattctaaggaattgagaaattttgaggcattgcaaatagatgacataatggctataaaaatggaagatcccaaagaaattagaaaggaagagttagaagaagatcacaaatgtagtcattttcctgatttttcttattctgccagtagcaagataataattagtgatgttcccagtagaaaggatcatatgtgccatcctcatggaattatgatcattgaggatcccgcagcattaaacaagccagaaaagctaaaaaagaaaaagaagaaaagcaaaatggatcgacatggaaatgataaatccacacccaagaagacttgcaaaaagaggcagtcttcggaatctgacattgagagcgtcatatataccattgaagccgtcgcaaaaggagactggggcatagagaaacttggagatacccctcgcaagaaggtccgcacatcctcaagtggcaagggaagcattttggatgccaagccaccaaagaaaaaagtgaaatcaagagagaagaaaatgtcaaaggagaaatcctcagacaccaccaaagagtcaagacctccagatttcattagtatttctgctagcaagaacatttctggtgagacaccagagggtataaaagcagaaccattgacccctatggaagatgcactaccacccagcctatcaggacaggccaagcctgaggacagtgactgtcacagaaaaatagaaacttgtggttccaggaaatccgagaggtcttgcaaaggtgctctttataaaaccctggtgtctgagggcatgctcacctctctgcgagctaatgttgacagaggaaaacgaagctcaggaaaaggaaactcctctgatcatgaagggtgttggaatgaagaaagctggacatttagtcagagtgggaccagtgggagcaagaagttcaagaagacaaagccaaaagaagactgtctccttggctccgcaaagctggatgaagaatttgaaaaaaaattcaacagcctccctcaatatagtcctgttacatttgaccggaaatgtgtacctgtcccaagaaaaaagaagaagactggaaatgtgtcctcagaaccgactaaaaccagcaaaggaagtggggataaatggtcaaacaagcaactcttcttggatgccattcaccctacagaagccatattttcagaagacagaaacaccatggagcctgttcataaggttaaaaatatcccatccattttcaacactccagagccaacaacaacgcaagaacctttggtgggcagccaaaagagaaaagcaaggaaaaccaagattacacaccttgtcaggacagcagatggccgggtatcaccagcaggaggtactttggatgacaaaccaaaggaacaactgcagaggagtctccctaaagcaactgagacagactgcaatgacaaatgctcacacaacaccgaggtcggggagacgcggagcagtactccagaaatgcctgccgtgtctgcgttctttagcctcgctgcgctggctgaagtggcagccatggaaaatgtgcacagaggtcagaggtcaactccgctcacccatgatggacagccaaaagaaatgccgcaggctcctgtacttatttcctgcgctgaccagtgaagcgccctttcattgtaaaacattgtgctttacctactaccctagccttgtctttaccgagggatgctagtgagtccaagtggtggaaaatatagactgcaaacaagtgcttgttgccccacacggcccagattcacttgaagcagaagttagcatcctgggccagtttgttctctcagaacccagaatctttgagggtaaggttatctgtctgatactgagcagaaacagaatgatcctggagctttgctttctattgaaggcttttgacggtaataggtggtaacttggtaaaaggctgcctttactgtagctcacccagcatctcttttaccaaccagagagtgtgaaactagtttcatatattacctagttattctttcaaaacaaaacaaaaaaaaaacaaaaactgacgcactgcactagttattattagatattcttagtcttttttgtacatggagatttaagtttaagatggtttatataataggttatacctacatttatattgtagaataaatattaaaaagcctgttccagagactcccaagcagcctgggcaggcagatgtaccattgttagtggtgtatgctcggcctcgtggtccatatattctgcacttttatatttgccaccagaatggtagtttgctggcaaaaaaaaaaaaaagagagagagaaaaaattacaactcttacaatctgaatttttttcttagccttgagtgaccaagaagaatttgcttgaggcaaattgtggcaaatattttcccagacaggggaagagtcctgcagattacagattactggtgttttcatgccttgaggattcttttatttttacataggggtctaagtgaccaatggattgttcatacaaacaaaaaaaaagacaaaaatattattcagaagtgaccttagtattacttcactattctaaacacattgaagacactcacttcatgtggacttggagctacagaccttttacatccatcacagattggctggacgggttgcaattgctatgcacagcctgattggcactgcaggtttttagagccattttgagtttgtgttgtttaggaggtactgagtcaatgatgagggaggtatgcctgaccagagtgggactctcagtcatagatccacctgcaagtctctgtttcctttttgtgttttgttgcttttgaacataaaaccaaccatacataagcagcgccaagtggattaactggcttagaacattcaacatattgacttaaccacctgacattcacagtgtcttgtttcctagcaacagatgcaaagtgataaatcaaaattagtctgaggctacagattttacagggtatttgttctatagcacaaagtatttccccactcttgcgtcacagcacaaactaccaaattttaattattggattccagcaataatttttaatggttttcaaactggcggaattttgacagtgctagttcgagtttgaagcttttgaattagatctctaaatggtgacagtttacatggttttatctagctttcttatttatacttgactgaattgtaatgattttttttctaattgtaatttgacgtaatagccatacaaaaaatgactctattcatactaggtttagcttctcatggttgtagatattacttcagttccggtgctggaaaatatgtacaacatactaacaggattgaaaaaaaaatagaggtttttcttcttgtttttttttccaaagcaggtaaagagggtagcaaagcatcggaatgatgtgctcaaaaatgcatattcctggtggggatggaggaagaaggcattagtaaaaggttaatcaaacgttacaacttaaccccattcatgtaggaataaatcaagtgagcagttccagacttttgcataatatttttactatgatgctgttttattaatattttctaaatttcaaaacaaaaagtgaatgtttgaaattgctgggtcccgatgttggtggctgttggagttttggaccactcgctagcagtgatttgaagattataattagctaaaatccaaaacaaaaaaccaacaacaaaaattgtatggtgcggaacatgcaccttgacaatggtactaacttgttattctatagaacacgttagaatagatctatttttgccagagcaccctccttcagtcctccgattacatttcactagagttccttacgagattgctgtatattcctgggacctttttttaaaaaaaaaaaaagcaaaacaaaagattactttttttctatgtgattaatatcttacttgatctgcttttcctaaacctcagtggcttttcccttaggcagggttgggggtgggagggcaacttactggagatgactgttttcagatactttaaaacaaacctttttgtagaaatgcttaatttttaagcggttaggcactgagagtagcagaaatcctgcaaagctttatagttccttagactcaccttgtcgattctctgagtaaagtcttgatttcaataattgtgcttctcatgccctgaatctgctggagaggagtgttgttattttcaggtaacaacattcgttagcacaaatatttcagaccaatattagtgctctccaccccaccttttgttatcattttcatttcatttctctcattcttttttattttggaaaatcatattgctatagtgtgtactttaatctgccagcagataccatctacactaacatttgtcccacagcatcctcaagagaaaaagttgttgcaccttatatatatctcaagcaaaccaaaatatgatgctcttctgctttgttttattctaaattgttgtatcatatctttctgaaaccattctgaatttagttgaaattatcaatatttatgcttttaaccttaatttctggattcaagcctgtatataaatcttttgaaaaaaaattgtcctagcccttctctgcgatgctggaagtagaagattgcgtctcagatggagacgcagtactgttccagttttctttagccttttatttatttagttattctgggtatttcctatgtaattttgaagtgtgtagagtatattatagtaactgaagctgcagctgtaagaagctgagtgaaagaaaaaatactgtaagacatccttaaagtttttatttgtttgggtactgtatatgagatcaggaaaaagaaaaatgtcccacagccacattggaaatacaggttcttgtccccaaattaggttagttcccagattttagatcaaaactgttaattcattaaaaccccttttaaaaggtaaattctactgttgtaattccgatagtctttttcccacaaatatcagaaatatatttatttaattctgtcagatgagctttctaccgatgccatgtcccaaagccatgttaaaataattcccacgttatcattgtgattctacttcctgccactaaaattgctggagaaacaaaataatgatggaacactatgaacaaaaaggagcatctgaactggtctggttatttagaatccaatgtgttcaaatccttttgttttcttattaagtcagatgctactgtaagtcagataaaattttgtttgcactctgcagtctttggctcaatgtatggaaatgtttgcacctatgtaaagtcacaagctaattacaaattgctacagaacaggagtaagctgaaaactgaatgccatgttttgtttataaggtggggaggggagggaaaataccaaaaaactctgttccaagtttggcatttgacattaatgtgaagcagtgggaccatgctgcctgctaaactactgtatgaatcgtaaatgttctgaagacgagcagctggaggctggaggatggcattccatacagcaaaggagaagcacccaccacttcatctgggaaaaggaaggaaattgcaggaggcctggagccatcatttgtaaaggggatgttgcggggtgtgatgctgttgaggagattcaccttcaattgcactgctccacagagccctcatataaggccaatcctaatgggctacctcggctttaaaagttaatttcagtaagtcctgtttcaaaagtttgtctttttttgcttctaccttcagtgccactattttccactgcagtgttttgacttcacaaactgcctcctccagagagaacaatgtattgctgaaaatgggcagtagaagcaaatgctgttgttacatttgacctataaagtattcagagtgactgctaggtagaaattaaaacttagctttcccaaatagctccttattttgcaccttataaaaagtatactaattgttaattagatgttgcttttgtttatacaagcattcccaaagaactagatttggattttgttttgagtttttggatttttaaaaattatcttatttagattgactaacagcatacttacaattttaaaagaagctgttgttcagttcatcttaccagatgtgtctggcgaagtattcagggtttgatggactgctttactttcgtttggaagtgatagctaagtttattatactctatattaaacaactttgttcatttcactgaggaccttatcttccttatatttcagaacaaagaagcaacaagcgtgaataaaaagacaaatgtatttgactccctcataatccccatctgtatgtgctacccttccttcaaatatataaatgtgcatctttttttttaaaaaaaaaaaaaaaaaggttcctcttctggccaaatttgatctatggtggtatgattcatactgttaaattgagagaggaaaccttgtggttaaaaattatatggctgctgttttctttttgcagtcagtggtcaaaactgatcatgtgcttaaatcgatttttatgcacagaactagttattgtgaacattactgctccctccaaagatttcctgataacttgggccagaggtggttactgagtaacaaggatctaattcaatgcctcaaaactcttccacccacaatgcaaatcttacctcacaagctctaacctaaatcacagagacatgcatgtttcatgcattaacactgatttcgctctgtggcccaccagaggggtgggctcatgtcccctgactcctcacatgagtgcctcagctctaagagccgtggaacggggggtagggaaggtttgcgatctggagctcagcaactggctcagcaacgttttctccatttcattagcactaaacaagtctcttgctctcaggaatttgtcagaaaaaagaataaaatcacctgagactccacataccagattataaactcttctcgtaggtttgaattgcttactcacatgtcataaattaaccacagcttcatttgaccaccaggtctaaagtctgttgacagtttcagcatgactgaatcgctcattttttttttttgctttcagaaattggcttggttctctttagagttggtgtaaacatgccatgtaataaatgatttccacttaatggtacaacagaattattgctttcttagatgtatgtgtagtaaaagtcaatatacacatttatataatttctttcttcaaaatcttatacctaatttgatatttctaaaaattgcacatgtaagtcatgtgtataacatgctaaagtactttaactgtgatcttaaaactgaataaaaatatttaataaaactttgaa

SEQ ID NO: 314067 - DNA, 8587 bp, Homo sapiens
cagattgacagagattcatacaaggaaggaaagaatcctgctgcatcacagaagctggaagttctgatgttccactgaaatcacaatggaaagtcttgacttgactggtcacagtaatgaaaggcagtaatagaaataaggatcattcagcagaaggagaaggggttggaaaacgaccaaaacgaaagtgtcttcagtggcatccattgctagcaaagaaacttcttgatttttcagaagaggaagaagaggaagacgaagaggaggatattgataaggttcaacttcttggggccgatggcctagagcaagatgttggtgaaactgaagatgatgaatcaccagagcagcgagcccggagaccaatgaatgcatttcttttattttgcaaacgccatcgctctcttgtacgtcaggaacaccccaggcttgataaccgaggtgctaccaagatactagctgattggtgggctgttcttgatccaaaggaaaagcagaaatacacagacatggccaaggagtataaggatgcatttatgaaagcaaatcctggctacaaatggtgtcctaccacaaacaagcctgtgaaatccccaacacccactgtcaatccacgaaagaaactttgggccttcccatctgactcttcaagagacttgccaagccccaagaaagcaaagactgaagaaatgcctcagcttaactttggaatggctgatcctactcaaatgggaggcctgagtatgctgctgttagctggagaacatgctcttggcacaccagaggtatcctctggcacatgcaggcctgatgtttcagaatctcctgaattacgtcagaagtcaccattgtttcagtttgccgagatatcttcaagtacgtcccactctgatgcttctacaaagcagtgtcaaacatctgccttgtttcagtttgcagagatttcttcaaacacttcgcagttgggtggtgctgagcctgtaaaacgctgtggaaagtctgcactctttcaactggcagagatgtgcctggcatcagaagggatgaaaatggaagaatcaaagctaataaaagcaaaagaatccgatggtggaagaattaaagaattagagaagggaaaggaagaaaaagaaattaaaatggagaaaacagatgaaactaggttacagaaggaagcagaatttgaaaaatcggctaaggaaaatttaagagattctaaggaattgagaaattttgaggcattgcaaatagatgacataatggctataaaaatggaagatcccaaagaaattagaaaggaagagttagaagaagatcacaaatgtagtcattttcctgatttttcttattctgccagtagcaagataataattagtgatgttcccagtagaaaggatcatatgtgccatcctcatggaattatgatcattgaggatcccgcagcattaaacaagccagaaaagctaaaaaagaaaaagaagaaaagcaaaatggatcgacatggaaatgataaatccacacccaagaagacttgcaaaaagaggcagtcttcggaatctgacattgagagcgtcatatataccattgaagccgtcgcaaaaggagactggggcatagagaaacttggagatacccctcgcaagaaggtccgcacatcctcaagtggcaagggaagcattttggatgccaagccaccaaagaaaaaagtgaaatcaagagagaagaaaatgtcaaaggagaaatcctcagacaccaccaaagagtcaagacctccagatttcattagtatttctgctagcaagaacatttctggtgagacaccagagggtataaaagcagaaccattgacccctatggaagatgcactaccacccagcctatcaggacaggccaagcctgaggacagtgactgtcacagaaaaatagaaacttgtggttccaggaaatccgagaggtcttgcaaaggtgctctttataaaaccctggtgtctgagggcatgctcacctctctgcgagctaatgttgacagaggaaaacgaagctcaggaaaaggaaactcctctgatcatgaagggtgttggaatgaagaaagctggacatttagtcagagtgggaccagtgggagcaagaagttcaagaagacaaagccaaaagaagactgtctccttggctccgcaaagctggatgaagaatttgaaaaaaaattcaacagcctccctcaatatagtcctgttacatttgaccggaaatgtgtacctgtcccaagaaaaaagaagaagactggaaatgtgtcctcagaaccgactaaaaccagcaaaggaagtggggataaatggtcaaacaagcaactcttcttggatgccattcaccctacagaagccatattttcagaagacagaaacaccatggagcctgttcataaggttaaaaatatcccatccattttcaacactccagagccaacaacaacgcaagaacctttggtgggcagccaaaagagaaaagcaaggaaaaccaagattacacaccttgtcaggacagcagatggccgggtatcaccagcaggaggtactttggatgacaaaccaaaggaacaactgcagaggagtctccctaaagcaactgagacagactgcaatgacaaatgctcacacaacaccgaggtcggggagacgcggagcagtactccagaaatgcctgccgtgtctgcgttctttagcctcgctgcgctggctgaagtggcagccatggaaaatgtgcacagaggtcagaggtcaactccgctcacccatgatggacagccaaaagaaatgccgcaggctcctgtacttatttcctgcgctgaccagtgaagcgccctttcattgtaaaacattgtgctttacctactaccctagccttgtctttaccgagggatgctagtgagtccaagtggtggaaaatatagactgcaaacaagtgcttgttgccccacacggcccagattcacttgaagcagaagttagcatcctgggccagtttgttctctcagaacccagaatctttgagggtaaggttatctgtctgatactgagcagaaacagaatgatcctggagctttgctttctattgaaggcttttgacggtaataggtggtaacttggtaaaaggctgcctttactgtagctcacccagcatctcttttaccaaccagagagtgtgaaactagtttcatatattacctagttattctttcaaaacaaaacaaaaaaaaaacaaaaactgacgcactgcactagttattattagatattcttagtcttttttgtacatggagatttaagtttaagatggtttatataataggttatacctacatttatattgtagaataaatattaaaaagcctgttccagagactcccaagcagcctgggcaggcagatgtaccattgttagtggtgtatgctcggcctcgtggtccatatattctgcacttttatatttgccaccagaatggtagtttgctggcaaaaaaaaaaaaaagagagagagaaaaaattacaactcttacaatctgaatttttttcttagccttgagtgaccaagaagaatttgcttgaggcaaattgtggcaaatattttcccagacaggggaagagtcctgcagattacagattactggtgttttcatgccttgaggattcttttatttttacataggggtctaagtgaccaatggattgttcatacaaacaaaaaaaaagacaaaaatattattcagaagtgaccttagtattacttcactattctaaacacattgaagacactcacttcatgtggacttggagctacagaccttttacatccatcacagattggctggacgggttgcaattgctatgcacagcctgattggcactgcaggtttttagagccattttgagtttgtgttgtttaggaggtactgagtcaatgatgagggaggtatgcctgaccagagtgggactctcagtcatagatccacctgcaagtctctgtttcctttttgtgttttgttgcttttgaacataaaaccaaccatacataagcagcgccaagtggattaactggcttagaacattcaacatattgacttaaccacctgacattcacagtgtcttgtttcctagcaacagatgcaaagtgataaatcaaaattagtctgaggctacagattttacagggtatttgttctatagcacaaagtatttccccactcttgcgtcacagcacaaactaccaaattttaattattggattccagcaataatttttaatggttttcaaactggcggaattttgacagtgctagttcgagtttgaagcttttgaattagatctctaaatggtgacagtttacatggttttatctagctttcttatttatacttgactgaattgtaatgattttttttctaattgtaatttgacgtaatagccatacaaaaaatgactctattcatactaggtttagcttctcatggttgtagatattacttcagttccggtgctggaaaatatgtacaacatactaacaggattgaaaaaaaaatagaggtttttcttcttgtttttttttccaaagcaggtaaagagggtagcaaagcatcggaatgatgtgctcaaaaatgcatattcctggtggggatggaggaagaaggcattagtaaaaggttaatcaaacgttacaacttaaccccattcatgtaggaataaatcaagtgagcagttccagacttttgcataatatttttactatgatgctgttttattaatattttctaaatttcaaaacaaaaagtgaatgtttgaaattgctgggtcccgatgttggtggctgttggagttttggaccactcgctagcagtgatttgaagattataattagctaaaatccaaaacaaaaaaccaacaacaaaaattgtatggtgcggaacatgcaccttgacaatggtactaacttgttattctatagaacacgttagaatagatctatttttgccagagcaccctccttcagtcctccgattacatttcactagagttccttacgagattgctgtatattcctgggacctttttttaaaaaaaaaaaaagcaaaacaaaagattactttttttctatgtgattaatatcttacttgatctgcttttcctaaacctcagtggcttttcccttaggcagggttgggggtgggagggcaacttactggagatgactgttttcagatactttaaaacaaacctttttgtagaaatgcttaatttttaagcggttaggcactgagagtagcagaaatcctgcaaagctttatagttccttagactcaccttgtcgattctctgagtaaagtcttgatttcaataattgtgcttctcatgccctgaatctgctggagaggagtgttgttattttcaggtaacaacattcgttagcacaaatatttcagaccaatattagtgctctccaccccaccttttgttatcattttcatttcatttctctcattcttttttattttggaaaatcatattgctatagtgtgtactttaatctgccagcagataccatctacactaacatttgtcccacagcatcctcaagagaaaaagttgttgcaccttatatatatctcaagcaaaccaaaatatgatgctcttctgctttgttttattctaaattgttgtatcatatctttctgaaaccattctgaatttagttgaaattatcaatatttatgcttttaaccttaatttctggattcaagcctgtatataaatcttttgaaaaaaaattgtcctagcccttctctgcgatgctggaagtagaagattgcgtctcagatggagacgcagtactgttccagttttctttagccttttatttatttagttattctgggtatttcctatgtaattttgaagtgtgtagagtatattatagtaactgaagctgcagctgtaagaagctgagtgaaagaaaaaatactgtaagacatccttaaagtttttatttgtttgggtactgtatatgagatcaggaaaaagaaaaatgtcccacagccacattggaaatacaggttcttgtccccaaattaggttagttcccagattttagatcaaaactgttaattcattaaaaccccttttaaaaggtaaattctactgttgtaattccgatagtctttttcccacaaatatcagaaatatatttatttaattctgtcagatgagctttctaccgatgccatgtcccaaagccatgttaaaataattcccacgttatcattgtgattctacttcctgccactaaaattgctggagaaacaaaataatgatggaacactatgaacaaaaaggagcatctgaactggtctggttatttagaatccaatgtgttcaaatccttttgttttcttattaagtcagatgctactgtaagtcagataaaattttgtttgcactctgcagtctttggctcaatgtatggaaatgtttgcacctatgtaaagtcacaagctaattacaaattgctacagaacaggagtaagctgaaaactgaatgccatgttttgtttataaggtggggaggggagggaaaataccaaaaaactctgttccaagtttggcatttgacattaatgtgaagcagtgggaccatgctgcctgctaaactactgtatgaatcgtaaatgttctgaagacgagcagctggaggctggaggatggcattccatacagcaaaggagaagcacccaccacttcatctgggaaaaggaaggaaattgcaggaggcctggagccatcatttgtaaaggggatgttgcggggtgtgatgctgttgaggagattcaccttcaattgcactgctccacagagccctcatataaggccaatcctaatgggctacctcggctttaaaagttaatttcagtaagtcctgtttcaaaagtttgtctttttttgcttctaccttcagtgccactattttccactgcagtgttttgacttcacaaactgcctcctccagagagaacaatgtattgctgaaaatgggcagtagaagcaaatgctgttgttacatttgacctataaagtattcagagtgactgctaggtagaaattaaaacttagctttcccaaatagctccttattttgcaccttataaaaagtatactaattgttaattagatgttgcttttgtttatacaagcattcccaaagaactagatttggattttgttttgagtttttggatttttaaaaattatcttatttagattgactaacagcatacttacaattttaaaagaagctgttgttcagttcatcttaccagatgtgtctggcgaagtattcagggtttgatggactgctttactttcgtttggaagtgatagctaagtttattatactctatattaaacaactttgttcatttcactgaggaccttatcttccttatatttcagaacaaagaagcaacaagcgtgaataaaaagacaaatgtatttgactccctcataatccccatctgtatgtgctacccttccttcaaatatataaatgtgcatctttttttttaaaaaaaaaaaaaaaaaggttcctcttctggccaaatttgatctatggtggtatgattcatactgttaaattgagagaggaaaccttgtggttaaaaattatatggctgctgttttctttttgcagtcagtggtcaaaactgatcatgtgcttaaatcgatttttatgcacagaactagttattgtgaacattactgctccctccaaagatttcctgataacttgggccagaggtggttactgagtaacaaggatctaattcaatgcctcaaaactcttccacccacaatgcaaatcttacctcacaagctctaacctaaatcacagagacatgcatgtttcatgcattaacactgatttcgctctgtggcccaccagaggggtgggctcatgtcccctgactcctcacatgagtgcctcagctctaagagccgtggaacggggggtagggaaggtttgcgatctggagctcagcaactggctcagcaacgttttctccatttcattagcactaaacaagtctcttgctctcaggaatttgtcagaaaaaagaataaaatcacctgagactccacataccagattataaactcttctcgtaggtttgaattgcttactcacatgtcataaattaaccacagcttcatttgaccaccaggtctaaagtctgttgacagtttcagcatgactgaatcgctcattttttttttttgctttcagaaattggcttggttctctttagagttggtgtaaacatgccatgtaataaatgatttccacttaatggtacaacagaattattgctttcttagatgtatgtgtagtaaaagtcaatatacacatttatataatttctttcttcaaaatcttatacctaatttgatatttctaaaaattgcacatgtaagtcatgtgtataacatgctaaagtactttaactgtgatcttaaaactgaataaaaatatttaataaaactttgaa

SEQ ID NO: 314068 - DNA, 6954 bp, Homo sapiens
gaacaagtacatgtaaatgaaaatataggtacccctgagcctggagagcaccaagaggccaagaaatcatgagaactcatcaaatgagaagaaaatgtcaaaggagaaatcctcagacaccaccaaagagtcaagacctccagatttcattagtatttctgctagcaagaacatttctggtgagacaccagagggtataaaagcagaaccattgacccctatggaagatgcactaccacccagcctatcaggacaggccaagcctgaggacagtgactgtcacagaaaaatagaaacttgtggttccaggaaatccgagaggtcttgcaaaggtgctctttataaaaccctggtgtctgagggcatgctcacctctctgcgagctaatgttgacagaggaaaacgaagctcaggaaaaggaaactcctctgatcatgaagggtgttggaatgaagaaagctggacatttagtcagagtgggaccagtgggagcaagaagttcaagaagacaaagccaaaagaagactgtctccttggctccgcaaagctggatgaagaatttgaaaaaaaattcaacagcctccctcaatatagtcctgttacatttgaccggaaatgtgtacctgtcccaagaaaaaagaagaagactggaaatgtgtcctcagaaccgactaaaaccagcaaaggaagtggggataaatggtcaaacaagcaactcttcttggatgccattcaccctacagaagccatattttcagaagacagaaacaccatggagcctgttcataaggttaaaaatatcccatccattttcaacactccagagccaacaacaacgcaagaacctttggtgggcagccaaaagagaaaagcaaggaaaaccaagattacacaccttgtcaggacagcagatggccgggtatcaccagcaggaggtactttggatgacaaaccaaaggaacaactgcagaggagtctccctaaagcaactgagacagactgcaatgacaaatgctcacacaacaccgaggtcggggagacgcggagcagtactccagaaatgcctgccgtgtctgcgttctttagcctcgctgcgctggctgaagtggcagccatggaaaatgtgcacagaggtcagaggtcaactccgctcacccatgatggacagccaaaagaaatgccgcaggctcctgtacttatttcctgcgctgaccagtgaagcgccctttcattgtaaaacattgtgctttacctactaccctagccttgtctttaccgagggatgctagtgagtccaagtggtggaaaatatagactgcaaacaagtgcttgttgccccacacggcccagattcacttgaagcagaagttagcatcctgggccagtttgttctctcagaacccagaatctttgagggtaaggttatctgtctgatactgagcagaaacagaatgatcctggagctttgctttctattgaaggcttttgacggtaataggtggtaacttggtaaaaggctgcctttactgtagctcacccagcatctcttttaccaaccagagagtgtgaaactagtttcatatattacctagttattctttcaaaacaaaacaaaaaaaaaacaaaaactgacgcactgcactagttattattagatattcttagtcttttttgtacatggagatttaagtttaagatggtttatataataggttatacctacatttatattgtagaataaatattaaaaagcctgttccagagactcccaagcagcctgggcaggcagatgtaccattgttagtggtgtatgctcggcctcgtggtccatatattctgcacttttatatttgccaccagaatggtagtttgctggcaaaaaaaaaaaaaagagagagagaaaaaattacaactcttacaatctgaatttttttcttagccttgagtgaccaagaagaatttgcttgaggcaaattgtggcaaatattttcccagacaggggaagagtcctgcagattacagattactggtgttttcatgccttgaggattcttttatttttacataggggtctaagtgaccaatggattgttcatacaaacaaaaaaaaagacaaaaatattattcagaagtgaccttagtattacttcactattctaaacacattgaagacactcacttcatgtggacttggagctacagaccttttacatccatcacagattggctggacgggttgcaattgctatgcacagcctgattggcactgcaggtttttagagccattttgagtttgtgttgtttaggaggtactgagtcaatgatgagggaggtatgcctgaccagagtgggactctcagtcatagatccacctgcaagtctctgtttcctttttgtgttttgttgcttttgaacataaaaccaaccatacataagcagcgccaagtggattaactggcttagaacattcaacatattgacttaaccacctgacattcacagtgtcttgtttcctagcaacagatgcaaagtgataaatcaaaattagtctgaggctacagattttacagggtatttgttctatagcacaaagtatttccccactcttgcgtcacagcacaaactaccaaattttaattattggattccagcaataatttttaatggttttcaaactggcggaattttgacagtgctagttcgagtttgaagcttttgaattagatctctaaatggtgacagtttacatggttttatctagctttcttatttatacttgactgaattgtaatgattttttttctaattgtaatttgacgtaatagccatacaaaaaatgactctattcatactaggtttagcttctcatggttgtagatattacttcagttccggtgctggaaaatatgtacaacatactaacaggattgaaaaaaaaatagaggtttttcttcttgtttttttttccaaagcaggtaaagagggtagcaaagcatcggaatgatgtgctcaaaaatgcatattcctggtggggatggaggaagaaggcattagtaaaaggttaatcaaacgttacaacttaaccccattcatgtaggaataaatcaagtgagcagttccagacttttgcataatatttttactatgatgctgttttattaatattttctaaatttcaaaacaaaaagtgaatgtttgaaattgctgggtcccgatgttggtggctgttggagttttggaccactcgctagcagtgatttgaagattataattagctaaaatccaaaacaaaaaaccaacaacaaaaattgtatggtgcggaacatgcaccttgacaatggtactaacttgttattctatagaacacgttagaatagatctatttttgccagagcaccctccttcagtcctccgattacatttcactagagttccttacgagattgctgtatattcctgggacctttttttaaaaaaaaaaaaagcaaaacaaaagattactttttttctatgtgattaatatcttacttgatctgcttttcctaaacctcagtggcttttcccttaggcagggttgggggtgggagggcaacttactggagatgactgttttcagatactttaaaacaaacctttttgtagaaatgcttaatttttaagcggttaggcactgagagtagcagaaatcctgcaaagctttatagttccttagactcaccttgtcgattctctgagtaaagtcttgatttcaataattgtgcttctcatgccctgaatctgctggagaggagtgttgttattttcaggtaacaacattcgttagcacaaatatttcagaccaatattagtgctctccaccccaccttttgttatcattttcatttcatttctctcattcttttttattttggaaaatcatattgctatagtgtgtactttaatctgccagcagataccatctacactaacatttgtcccacagcatcctcaagagaaaaagttgttgcaccttatatatatctcaagcaaaccaaaatatgatgctcttctgctttgttttattctaaattgttgtatcatatctttctgaaaccattctgaatttagttgaaattatcaatatttatgcttttaaccttaatttctggattcaagcctgtatataaatcttttgaaaaaaaattgtcctagcccttctctgcgatgctggaagtagaagattgcgtctcagatggagacgcagtactgttccagttttctttagccttttatttatttagttattctgggtatttcctatgtaattttgaagtgtgtagagtatattatagtaactgaagctgcagctgtaagaagctgagtgaaagaaaaaatactgtaagacatccttaaagtttttatttgtttgggtactgtatatgagatcaggaaaaagaaaaatgtcccacagccacattggaaatacaggttcttgtccccaaattaggttagttcccagattttagatcaaaactgttaattcattaaaaccccttttaaaaggtaaattctactgttgtaattccgatagtctttttcccacaaatatcagaaatatatttatttaattctgtcagatgagctttctaccgatgccatgtcccaaagccatgttaaaataattcccacgttatcattgtgattctacttcctgccactaaaattgctggagaaacaaaataatgatggaacactatgaacaaaaaggagcatctgaactggtctggttatttagaatccaatgtgttcaaatccttttgttttcttattaagtcagatgctactgtaagtcagataaaattttgtttgcactctgcagtctttggctcaatgtatggaaatgtttgcacctatgtaaagtcacaagctaattacaaattgctacagaacaggagtaagctgaaaactgaatgccatgttttgtttataaggtggggaggggagggaaaataccaaaaaactctgttccaagtttggcatttgacattaatgtgaagcagtgggaccatgctgcctgctaaactactgtatgaatcgtaaatgttctgaagacgagcagctggaggctggaggatggcattccatacagcaaaggagaagcacccaccacttcatctgggaaaaggaaggaaattgcaggaggcctggagccatcatttgtaaaggggatgttgcggggtgtgatgctgttgaggagattcaccttcaattgcactgctccacagagccctcatataaggccaatcctaatgggctacctcggctttaaaagttaatttcagtaagtcctgtttcaaaagtttgtctttttttgcttctaccttcagtgccactattttccactgcagtgttttgacttcacaaactgcctcctccagagagaacaatgtattgctgaaaatgggcagtagaagcaaatgctgttgttacatttgacctataaagtattcagagtgactgctaggtagaaattaaaacttagctttcccaaatagctccttattttgcaccttataaaaagtatactaattgttaattagatgttgcttttgtttatacaagcattcccaaagaactagatttggattttgttttgagtttttggatttttaaaaattatcttatttagattgactaacagcatacttacaattttaaaagaagctgttgttcagttcatcttaccagatgtgtctggcgaagtattcagggtttgatggactgctttactttcgtttggaagtgatagctaagtttattatactctatattaaacaactttgttcatttcactgaggaccttatcttccttatatttcagaacaaagaagcaacaagcgtgaataaaaagacaaatgtatttgactccctcataatccccatctgtatgtgctacccttccttcaaatatataaatgtgcatctttttttttaaaaaaaaaaaaaaaaaggttcctcttctggccaaatttgatctatggtggtatgattcatactgttaaattgagagaggaaaccttgtggttaaaaattatatggctgctgttttctttttgcagtcagtggtcaaaactgatcatgtgcttaaatcgatttttatgcacagaactagttattgtgaacattactgctccctccaaagatttcctgataacttgggccagaggtggttactgagtaacaaggatctaattcaatgcctcaaaactcttccacccacaatgcaaatcttacctcacaagctctaacctaaatcacagagacatgcatgtttcatgcattaacactgatttcgctctgtggcccaccagaggggtgggctcatgtcccctgactcctcacatgagtgcctcagctctaagagccgtggaacggggggtagggaaggtttgcgatctggagctcagcaactggctcagcaacgttttctccatttcattagcactaaacaagtctcttgctctcaggaatttgtcagaaaaaagaataaaatcacctgagactccacataccagattataaactcttctcgtaggtttgaattgcttactcacatgtcataaattaaccacagcttcatttgaccaccaggtctaaagtctgttgacagtttcagcatgactgaatcgctcattttttttttttgctttcagaaattggcttggttctctttagagttggtgtaaacatgccatgtaataaatgatttccacttaatggtacaacagaattattgctttcttagatgtatgtgtagtaaaagtcaatatacacatttatataatttctttcttcaaaatcttatacctaatttgatatttctaaaaattgcacatgtaagtcatgtgtataacatgctaaagtactttaactgtgatcttaaaactgaataaaaatatttaataaaactttgaa

SEQ ID NO: 314069 - DNA, 6371 bp, Homo sapiens
tggagtcacagtccatctctgtttctcttccagagtcattgcttttattatcactaaattacctgaaggttaccaattactataggagaactttcccttcaggcaagtcaagaaaaggaatgtgtcatttttaataccaatggatcaacaggaaaattattgtccaagaaccccagtccttgattgaaattttcccacttcttaaagagttgccccaaatctgttggtacttaaaatttcatctcttcaaaatggaagtggttagttgtttgaggccagagggtatgctgttgagttgtatgaggggaattcagatataaaatcttaggaagggagacagaatgggaaggaggaaggggaaaaaaaggataaggaaggggacagaagagaaaaaactctaaagcaaaaacagttttcattaaatgatgtaagtaacagcagtaactgttaaacaagatattggaacacacttgttattcatcgtcctctcctgtctctaataacatatgctgaataagtgactttttcttccttttattttacagaggaggtcagaggtcaactccgctcacccatgatggacagccaaaagaaatgccgcaggctcctgtacttatttcctgcgctgaccagtgaagcgccctttcattgtaaaacattgtgctttacctactaccctagccttgtctttaccgagggatgctagtgagtccaagtggtggaaaatatagactgcaaacaagtgcttgttgccccacacggcccagattcacttgaagcagaagttagcatcctgggccagtttgttctctcagaacccagaatctttgagggtaaggttatctgtctgatactgagcagaaacagaatgatcctggagctttgctttctattgaaggcttttgacggtaataggtggtaacttggtaaaaggctgcctttactgtagctcacccagcatctcttttaccaaccagagagtgtgaaactagtttcatatattacctagttattctttcaaaacaaaacaaaaaaaaaacaaaaactgacgcactgcactagttattattagatattcttagtcttttttgtacatggagatttaagtttaagatggtttatataataggttatacctacatttatattgtagaataaatattaaaaagcctgttccagagactcccaagcagcctgggcaggcagatgtaccattgttagtggtgtatgctcggcctcgtggtccatatattctgcacttttatatttgccaccagaatggtagtttgctggcaaaaaaaaaaaaaagagagagagaaaaaattacaactcttacaatctgaatttttttcttagccttgagtgaccaagaagaatttgcttgaggcaaattgtggcaaatattttcccagacaggggaagagtcctgcagattacagattactggtgttttcatgccttgaggattcttttatttttacataggggtctaagtgaccaatggattgttcatacaaacaaaaaaaaagacaaaaatattattcagaagtgaccttagtattacttcactattctaaacacattgaagacactcacttcatgtggacttggagctacagaccttttacatccatcacagattggctggacgggttgcaattgctatgcacagcctgattggcactgcaggtttttagagccattttgagtttgtgttgtttaggaggtactgagtcaatgatgagggaggtatgcctgaccagagtgggactctcagtcatagatccacctgcaagtctctgtttcctttttgtgttttgttgcttttgaacataaaaccaaccatacataagcagcgccaagtggattaactggcttagaacattcaacatattgacttaaccacctgacattcacagtgtcttgtttcctagcaacagatgcaaagtgataaatcaaaattagtctgaggctacagattttacagggtatttgttctatagcacaaagtatttccccactcttgcgtcacagcacaaactaccaaattttaattattggattccagcaataatttttaatggttttcaaactggcggaattttgacagtgctagttcgagtttgaagcttttgaattagatctctaaatggtgacagtttacatggttttatctagctttcttatttatacttgactgaattgtaatgattttttttctaattgtaatttgacgtaatagccatacaaaaaatgactctattcatactaggtttagcttctcatggttgtagatattacttcagttccggtgctggaaaatatgtacaacatactaacaggattgaaaaaaaaatagaggtttttcttcttgtttttttttccaaagcaggtaaagagggtagcaaagcatcggaatgatgtgctcaaaaatgcatattcctggtggggatggaggaagaaggcattagtaaaaggttaatcaaacgttacaacttaaccccattcatgtaggaataaatcaagtgagcagttccagacttttgcataatatttttactatgatgctgttttattaatattttctaaatttcaaaacaaaaagtgaatgtttgaaattgctgggtcccgatgttggtggctgttggagttttggaccactcgctagcagtgatttgaagattataattagctaaaatccaaaacaaaaaaccaacaacaaaaattgtatggtgcggaacatgcaccttgacaatggtactaacttgttattctatagaacacgttagaatagatctatttttgccagagcaccctccttcagtcctccgattacatttcactagagttccttacgagattgctgtatattcctgggacctttttttaaaaaaaaaaaaagcaaaacaaaagattactttttttctatgtgattaatatcttacttgatctgcttttcctaaacctcagtggcttttcccttaggcagggttgggggtgggagggcaacttactggagatgactgttttcagatactttaaaacaaacctttttgtagaaatgcttaatttttaagcggttaggcactgagagtagcagaaatcctgcaaagctttatagttccttagactcaccttgtcgattctctgagtaaagtcttgatttcaataattgtgcttctcatgccctgaatctgctggagaggagtgttgttattttcaggtaacaacattcgttagcacaaatatttcagaccaatattagtgctctccaccccaccttttgttatcattttcatttcatttctctcattcttttttattttggaaaatcatattgctatagtgtgtactttaatctgccagcagataccatctacactaacatttgtcccacagcatcctcaagagaaaaagttgttgcaccttatatatatctcaagcaaaccaaaatatgatgctcttctgctttgttttattctaaattgttgtatcatatctttctgaaaccattctgaatttagttgaaattatcaatatttatgcttttaaccttaatttctggattcaagcctgtatataaatcttttgaaaaaaaattgtcctagcccttctctgcgatgctggaagtagaagattgcgtctcagatggagacgcagtactgttccagttttctttagccttttatttatttagttattctgggtatttcctatgtaattttgaagtgtgtagagtatattatagtaactgaagctgcagctgtaagaagctgagtgaaagaaaaaatactgtaagacatccttaaagtttttatttgtttgggtactgtatatgagatcaggaaaaagaaaaatgtcccacagccacattggaaatacaggttcttgtccccaaattaggttagttcccagattttagatcaaaactgttaattcattaaaaccccttttaaaaggtaaattctactgttgtaattccgatagtctttttcccacaaatatcagaaatatatttatttaattctgtcagatgagctttctaccgatgccatgtcccaaagccatgttaaaataattcccacgttatcattgtgattctacttcctgccactaaaattgctggagaaacaaaataatgatggaacactatgaacaaaaaggagcatctgaactggtctggttatttagaatccaatgtgttcaaatccttttgttttcttattaagtcagatgctactgtaagtcagataaaattttgtttgcactctgcagtctttggctcaatgtatggaaatgtttgcacctatgtaaagtcacaagctaattacaaattgctacagaacaggagtaagctgaaaactgaatgccatgttttgtttataaggtggggaggggagggaaaataccaaaaaactctgttccaagtttggcatttgacattaatgtgaagcagtgggaccatgctgcctgctaaactactgtatgaatcgtaaatgttctgaagacgagcagctggaggctggaggatggcattccatacagcaaaggagaagcacccaccacttcatctgggaaaaggaaggaaattgcaggaggcctggagccatcatttgtaaaggggatgttgcggggtgtgatgctgttgaggagattcaccttcaattgcactgctccacagagccctcatataaggccaatcctaatgggctacctcggctttaaaagttaatttcagtaagtcctgtttcaaaagtttgtctttttttgcttctaccttcagtgccactattttccactgcagtgttttgacttcacaaactgcctcctccagagagaacaatgtattgctgaaaatgggcagtagaagcaaatgctgttgttacatttgacctataaagtattcagagtgactgctaggtagaaattaaaacttagctttcccaaatagctccttattttgcaccttataaaaagtatactaattgttaattagatgttgcttttgtttatacaagcattcccaaagaactagatttggattttgttttgagtttttggatttttaaaaattatcttatttagattgactaacagcatacttacaattttaaaagaagctgttgttcagttcatcttaccagatgtgtctggcgaagtattcagggtttgatggactgctttactttcgtttggaagtgatagctaagtttattatactctatattaaacaactttgttcatttcactgaggaccttatcttccttatatttcagaacaaagaagcaacaagcgtgaataaaaagacaaatgtatttgactccctcataatccccatctgtatgtgctacccttccttcaaatatataaatgtgcatctttttttttaaaaaaaaaaaaaaaaaggttcctcttctggccaaatttgatctatggtggtatgattcatactgttaaattgagagaggaaaccttgtggttaaaaattatatggctgctgttttctttttgcagtcagtggtcaaaactgatcatgtgcttaaatcgatttttatgcacagaactagttattgtgaacattactgctccctccaaagatttcctgataacttgggccagaggtggttactgagtaacaaggatctaattcaatgcctcaaaactcttccacccacaatgcaaatcttacctcacaagctctaacctaaatcacagagacatgcatgtttcatgcattaacactgatttcgctctgtggcccaccagaggggtgggctcatgtcccctgactcctcacatgagtgcctcagctctaagagccgtggaacggggggtagggaaggtttgcgatctggagctcagcaactggctcagcaacgttttctccatttcattagcactaaacaagtctcttgctctcaggaatttgtcagaaaaaagaataaaatcacctgagactccacataccagattataaactcttctcgtaggtttgaattgcttactcacatgtcataaattaaccacagcttcatttgaccaccaggtctaaagtctgttgacagtttcagcatgactgaatcgctcattttttttttttgctttcagaaattggcttggttctctttagagttggtgtaaacatgccatgtaataaatgatttccacttaatggtacaacagaattattgctttcttagatgtatgtgtagtaaaagtcaatatacacatttatataatttctttcttcaaaatcttatacctaatttgatatttctaaaaattgcacatgtaagtcatgtgtataacatgctaaagtactttaactgtgatcttaaaactgaataaaaatatttaataaaactttgaa

SEQ ID NO: 314070 - DNA, 5926 bp, Homo sapiens
  misc_feature (18)..(18): n is a, c, g, or t
  misc_feature (20)..(20): n is a, c, g, or t
  misc_feature (24)..(24): n is a, c, g, or t
tttttttttttcctgttncncgcnttattgcatgcgcgtcaagggtttgttcgtgttgtgtcgtatcgtagatatggatctgatatgttagttagtgctactgaggtcagaggtcaactccgctcacccatgatggacagccaaaagaaatgccgcaggctcctgtacttatttcctgcgctgaccagtgaagcgccctttcattgtaaaacattgtgctttacctactaccctagccttgtctttaccgagggatgctagtgagtccaagtggtggaaaatatagactgcaaacaagtgcttgttgccccacacggcccagattcacttgaagcagaagttagcatcctgggccagtttgttctctcagaacccagaatctttgagggtaaggttatctgtctgatactgagcagaaacagaatgatcctggagctttgctttctattgaaggcttttgacggtaataggtggtaacttggtaaaaggctgcctttactgtagctcacccagcatctcttttaccaaccagagagtgtgaaactagtttcatatattacctagttattctttcaaaacaaaacaaaaaaaaaacaaaaactgacgcactgcactagttattattagatattcttagtcttttttgtacatggagatttaagtttaagatggtttatataataggttatacctacatttatattgtagaataaatattaaaaagcctgttccagagactcccaagcagcctgggcaggcagatgtaccattgttagtggtgtatgctcggcctcgtggtccatatattctgcacttttatatttgccaccagaatggtagtttgctggcaaaaaaaaaaaaaagagagagagaaaaaattacaactcttacaatctgaatttttttcttagccttgagtgaccaagaagaatttgcttgaggcaaattgtggcaaatattttcccagacaggggaagagtcctgcagattacagattactggtgttttcatgccttgaggattcttttatttttacataggggtctaagtgaccaatggattgttcatacaaacaaaaaaaaagacaaaaatattattcagaagtgaccttagtattacttcactattctaaacacattgaagacactcacttcatgtggacttggagctacagaccttttacatccatcacagattggctggacgggttgcaattgctatgcacagcctgattggcactgcaggtttttagagccattttgagtttgtgttgtttaggaggtactgagtcaatgatgagggaggtatgcctgaccagagtgggactctcagtcatagatccacctgcaagtctctgtttcctttttgtgttttgttgcttttgaacataaaaccaaccatacataagcagcgccaagtggattaactggcttagaacattcaacatattgacttaaccacctgacattcacagtgtcttgtttcctagcaacagatgcaaagtgataaatcaaaattagtctgaggctacagattttacagggtatttgttctatagcacaaagtatttccccactcttgcgtcacagcacaaactaccaaattttaattattggattccagcaataatttttaatggttttcaaactggcggaattttgacagtgctagttcgagtttgaagcttttgaattagatctctaaatggtgacagtttacatggttttatctagctttcttatttatacttgactgaattgtaatgattttttttctaattgtaatttgacgtaatagccatacaaaaaatgactctattcatactaggtttagcttctcatggttgtagatattacttcagttccggtgctggaaaatatgtacaacatactaacaggattgaaaaaaaaatagaggtttttcttcttgtttttttttccaaagcaggtaaagagggtagcaaagcatcggaatgatgtgctcaaaaatgcatattcctggtggggatggaggaagaaggcattagtaaaaggttaatcaaacgttacaacttaaccccattcatgtaggaataaatcaagtgagcagttccagacttttgcataatatttttactatgatgctgttttattaatattttctaaatttcaaaacaaaaagtgaatgtttgaaattgctgggtcccgatgttggtggctgttggagttttggaccactcgctagcagtgatttgaagattataattagctaaaatccaaaacaaaaaaccaacaacaaaaattgtatggtgcggaacatgcaccttgacaatggtactaacttgttattctatagaacacgttagaatagatctatttttgccagagcaccctccttcagtcctccgattacatttcactagagttccttacgagattgctgtatattcctgggacctttttttaaaaaaaaaaaaagcaaaacaaaagattactttttttctatgtgattaatatcttacttgatctgcttttcctaaacctcagtggcttttcccttaggcagggttgggggtgggagggcaacttactggagatgactgttttcagatactttaaaacaaacctttttgtagaaatgcttaatttttaagcggttaggcactgagagtagcagaaatcctgcaaagctttatagttccttagactcaccttgtcgattctctgagtaaagtcttgatttcaataattgtgcttctcatgccctgaatctgctggagaggagtgttgttattttcaggtaacaacattcgttagcacaaatatttcagaccaatattagtgctctccaccccaccttttgttatcattttcatttcatttctctcattcttttttattttggaaaatcatattgctatagtgtgtactttaatctgccagcagataccatctacactaacatttgtcccacagcatcctcaagagaaaaagttgttgcaccttatatatatctcaagcaaaccaaaatatgatgctcttctgctttgttttattctaaattgttgtatcatatctttctgaaaccattctgaatttagttgaaattatcaatatttatgcttttaaccttaatttctggattcaagcctgtatataaatcttttgaaaaaaaattgtcctagcccttctctgcgatgctggaagtagaagattgcgtctcagatggagacgcagtactgttccagttttctttagccttttatttatttagttattctgggtatttcctatgtaattttgaagtgtgtagagtatattatagtaactgaagctgcagctgtaagaagctgagtgaaagaaaaaatactgtaagacatccttaaagtttttatttgtttgggtactgtatatgagatcaggaaaaagaaaaatgtcccacagccacattggaaatacaggttcttgtccccaaattaggttagttcccagattttagatcaaaactgttaattcattaaaaccccttttaaaaggtaaattctactgttgtaattccgatagtctttttcccacaaatatcagaaatatatttatttaattctgtcagatgagctttctaccgatgccatgtcccaaagccatgttaaaataattcccacgttatcattgtgattctacttcctgccactaaaattgctggagaaacaaaataatgatggaacactatgaacaaaaaggagcatctgaactggtctggttatttagaatccaatgtgttcaaatccttttgttttcttattaagtcagatgctactgtaagtcagataaaattttgtttgcactctgcagtctttggctcaatgtatggaaatgtttgcacctatgtaaagtcacaagctaattacaaattgctacagaacaggagtaagctgaaaactgaatgccatgttttgtttataaggtggggaggggagggaaaataccaaaaaactctgttccaagtttggcatttgacattaatgtgaagcagtgggaccatgctgcctgctaaactactgtatgaatcgtaaatgttctgaagacgagcagctggaggctggaggatggcattccatacagcaaaggagaagcacccaccacttcatctgggaaaaggaaggaaattgcaggaggcctggagccatcatttgtaaaggggatgttgcggggtgtgatgctgttgaggagattcaccttcaattgcactgctccacagagccctcatataaggccaatcctaatgggctacctcggctttaaaagttaatttcagtaagtcctgtttcaaaagtttgtctttttttgcttctaccttcagtgccactattttccactgcagtgttttgacttcacaaactgcctcctccagagagaacaatgtattgctgaaaatgggcagtagaagcaaatgctgttgttacatttgacctataaagtattcagagtgactgctaggtagaaattaaaacttagctttcccaaatagctccttattttgcaccttataaaaagtatactaattgttaattagatgttgcttttgtttatacaagcattcccaaagaactagatttggattttgttttgagtttttggatttttaaaaattatcttatttagattgactaacagcatacttacaattttaaaagaagctgttgttcagttcatcttaccagatgtgtctggcgaagtattcagggtttgatggactgctttactttcgtttggaagtgatagctaagtttattatactctatattaaacaactttgttcatttcactgaggaccttatcttccttatatttcagaacaaagaagcaacaagcgtgaataaaaagacaaatgtatttgactccctcataatccccatctgtatgtgctacccttccttcaaatatataaatgtgcatctttttttttaaaaaaaaaaaaaaaaaggttcctcttctggccaaatttgatctatggtggtatgattcatactgttaaattgagagaggaaaccttgtggttaaaaattatatggctgctgttttctttttgcagtcagtggtcaaaactgatcatgtgcttaaatcgatttttatgcacagaactagttattgtgaacattactgctccctccaaagatttcctgataacttgggccagaggtggttactgagtaacaaggatctaattcaatgcctcaaaactcttccacccacaatgcaaatcttacctcacaagctctaacctaaatcacagagacatgcatgtttcatgcattaacactgatttcgctctgtggcccaccagaggggtgggctcatgtcccctgactcctcacatgagtgcctcagctctaagagccgtggaacggggggtagggaaggtttgcgatctggagctcagcaactggctcagcaacgttttctccatttcattagcactaaacaagtctcttgctctcaggaatttgtcagaaaaaagaataaaatcacctgagactccacataccagattataaactcttctcgtaggtttgaattgcttactcacatgtcataaattaaccacagcttcatttgaccaccaggtctaaagtctgttgacagtttcagcatgactgaatcgctcattttttttttttgctttcagaaattggcttggttctctttagagttggtgtaaacatgccatgtaataaatgatttccacttaatggtacaacagaattattgctttcttagatgtatgtgtagtaaaagtcaatatacacatttatataatttctttcttcaaaatcttatacctaatttgatatttctaaaaattgcacatgtaagtcatgtgtataacatgctaaagtactttaactgtgatcttaaaactgaataaaaatatttaataaaactttgaa

SEQ ID NO: 314071 - DNA, 3121 bp, Homo sapiens
cggacgcgtgggtcgacccacgcgtcccaccttttgttatcattttcatttcatttctctcattcttttttattttggaaaatcatattgctatagtgtgtactttaatctgccagcagataccatctacactaacatttgtcccacagcatcctcaagagaaaaagttgttgcaccttatatatatctcaagcaaaccaaaatatgatgctcttctgctttgttttattctaaattgttgtatcatatctttctgaaaccattctgaatttagttgaaattatcaatatttatgcttttaaccttaatttctggattcaagcctgtatataaatcttttgaaaaaaaattgtcctagcccttctctgcgatgctggaagtagaagattgcgtctcagatggagacgcagtactgttccagttttctttagccttttatttatttagttattctgggtatttcctatgtaattttgaagtgtgtagagtatattatagtaactgaagctgcagctgtaagaagctgagtgaaagaaaaaatactgtaagacatccttaaagtttttatttgtttgggtactgtatatgagatcaggaaaaagaaaaatgtcccacagccacattggaaatacaggttcttgtccccaaattaggttagttcccagattttagatcaaaactgttaattcattaaaaccccttttaaaaggtaaattctactgttgtaattccgatagtctttttcccacaaatatcagaaatatatttatttaattctgtcagatgagctttctaccgatgccatgtcccaaagccatgttaaaataattcccacgttatcattgtgattctacttcctgccactaaaattgctggagaaacaaaataatgatggaacactatgaacaaaaaggagcatctgaactggtctggttatttagaatccaatgtgttcaaatccttttgttttcttattaagtcagatgctactgtaagtcagataaaattttgtttgcactctgcagtctttggctcaatgtatggaaatgtttgcacctatgtaaagtcacaagctaattacaaattgctacagaacaggagtaagctgaaaactgaatgccatgttttgtttataaggtggggaggggagggaaaataccaaaaaactctgttccaagtttggcatttgacattaatgtgaagcagtgggaccatgctgcctgctaaactactgtatgaatcgtaaatgttctgaagacgagcagctggaggctggaggatggcattccatacagcaaaggagaagcacccaccacttcatctgggaaaaggaaggaaattgcaggaggcctggagccatcatttgtaaaggggatgttgcggggtgtgatgctgttgaggagattcaccttcaattgcactgctccacagagccctcatataaggccaatcctaatgggctacctcggctttaaaagttaatttcagtaagtcctgtttcaaaagtttgtctttttttgcttctaccttcagtgccactattttccactgcagtgttttgacttcacaaactgcctcctccagagagaacaatgtattgctgaaaatgggcagtagaagcaaatgctgttgttacatttgacctataaagtattcagagtgactgctaggtagaaattaaaacttagctttcccaaatagctccttattttgcaccttataaaaagtatactaattgttaattagatgttgcttttgtttatacaagcattcccaaagaactagatttggattttgttttgagtttttggatttttaaaaattatcttatttagattgactaacagcatacttacaattttaaaagaagctgttgttcagttcatcttaccagatgtgtctggcgaagtattcagggtttgatggactgctttactttcgtttggaagtgatagctaagtttattatactctatattaaacaactttgttcatttcactgaggaccttatcttccttatatttcagaacaaagaagcaacaagcgtgaataaaaagacaaatgtatttgactccctcataatccccatctgtatgtgctacccttccttcaaatatataaatgtgcatctttttttttaaaaaaaaaaaaaaaaaggttcctcttctggccaaatttgatctatggtggtatgattcatactgttaaattgagagaggaaaccttgtggttaaaaattatatggctgctgttttctttttgcagtcagtggtcaaaactgatcatgtgcttaaatcgatttttatgcacagaactagttattgtgaacattactgctccctccaaagatttcctgataacttgggccagaggtggttactgagtaacaaggatctaattcaatgcctcaaaactcttccacccacaatgcaaatcttacctcacaagctctaacctaaatcacagagacatgcatgtttcatgcattaacactgatttcgctctgtggcccaccagaggggtgggctcatgtcccctgactcctcacatgagtgcctcagctctaagagccgtggaacggggggtagggaaggtttgcgatctggagctcagcaactggctcagcaacgttttctccatttcattagcactaaacaagtctcttgctctcaggaatttgtcagaaaaaagaataaaatcacctgagactccacataccagattataaactcttctcgtaggtttgaattgcttactcacatgtcataaattaaccacagcttcatttgaccaccaggtctaaagtctgttgacagtttcagcatgactgaatcgctcattttttttttttgctttcagaaattggcttggttctctttagagttggtgtaaacatgccatgtaataaatgatttccacttaatggtacaacagaattattgctttcttagatgtatgtgtagtaaaagtcaatatacacatttatataatttctttcttcaaaatcttatacctaatttgatatttctaaaaattgcacatgtaagtcatgtgtataacatgctaaagtactttaactgtgatcttaaaactgaataaaaatatttaataaaactttgaa

SEQ ID NO: 314072 - DNA, 634 bp, Homo sapiens
aaaaaaaaaaaaaaaaaaaaaaaaaaaaaaaaaaaaaaaaaaaaaaaaaaaaaaaaaaaaaaaaaaaaatcacacctgctattgaaacttctaaaactaggcctagttttagaagtttcaatagcaccttagttccagacctacaccagaagtttcattagcactaaacaagtctcttgctctcaggaatttgtcagaaaaaagaataaaatcacctgagactccacataccagattataaactcttctcgtaggtttgaattgcttactcacatgtcataaattaaccacagcttcatttgaccaccaggtctaaagtctgttgacagtttcagcatgactgaatcgctcattttttttttttgctttcagaaattggcttggttctctttagagttggtgtaaacatgccatgtaataaatgatttccacttaatggtacaacagaattattgctttcttagatgtatgtgtagtaaaagtcaatatacacatttatataatttctttcttcaaaatcttatacctaatttgatatttctaaaaattgcacatgtaagtcatgtgtataacatgctaaagtactttaactgtgatcttaaaactgaataaaaatatttaataaaactttgaa

SEQ ID NO: 314073 - DNA, 569 bp, Homo sapiens
aggacttcaataaaataacaggaaactggatataggatttcgttgcaatgctattgaaacttctaaaactaggcctagttttagaagtttcattagcactaaacaagtctcttgctctcaggaatttgtcagaaaaaagaataaaatcacctgagactccacataccagattataaactcttctcgtaggtttgaattgcttactcacatgtcataaattaaccacagcttcatttgaccaccaggtctaaagtctgttgacagtttcagcatgactgaatcgctcattttttttttttgctttcagaaattggcttggttctctttagagttggtgtaaacatgccatgtaataaatgatttccacttaatggtacaacagaattattgctttcttagatgtatgtgtagtaaaagtcaatatacacatttatataatttctttcttcaaaatcttatacctaatttgatatttctaaaaattgcacatgtaagtcatgtgtataacatgctaaagtactttaactgtgatcttaaaactgaataaaaatatttaataaaactttgaa

SEQ ID NO: 314074 - DNA, 518 bp, Homo sapiens
ctagttttagaagttcatagcacctagttttagaagtttcattagcactaaacaagtctcttgctctcaggaatttgtcagaaaaaagaataaaatcacctgagactccacataccagattataaactcttctcgtaggtttgaattgcttactcacatgtcataaattaaccacagcttcatttgaccaccaggtctaaagtctgttgacagtttcagcatgactgaatcgctcattttttttttttgctttcagaaattggcttggttctctttagagttggtgtaaacatgccatgtaataaatgatttccacttaatggtacaacagaattattgctttcttagatgtatgtgtagtaaaagtcaatatacacatttatataatttctttcttcaaaatcttatacctaatttgatatttctaaaaattgcacatgtaagtcatgtgtataacatgctaaagtactttaactgtgatcttaaaactgaataaaaatatttaataaaactttgaa

SEQ ID NO: 314075 - DNA, 315 bp, Homo sapiens
agtttacttttttttcccctcaaaaggcatatgggccactgaaaacttctgagcaatggatataaatgagatggaacagaaggaaaaaaaggtagacattggaaagactggtttagggggctttactattatcctaggtaagaaaacattcattcttctgtagtgtgttgacagttgtaaaaggggctattatgagagacattatgaaggttatactctggatcttgaaatattttagattgaagtattccaagttacagaactagtctttcccatttacggggcaaaagttaatggatactcagttttaaggat

SEQ ID NO: 314076 - DNA, 470 bp, Homo sapiens
acgttttatttcattttttccatcagtactttgaaaactctgagtgtaaattctccattcagacgggtcagaaatttagacatgtttccttctaagagcaattttggtgccttctgtttttgtgcataactatgcatggtatttcctatttcagccatattttcagaagacagaaacaccatggagcctgttcataaggttaaaaatatcccatccattttcaacactccagagccaacaacaacgcaagaacctttggtgggcagccaaaagagaaaagcaaggaaaaccaagattacacaccttgtcaggacagcagatggccgggtatcaccagcaggaggtactttgggtaagaagagagagctttagaccagaggtgtccaatcttttagcttccctgggccacactggaagaagaattgtcttgagccacaatgaaatacactaacaatagccaatgagctaaa

SEQ ID NO: 314077 - DNA, 7811 bp, Homo sapiens
  misc_feature (1)..(2): n is a, c, g, or t
  misc_feature (4)..(4): n is a, c, g, or t
nngngtgttttcagtctctccgggttgcatgtactgtatgtggagcagtgtacagtgaagcggaggcagagcggctccgcgagcttctctccactttcccatagagaaaccctgactggccgctgagggctagctacacacacgccctcacgcccggcgagcccgcgaggtcactatcatatgacaaaggctttgccgcagttcatcttcctccctgtgtactttccatttgccttcctggaatcctgctgcatcacagaagctggaagttctgatgttccactgaaatcacaatggaaagtcttgacttgactggtcacagtaatgaaaggcagtaatagaaataaggatcattcagcagaaggagaaggggttggaaaacgaccaaaacgaaagtgtcttcagtggcatccattgctagcaaagaaacttcttgatttttcagaagaggaagaagaggaagacgaagaggaggatattgataaggttcaacttcttggggccgatggcctagagcaagatgttggtgaaactgaagatgatgaatcaccagagcagcgagcccggagaccaatgaatgcatttcttttattttgcaaacgccatcgctctcttgtacgtcaggaacaccccaggcttgataaccgaggtgctaccaagatactagctgattggtgggctgttcttgatccaaaggaaaagcagaaatacacagacatggccaaggagtataaggatgcatttatgaaagcaaatcctggctacaaatggtgtcctaccacaaacaagcctgtgaaatccccaacacccactgtcaatccacgaaagaaactttgggccttcccatctgactcttcaagagacttgccaagccccaagaaagcaaagactgaagaaatgcctcagcttaactttggaatggctgatcctactcaaatgggaggcctgagtatgctgctgttagctggagaacatgctcttggcacaccagaggtatcctctggcacatgcaggcctgatgtttcagaatctcctgaattacgtcagaagtcaccattgtttcagtttgccgagatatcttcaagtacgtcccactctgatgcttctacaaagcagtgtcaaacatctgccttgtttcagtttgcagagatttcttcaaacacttcgcagttgggtggtgctgagcctgtaaaacgctgtggaaagtctgcactctttcaactggcagagatgtgcctggcatcagaagggatgaaaatggaagaatcaaagctaataaaagcaaaagaatccgatggtggaagaattaaagaattagagaagggaaaggaagaaaaagaaattaaaatggagaaaacagatgaaactaggttacagaaggaagcagaatttgaaaaatcggctaaggaaaatttaagagattctaaggaattgagaaattttgaggcattgcaaatagatgacataatggctataaaaatggaagatcccaaagaaattagaaaggaagagttagaagaagatcacaaatgtagtcattttcctgatttttcttattctgccagtagcaagataataattagtgatgttcccagtagaaaggatcatatgtgccatcctcatggaattatgatcattgaggatcccgcagcattaaacaagccagaaaagctaaaaaagaaaaagaagaaaagcaaaatggatcgacatggaaatgataaatccacacccaagaagacttgcaaaaagaggcagtcttcggaatctgacattgagagcgtcatatataccattgaagccgtcgcaaaaggagactggggcatagagaaacttggagatacccctcgcaagaaggtccgcacatcctcaagtggcaagggaagcattttggatgccaagccaccaaagaaaaaagtgaaatcaagagagaagaaaatgtcaaaggagaaatcctcagacaccaccaaagagtcaagacctccagatttcattagtatttctgctagcaagaacatttctggtgagacaccagagggtataaaagcagaaccattgacccctatggaagatgcactaccacccagcctatcaggacaggccaagcctgaggacagtgactgtcacagaaaaatagaaacttgtggttccaggaaatccgagaggtcttgcaaaggtgctctttataaaaccctggtgtctgagggcatgctcacctctctgcgagctaatgttgacagaggaaaacgaagctcaggaaaaggaaactcctctgatcatgaagggtgttggaatgaagaaagctggacatttagtcagagtgggaccagtgggagcaagaagttcaagaagacaaagccaaaagaagactgtctccttggctccgcaaagctggatgaagaatttgaaaaaaaattcaacagcctccctcaatatagtcctgttacatttgaccggaaatgtgtacctgtcccaagaaaaaagaagaagactggaaatgtgtcctcagaaccgactaaaaccagcaaaggaagtggggataaatggtcaaacaagcaactcttcttggatgccattcaccctacagaagccatattttcagaagacagaaacaccatggagcctgttcataaggttaaaaatatcccatccattttcaacactccagagccaacaacaacgcaagaacctttggtgggcagccaaaagagaaaagcaaggaaaaccaagattacacaccttgtcaggacagcagatggccgggtatcaccagcaggaggtactttggatgacaaaccaaaggaacaactgcagaggagtctccctaaagcaactgagacagactgcaatgacaaatgctcacacaacaccgaggtcggggagacgcggagcagtactccagaaatgcctgccgtgtctgcgttctttagcctcgctgcgctggctgaagtggcagccatggaaaatgtgcacagaggtcagaggtcaactccgctcacccatgatggacagccaaaagaaatgccgcaggctcctgtacttatttcctgcgctgaccagtgaagcgccctttcattgtaaaacattgtgctttacctactaccctagccttgtctttaccgagggatgctagtgagtccaagtggtggaaaatatagactgcaaacaagtgcttgttgccccacacggcccagattcacttgaagcagaagttagcatcctgggccagtttgttctctcagaacccagaatctttgagggtaaggttatctgtctgatactgagcagaaacagaatgatcctggagctttgctttctattgaaggcttttgacggtaataggtggtaacttggtaaaaggctgcctttactgtagctcacccagcatctcttttaccaaccagagagtgtgaaactagtttcatatattacctagttattctttcaaaacaaaacaaaaaaaaaacaaaaactgacgcactgcactagttattattagatattcttagtcttttttgtacatggagatttaagtttaagatggtttatataataggttatacctacatttatattgtagaataaatattaaaaagcctgttccagagactcccaagcagcctgggcaggcagatgtaccattgttagtggtgtatgctcggcctcgtggtccatatattctgcacttttatatttgccaccagaatggtagtttgctggcaaaaaaaaaaaaaagagagagagaaaaaattacaactcttacaatctgaatttttttcttagccttgagtgaccaagaagaatttgcttgaggcaaattgtggcaaatattttcccagacaggggaagagtcctgcagattacagattactggtgttttcatgccttgaggattcttttatttttacataggggtctaagtgaccaatggattgttcatacaaacaaaaaaaaagacaaaaatattattcagaagtgaccttagtattacttcactattctaaacacattgaagacactcacttcatgtggacttggagctacagaccttttacatccatcacagattggctggacgggttgcaattgctatgcacagcctgattggcactgcaggtttttagagccattttgagtttgtgttgtttaggaggtactgagtcaatgatgagggaggtatgcctgaccagagtgggactctcagtcatagatccacctgcaagtctctgtttcctttttgtgttttgttgcttttgaacataaaaccaaccatacataagcagcgccaagtggattaactggcttagaacattcaacatattgacttaaccacctgacattcacagtgtcttgtttcctagcaacagatgcaaagtgataaatcaaaattagtctgaggctacagattttacagggtatttgttctatagcacaaagtatttccccactcttgcgtcacagcacaaactaccaaattttaattattggattccagcaataatttttaatggttttcaaactggcggaattttgacagtgctagttcgagtttgaagcttttgaattagatctctaaatggtgacagtttacatggttttatctagctttcttatttatacttgactgaattgtaatgattttttttctaattgtaatttgacgtaatagccatacaaaaaatgactctattcatactaggtttagcttctcatggttgtagatattacttcagttccggtgctggaaaatatgtacaacatactaacaggattgaaaaaaaaatagaggtttttcttcttgtttttttttccaaagcaggtaaagagggtagcaaagcatcggaatgatgtgctcaaaaatgcatattcctggtggggatggaggaagaaggcattagtaaaaggttaatcaaacgttacaacttaaccccattcatgtaggaataaatcaagtgagcagttccagacttttgcataatatttttactatgatgctgttttattaatattttctaaatttcaaaacaaaaagtgaatgtttgaaattgctgggtcccgatgttggtggctgttggagttttggaccactcgctagcagtgatttgaagattataattagctaaaatccaaaacaaaaaaccaacaacaaaaattgtatggtgcggaacatgcaccttgacaatggtactaacttgttattctatagaacacgttagaatagatctatttttgccagagcaccctccttcagtcctccgattacatttcactagagttccttacgagattgctgtatattcctgggacctttttttaaaaaaaaaaaaagcaaaacaaaagattactttttttctatgtgattaatatcttacttgatctgcttttcctaaacctcagtggcttttcccttaggcagggttgggggtgggagggcaacttactggagatgactgttttcagatactttaaaacaaacctttttgtagaaatgcttaatttttaagcggttaggcactgagagtagcagaaatcctgcaaagctttatagttccttagactcaccttgtcgattctctgagtaaagtcttgatttcaataattgtgcttctcatgccctgaatctgctggagaggagtgttgttattttcaggtaacaacattcgttagcacaaatatttcagaccaatattagtgctctccaccccaccttttgttatcattttcatttcatttctctcattcttttttattttggaaaatcatattgctatagtgtgtactttaatctgccagcagataccatctacactaacatttgtcccacagcatcctcaagagaaaaagttgttgcaccttatatatatctcaagcaaaccaaaatatgatgctcttctgctttgttttattctaaattgttgtatcatatctttctgaaaccattctgaatttagttgaaattatcaatatttatgcttttaaccttaatttctggattcaagcctgtatataaatcttttgaaaaaaaattgtcctagcccttctctgcgatgctggaagtagaagattgcgtctcagatggagacgcagtactgttccagttttctttagccttttatttatttagttattctgggtatttcctatgtaattttgaagtgtgtagagtatattatagtaactgaagctgcagctgtaagaagctgagtgaaagaaaaaatactgtaagacatccttaaagtttttatttgtttgggtactgtatatgagatcaggaaaaagaaaaatgtcccacagccacattggaaatacaggttcttgtccccaaattaggttagttcccagattttagatcaaaactgttaattcattaaaaccccttttaaaaggtaaattctactgttgtaattccgatagtctttttcccacaaatatcagaaatatatttatttaattctgtcagatgagctttctaccgatgccatgtcccaaagccatgttaaaataattcccacgttatcattgtgattctacttcctgccactaaaattgctggagaaacaaaataatgatggaacactatgaacaaaaaggagcatctgaactggtctggttatttagaatccaatgtgttcaaatccttttgttttcttattaagtcagatgctactgtaagtcagataaaattttgtttgcactctgcagtctttggctcaatgtatggaaatgtttgcacctatgtaaagtcacaagctaattacaaattgctacagaacaggagtaagctgaaaactgaatgccatgttttgtttataaggtggggaggggagggaaaataccaaaaaactctgttccaagtttggcatttgacattaatgtgaagcagtgggaccatgctgcctgctaaactactgtatgaatcgtaaatgttctgaagacgagcagctggaggctggaggatggcattccatacagcaaaggagaagcacccaccacttcatctgggaaaaggaaggaaattgcaggaggcctggagccatcatttgtaaaggggatgttgcggggtgtgatgctgttgaggagattcaccttcaattgcactgctccacagagccctcatataaggccaatcctaatgggctacctcggctttaaaagttaatttcagtaagtcctgtttcaaaagtttgtctttttttgcttctaccttcagtgccactattttccactgcagtgttttgacttcacaaactgcctcctccagagagaacaatgtattgctgaaaatgggcagtagaagcaaatgctgttgttacatttgacctataaagtattcagagtgactgctaggtagaaattaaaacttagctttcccaaatagctccttattttgcaccttataaaaagtatactaattgttaattagatgttgcttttgtttatacaagcattcccaaagaactagatttggattttgttttgagtttttggatttttaaaaattatcttatttagattgactaacagcatacttacaattttaaaagaagctgttgttcagttcatcttaccagatgtgtctggcgaagtattcagggtttgatggactgctttactttcgtttggaagtgatagctaagtttattatactctatattaaacaactttgttcatttcactgaggaccttatcttccttatatttcagaacaaagaagcaacaagcgtgaataaaaagacaaatgtatttgactccctcataatccccatctgtatgtgctacccttccttcaaatatataaatgtgcatcttttttt

SEQ ID NO: 314078 - DNA, 5727 bp, Homo sapiens
  misc_feature (1)..(2): n is a, c, g, or t
  misc_feature (4)..(4): n is a, c, g, or t
nngngtgttttcagtctctccgggttgcatgtactgtatgtggagcagtgtacagtgaagcggaggcagagcggctccgcgagcttctctccactttcccatagagaaaccctgactggccgctgagggctagctacacacacgccctcacgcccggcgagcccgcgaggtcactatcatatgacaaaggctttgccgcagttcatcttcctccctgtgtactttccatttgccttcctggaatcctgctgcatcacagaagctggaagttctgatgttccactgaaatcacaatggaaagtcttgacttgactggtcacagtaatgaaaggcagtaatagaaataaggatcattcagcagaaggagaaggggttggaaaacgaccaaaacgaaagtgtcttcagtggcatccattgctagcaaagaaacttcttgatttttcagaagaggaagaagaggaagacgaagaggaggatattgataaggttcaacttcttggggccgatggcctagagcaagatgttggtgaaactgaagatgatgaatcaccagagcagcgagcccggagaccaatgaatgcatttcttttattttgcaaacgccatcgctctcttgtacgtcaggaacaccccaggcttgataaccgaggtgctaccaagatactagctgattggtgggctgttcttgatccaaaggaaaagcagaaatacacagacatggccaaggagtataaggatgcatttatgaaagcaaatcctggctacaaatggtgtcctaccacaaacaagcctgtgaaatccccaacacccactgtcaatccacgaaagaaactttgggccttcccatctgactcttcaagagacttgccaagccccaagaaagcaaagactgaagaaatgcctcagcttaactttggaatggctgatcctactcaaatgggaggcctgagtatgctgctgttagctggagaacatgctcttggcacaccagaggtatcctctggcacatgcaggcctgatgtttcagaatctcctgaattacgtcagaagtcaccattgtttcagtttgccgagatatcttcaagtacgtcccactctgatgcttctacaaagcagtgtcaaacatctgccttgtttcagtttgcagagatttcttcaaacacttcgcagttgggtggtgctgagcctgtaaaacgctgtggaaagtctgcactctttcaactggcagagatgtgcctggcatcagaagggatgaaaatggaagaatcaaagctaataaaagcaaaagaatccgatggtggaagaattaaagaattagagaagggaaaggaagaaaaagaaattaaaatggagaaaacagatgaaactaggttacagaaggaagcagaatttgaaaaatcggctaaggaaaatttaagagattctaaggaattgagaaattttgaggcattgcaaatagatgacataatggctataaaaatggaagatcccaaagaaattagaaaggaagagttagaagaagatcacaaatgtagtcattttcctgatttttcttattctgccagtagcaagataataattagtgatgttcccagtagaaaggatcatatgtgccatcctcatggaattatgatcattgaggatcccgcagcattaaacaagccagaaaagctaaaaaagaaaaagaagaaaagcaaaatggatcgacatggaaatgataaatccacacccaagaagacttgcaaaaagaggcagtcttcggaatctgacattgagagcgtcatatataccattgaagccgtcgcaaaaggagactggggcatagagaaacttggagatacccctcgcaagaaggtccgcacatcctcaagtggcaagggaagcattttggatgccaagccaccaaagaaaaaagtgaaatcaagagagaagaaaatgtcaaaggagaaatcctcagacaccaccaaagagtcaagacctccagatttcattagtatttctgctagcaagaacatttctggtgagacaccagagggtataaaagcagaaccattgacccctatggaagatgcactaccacccagcctatcaggacaggccaagcctgaggacagtgactgtcacagaaaaatagaaacttgtggttccaggaaatccgagaggtcttgcaaaggtgctctttataaaaccctggtgtctgagggcatgctcacctctctgcgagctaatgttgacagaggaaaacgaagctcaggaaaaggaaactcctctgatcatgaagggtgttggaatgaagaaagctggacatttagtcagagtgggaccagtgggagcaagaagttcaagaagacaaagccaaaagaagactgtctccttggctccgcaaagctggatgaagaatttgaaaaaaaattcaacagcctccctcaatatagtcctgttacatttgaccggaaatgtgtacctgtcccaagaaaaaagaagaagactggaaatgtgtcctcagaaccgactaaaaccagcaaaggaagtggggataaatggtcaaacaagcaactcttcttggatgccattcaccctacagaagccatattttcagaagacagaaacaccatggagcctgttcataaggttaaaaatatcccatccattttcaacactccagagccaacaacaacgcaagaacctttggtgggcagccaaaagagaaaagcaaggaaaaccaagattacacaccttgtcaggacagcagatggccgggtatcaccagcaggaggtactttggatgacaaaccaaaggaacaactgcagaggagtctccctaaagcaactgagacagactgcaatgacaaatgctcacacaacaccgaggtcggggagacgcggagcagtactccagaaatgcctgccgtgtctgcgttctttagcctcgctgcgctggctgaagtggcagccatggaaaatgtgcacagaggtcagaggtcaactccgctcacccatgatggacagccaaaagaaatgccgcaggctcctgtacttatttcctgcgctgaccagtgaagcgccctttcattgtaaaacattgtgctttacctactaccctagccttgtctttaccgagggatgctagtgagtccaagtggtggaaaatatagactgcaaacaagtgcttgttgccccacacggcccagattcacttgaagcagaagttagcatcctgggccagtttgttctctcagaacccagaatctttgagggtaaggttatctgtctgatactgagcagaaacagaatgatcctggagctttgctttctattgaaggcttttgacggtaataggtggtaacttggtaaaaggctgcctttactgtagctcacccagcatctcttttaccaaccagagagtgtgaaactagtttcatatattacctagttattctttcaaaacaaaacaaaaaaaaaacaaaaactgacgcactgcactagttattattagatattcttagtcttttttgtacatggagatttaagtttaagatggtttatataataggttatacctacatttatattgtagaataaatattaaaaagcctgttccagagactcccaagcagcctgggcaggcagatgtaccattgttagtggtgtatgctcggcctcgtggtccatatattctgcacttttatatttgccaccagaatggtagtttgctggcaaaaaaaaaaaaaagagagagagaaaaaattacaactcttacaatctgaatttttttcttagccttgagtgaccaagaagaatttgcttgaggcaaattgtggcaaatattttcccagacaggggaagagtcctgcagattacagattactggtgttttcatgccttgaggattcttttatttttacataggggtctaagtgaccaatggattgttcatacaaacaaaaaaaaagacaaaaatattattcagaagtgaccttagtattacttcactattctaaacacattgaagacactcacttcatgtggacttggagctacagaccttttacatccatcacagattggctggacgggttgcaattgctatgcacagcctgattggcactgcaggtttttagagccattttgagtttgtgttgtttaggaggtactgagtcaatgatgagggaggtatgcctgaccagagtgggactctcagtcatagatccacctgcaagtctctgtttcctttttgtgttttgttgcttttgaacataaaaccaaccatacataagcagcgccaagtggattaactggcttagaacattcaacatattgacttaaccacctgacattcacagtgtcttgtttcctagcaacagatgcaaagtgataaatcaaaattagtctgaggctacagattttacagggtatttgttctatagcacaaagtatttccccactcttgcgtcacagcacaaactaccaaattttaattattggattccagcaataatttttaatggttttcaaactggcggaattttgacagtgctagttcgagtttgaagcttttgaattagatctctaaatggtgacagtttacatggttttatctagctttcttatttatacttgactgaattgtaatgattttttttctaattgtaatttgacgtaatagccatacaaaaaatgactctattcatactaggtttagcttctcatggttgtagatattacttcagttccggtgctggaaaatatgtacaacatactaacaggattgaaaaaaaaatagaggtttttcttcttgtttttttttccaaagcaggtaaagagggtagcaaagcatcggaatgatgtgctcaaaaatgcatattcctggtggggatggaggaagaaggcattagtaaaaggttaatcaaacgttacaacttaaccccattcatgtaggaataaatcaagtgagcagttccagacttttgcataatatttttactatgatgctgttttattaatattttctaaatttcaaaacaaaaagtgaatgtttgaaattgctgggtcccgatgttggtggctgttggagttttggaccactcgctagcagtgatttgaagattataattagctaaaatccaaaacaaaaaaccaacaacaaaaattgtatggtgcggaacatgcaccttgacaatggtactaacttgttattctatagaacacgttagaatagatctatttttgccagagcaccctccttcagtcctccgattacatttcactagagttccttacgagattgctgtatattcctgggacctttttttaaaaaaaaaaaaagcaaaacaaaagattactttttttctatgtgattaatatcttacttgatctgcttttcctaaacctcagtggcttttcccttaggcagggttgggggtgggagggcaacttactggagatgactgttttcagatactttaaaacaaacctttttgtagaaatgcttaatttttaagcggttaggcactgagagtagcagaaatcctgcaaagctttatagttccttagactcaccttgtcgattctctgagtaaagtcttgatttccggattctctattctgttccattggtctgtctgtctgttctcggtaccagataccacacatgttcttgatgactgtggctttgtagtatttcttgaagtccattcagttccaaccaagggggatcctcatagagtc

SEQ ID NO: 314079 - DNA, 2940 bp, Homo sapiens
  misc_feature (1)..(2): n is a, c, g, or t
  misc_feature (4)..(4): n is a, c, g, or t
  misc_feature (2893)..(2893): n is a, c, g, or t
nngngtgttttcagtctctccgggttgcatgtactgtatgtggagcagtgtacagtgaagcggaggcagagcggctccgcgagcttctctccactttcccatagagaaaccctgactggccgctgagggctagctacacacacgccctcacgcccggcgagcccgcgaggtcactatcatatgacaaaggctttgccgcagttcatcttcctccctgtgtactttccatttgccttcctggaatcctgctgcatcacagaagctggaagttctgatgttccactgaaatcacaatggaaagtcttgacttgactggtcacagtaatgaaaggcagtaatagaaataaggatcattcagcagaaggagaaggggttggaaaacgaccaaaacgaaagtgtcttcagtggcatccattgctagcaaagaaacttcttgatttttcagaagaggaagaagaggaagacgaagaggaggatattgataaggttcaacttcttggggccgatggcctagagcaagatgttggtgaaactgaagatgatgaatcaccagagcagcgagcccggagaccaatgaatgcatttcttttattttgcaaacgccatcgctctcttgtacgtcaggaacaccccaggcttgataaccgaggtgctaccaagatactagctgattggtgggctgttcttgatccaaaggaaaagcagaaatacacagacatggccaaggagtataaggatgcatttatgaaagcaaatcctggctacaaatggtgtcctaccacaaacaagcctgtgaaatccccaacacccactgtcaatccacgaaagaaactttgggccttcccatctgactcttcaagagacttgccaagccccaagaaagcaaagactgaagaaatgcctcagcttaactttggaatggctgatcctactcaaatgggaggcctgagtatgctgctgttagctggagaacatgctcttggcacaccagaggtatcctctggcacatgcaggcctgatgtttcagaatctcctgaattacgtcagaagtcaccattgtttcagtttgccgagatatcttcaagtacgtcccactctgatgcttctacaaagcagtgtcaaacatctgccttgtttcagtttgcagagatttcttcaaacacttcgcagttgggtggtgctgagcctgtaaaacgctgtggaaagtctgcactctttcaactggcagagatgtgcctggcatcagaagggatgaaaatggaagaatcaaagctaataaaagcaaaagaatccgatggtggaagaattaaagaattagagaagggaaaggaagaaaaagaaattaaaatggagaaaacagatgaaactaggttacagaaggaagcagaatttgaaaaatcggctaaggaaaatttaagagattctaaggaattgagaaattttgaggcattgcaaatagatgacataatggctataaaaatggaagatcccaaagaaattagaaaggaagagttagaagaagatcacaaatgtagtcattttcctgatttttcttattctgccagtagcaagataataattagtgatgttcccagtagaaaggatcatatgtgccatcctcatggaattatgatcattgaggatcccgcagcattaaacaagccagaaaagctaaaaaagaaaaagaagaaaagcaaaatggatcgacatggaaatgataaatccacacccaagaagacttgcaaaaagaggcagtcttcggaatctgacattgagagcgtcatatataccattgaagccgtcgcaaaaggagactggggcatagagaaacttggagatacccctcgcaagaaggtccgcacatcctcaagtggcaagggaagcattttggatgccaagccaccaaagaaaaaagtgaaatcaagagagaagaaaatgtcaaaggagaaatcctcagacaccaccaaagagtcaagacctccagatttcattagtatttctgctagcaagaacatttctggtgagacaccagagggtataaaagcagaaccattgacccctatggaagatgcactaccacccagcctatcaggacaggccaagcctgaggacagtgactgtcacagaaaaatagaaacttgtggttccaggaaatccgagaggtcttgcaaaggtgctctttataaaaccctggtgtctgagggcatgctcacctctctgcgagctaatgttgacagaggaaaacgaagctcaggaaaaggaaactcctctgatcatgaagggtgttggaatgaagaaagctggacatttagtcagagtgggaccagtgggagcaagaagttcaagaagacaaagccaaaagaagactgtctccttggctccgcaaagctggatgaagaatttgaaaaaaaattcaacagcctccctcaatatagtcctgttacatttgaccggaaatgtgtacctgtcccaagaaaaaagaagaagactggaaatgtgtcctcagaaccgactaaaaccagcaaaggaagtggggataaatggtcaaacaagcaactcttcttggatgccattcaccctacagaagccatattttcagaagacagaaacaccatggagcctgttcataaggttaaaaatatcccatccattttcaacacccttcatgatcagaggagtttccttttcctgagcttcgttttcctctgtcaacattagctcgcagagaggtgagcatgccctcagacaccagggttttataaagagcacctttgcaagacctctcggatttcctggaaccacaagtttctatttttctgtgacagtcactgtcctcaggcttggcctgtcctgataggctgggtggtagtgcatcttccataggggtcaatgnttctgctttataccctctgatgcagaatgacgtcggtaccgagctca

SEQ ID NO: 314080 - DNA, 8885 bp, Homo sapiens
  misc_feature (1)..(2): n is a, c, g, or t
  misc_feature (4)..(4): n is a, c, g, or t
nngngtgttttcagtctctccgggttgcatgtactgtatgtggagcagtgtacagtgaagcggaggcagagcggctccgcgagcttctctccactttcccatagagaaaccctgactggccgctgagggctagctacacacacgccctcacgcccggcgagcccgcgaggtcactatcatatgacaaaggctttgccgcagttcatcttcctccctgtgtactttccatttgccttcctggaatcctgctgcatcacagaagctggaagttctgatgttccactgaaatcacaatggaaagtcttgacttgactggtcacagtaatgaaaggcagtaatagaaataaggatcattcagcagaaggagaaggggttggaaaacgaccaaaacgaaagtgtcttcagtggcatccattgctagcaaagaaacttcttgatttttcagaagaggaagaagaggaagacgaagaggaggatattgataaggttcaacttcttggggccgatggcctagagcaagatgttggtgaaactgaagatgatgaatcaccagagcagcgagcccggagaccaatgaatgcatttcttttattttgcaaacgccatcgctctcttgtacgtcaggaacaccccaggcttgataaccgaggtgctaccaagatactagctgattggtgggctgttcttgatccaaaggaaaagcagaaatacacagacatggccaaggagtataaggatgcatttatgaaagcaaatcctggctacaaatggtgtcctaccacaaacaagcctgtgaaatccccaacacccactgtcaatccacgaaagaaactttgggccttcccatctgactcttcaagagacttgccaagccccaagaaagcaaagactgaagaaatgcctcagcttaactttggaatggctgatcctactcaaatgggaggcctgagtatgctgctgttagctggagaacatgctcttggcacaccagaggtatcctctggcacatgcaggcctgatgtttcagaatctcctgaattacgtcagaagtcaccattgtttcagtttgccgagatatcttcaagtacgtcccactctgatgcttctacaaagcagtgtcaaacatctgccttgtttcagtttgcagagatttcttcaaacacttcgcagttgggtggtgctgagcctgtaaaacgctgtggaaagtctgcactctttcaactggcagagatgtgcctggcatcagaagggatgaaaatggaagaatcaaagctaataaaagcaaaagaatccgatggtggaagaattaaagaattagagaagggaaaggaagaaaaagaaattaaaatggagaaaacagatgaaactaggttacagaaggaagcagaatttgaaaaatcggctaaggaaaatttaagagattctaaggaattgagaaattttgaggcattgcaaatagatgacataatggctataaaaatggaagatcccaaagaaattagaaaggaagagttagaagaagatcacaaatgtagtcattttcctgatttttcttattctgccagtagcaagataataattagtgatgttcccagtagaaaggatcatatgtgccatcctcatggaattatgatcattgaggatcccgcagcattaaacaagccagaaaagctaaaaaagaaaaagaagaaaagcaaaatggatcgacatggaaatgataaatccacacccaagaagacttgcaaaaagaggcagtcttcggaatctgacattgagagcgtcatatataccattgaagccgtcgcaaaaggagactggggcatagagaaacttggagatacccctcgcaagaaggtccgcacatcctcaagtggcaagggaagcattttggatgccaagccaccaaagaaaaaagtgaaatcaagagagaagaaaatgtcaaaggagaaatcctcagacaccaccaaagagtcaagacctccagatttcattagtatttctgctagcaagaacatttctggtgagacaccagagggtataaaagcagaaccattgacccctatggaagatgcactaccacccagcctatcaggacaggccaagcctgaggacagtgactgtcacagaaaaatagaaacttgtggttccaggaaatccgagaggtcttgcaaaggtgctctttataaaaccctggtgtctgagggcatgctcacctctctgcgagctaatgttgacagaggaaaacgaagctcaggaaaaggaaactcctctgatcatgaagggtgttggaatgaagaaagctggacatttagtcagagtgggaccagtgggagcaagaagttcaagaagacaaagccaaaagaagactgtctccttggctccgcaaagctggatgaagaatttgaaaaaaaattcaacagcctccctcaatatagtcctgttacatttgaccggaaatgtgtacctgtcccaagaaaaaagaagaagactggaaatgtgtcctcagaaccgactaaaaccagcaaaggtcctttccagtctcagaaaaagaacttattccacaaaattgtcagcaaatataagcacaaaaaggagaagcccaatgttccggaaaaaggaagtggggataaatggtcaaacaagcaactcttcttggatgccattcaccctacagaagccatattttcagaagacagaaacaccatggagcctgttcataaggttaaaaatatcccatccattttcaacactccagagccaacaacaacgcaagaacctttggtgggcagccaaaagagaaaagcaaggaaaaccaagattacacaccttgtcaggacagcagatggccgggtatcaccagcaggaggtactttggatgacaaaccaaaggaacaactgcagaggagtctccctaaagcaactgagacagactgcaatgacaaatgctcacacaacaccgaggtcggggagacgcggagcagtactccagaaatgcctgccgtgtctgcgttctttagcctcgctgcgctggctgaagtggcagccatggaaaatgtgcacagaggtcagaggtcaactccgctcacccatgatggacagccaaaagaaatgccgcaggctcctgtacttatttcctgcgctgaccagtgaagcgccctttcattgtaaaacattgtgctttacctactaccctagccttgtctttaccgagggatgctagtgagtccaagtggtggaaaatatagactgcaaacaagtgcttgttgccccacacggcccagattcacttgaagcagaagttagcatcctgggccagtttgttctctcagaacccagaatctttgagggtaaggttatctgtctgatactgagcagaaacagaatgatcctggagctttgctttctattgaaggcttttgacggtaataggtggtaacttggtaaaaggctgcctttactgtagctcacccagcatctcttttaccaaccagagagtgtgaaactagtttcatatattacctagttattctttcaaaacaaaacaaaaaaaaaacaaaaactgacgcactgcactagttattattagatattcttagtcttttttgtacatggagatttaagtttaagatggtttatataataggttatacctacatttatattgtagaataaatattaaaaagcctgttccagagactcccaagcagcctgggcaggcagatgtaccattgttagtggtgtatgctcggcctcgtggtccatatattctgcacttttatatttgccaccagaatggtagtttgctggcaaaaaaaaaaaaaagagagagagaaaaaattacaactcttacaatctgaatttttttcttagccttgagtgaccaagaagaatttgcttgaggcaaattgtggcaaatattttcccagacaggggaagagtcctgcagattacagattactggtgttttcatgccttgaggattcttttatttttacataggggtctaagtgaccaatggattgttcatacaaacaaaaaaaaagacaaaaatattattcagaagtgaccttagtattacttcactattctaaacacattgaagacactcacttcatgtggacttggagctacagaccttttacatccatcacagattggctggacgggttgcaattgctatgcacagcctgattggcactgcaggtttttagagccattttgagtttgtgttgtttaggaggtactgagtcaatgatgagggaggtatgcctgaccagagtgggactctcagtcatagatccacctgcaagtctctgtttcctttttgtgttttgttgcttttgaacataaaaccaaccatacataagcagcgccaagtggattaactggcttagaacattcaacatattgacttaaccacctgacattcacagtgtcttgtttcctagcaacagatgcaaagtgataaatcaaaattagtctgaggctacagattttacagggtatttgttctatagcacaaagtatttccccactcttgcgtcacagcacaaactaccaaattttaattattggattccagcaataatttttaatggttttcaaactggcggaattttgacagtgctagttcgagtttgaagcttttgaattagatctctaaatggtgacagtttacatggttttatctagctttcttatttatacttgactgaattgtaatgattttttttctaattgtaatttgacgtaatagccatacaaaaaatgactctattcatactaggtttagcttctcatggttgtagatattacttcagttccggtgctggaaaatatgtacaacatactaacaggattgaaaaaaaaatagaggtttttcttcttgtttttttttccaaagcaggtaaagagggtagcaaagcatcggaatgatgtgctcaaaaatgcatattcctggtggggatggaggaagaaggcattagtaaaaggttaatcaaacgttacaacttaaccccattcatgtaggaataaatcaagtgagcagttccagacttttgcataatatttttactatgatgctgttttattaatattttctaaatttcaaaacaaaaagtgaatgtttgaaattgctgggtcccgatgttggtggctgttggagttttggaccactcgctagcagtgatttgaagattataattagctaaaatccaaaacaaaaaaccaacaacaaaaattgtatggtgcggaacatgcaccttgacaatggtactaacttgttattctatagaacacgttagaatagatctatttttgccagagcaccctccttcagtcctccgattacatttcactagagttccttacgagattgctgtatattcctgggacctttttttaaaaaaaaaaaaagcaaaacaaaagattactttttttctatgtgattaatatcttacttgatctgcttttcctaaacctcagtggcttttcccttaggcagggttgggggtgggagggcaacttactggagatgactgttttcagatactttaaaacaaacctttttgtagaaatgcttaatttttaagcggttaggcactgagagtagcagaaatcctgcaaagctttatagttccttagactcaccttgtcgattctctgagtaaagtcttgatttcaataattgtgcttctcatgccctgaatctgctggagaggagtgttgttattttcaggtaacaacattcgttagcacaaatatttcagaccaatattagtgctctccaccccaccttttgttatcattttcatttcatttctctcattcttttttattttggaaaatcatattgctatagtgtgtactttaatctgccagcagataccatctacactaacatttgtcccacagcatcctcaagagaaaaagttgttgcaccttatatatatctcaagcaaaccaaaatatgatgctcttctgctttgttttattctaaattgttgtatcatatctttctgaaaccattctgaatttagttgaaattatcaatatttatgcttttaaccttaatttctggattcaagcctgtatataaatcttttgaaaaaaaattgtcctagcccttctctgcgatgctggaagtagaagattgcgtctcagatggagacgcagtactgttccagttttctttagccttttatttatttagttattctgggtatttcctatgtaattttgaagtgtgtagagtatattatagtaactgaagctgcagctgtaagaagctgagtgaaagaaaaaatactgtaagacatccttaaagtttttatttgtttgggtactgtatatgagatcaggaaaaagaaaaatgtcccacagccacattggaaatacaggttcttgtccccaaattaggttagttcccagattttagatcaaaactgttaattcattaaaaccccttttaaaaggtaaattctactgttgtaattccgatagtctttttcccacaaatatcagaaatatatttatttaattctgtcagatgagctttctaccgatgccatgtcccaaagccatgttaaaataattcccacgttatcattgtgattctacttcctgccactaaaattgctggagaaacaaaataatgatggaacactatgaacaaaaaggagcatctgaactggtctggttatttagaatccaatgtgttcaaatccttttgttttcttattaagtcagatgctactgtaagtcagataaaattttgtttgcactctgcagtctttggctcaatgtatggaaatgtttgcacctatgtaaagtcacaagctaattacaaattgctacagaacaggagtaagctgaaaactgaatgccatgttttgtttataaggtggggaggggagggaaaataccaaaaaactctgttccaagtttggcatttgacattaatgtgaagcagtgggaccatgctgcctgctaaactactgtatgaatcgtaaatgttctgaagacgagcagctggaggctggaggatggcattccatacagcaaaggagaagcacccaccacttcatctgggaaaaggaaggaaattgcaggaggcctggagccatcatttgtaaaggggatgttgcggggtgtgatgctgttgaggagattcaccttcaattgcactgctccacagagccctcatataaggccaatcctaatgggctacctcggctttaaaagttaatttcagtaagtcctgtttcaaaagtttgtctttttttgcttctaccttcagtgccactattttccactgcagtgttttgacttcacaaactgcctcctccagagagaacaatgtattgctgaaaatgggcagtagaagcaaatgctgttgttacatttgacctataaagtattcagagtgactgctaggtagaaattaaaacttagctttcccaaatagctccttattttgcaccttataaaaagtatactaattgttaattagatgttgcttttgtttatacaagcattcccaaagaactagatttggattttgttttgagtttttggatttttaaaaattatcttatttagattgactaacagcatacttacaattttaaaagaagctgttgttcagttcatcttaccagatgtgtctggcgaagtattcagggtttgatggactgctttactttcgtttggaagtgatagctaagtttattatactctatattaaacaactttgttcatttcactgaggaccttatcttccttatatttcagaacaaagaagcaacaagcgtgaataaaaagacaaatgtatttgactccctcataatccccatctgtatgtgctacccttccttcaaatatataaatgtgcatctttttttttaaaaaaaaaaaaaaaaaggttcctcttctggccaaatttgatctatggtggtatgattcatactgttaaattgagagaggaaaccttgtggttaaaaattatatggctgctgttttctttttgcagtcagtggtcaaaactgatcatgtgcttaaatcgatttttatgcacagaactagttattgtgaacattactgctccctccaaagatttcctgataacttgggccagaggtggttactgagtaacaaggatctaattcaatgcctcaaaactcttccacccacaatgcaaatcttacctcacaagctctaacctaaatcacagagacatgcatgtttcatgcattaacactgatttcgctctgtggcccaccagaggggtgggctcatgtcccctgactcctcacatgagtgcctcagctctaagagccgtggaacggggggtagggaaggtttgcgatctggagctcagcaactggctcagcaacgttttctccatttcattagcactaaacaagtctcttgctctcaggaatttgtcagaaaaaagaataaaatcacctgagactccacataccagattataaactcttctcgtaggtttgaattgcttactcacatgtcataaattaaccacagcttcatttgaccaccaggtctaaagtctgttgacagtttcagcatgactgaatcgctcattttttttttttgctttcagaaattggcttggttctctttagagttggtgtaaacatgccatgtaataaatgatttccacttaatggtacaacagaattattgctttcttagatgtatgtgtagtaaaagtcaatatacacatttatataatttctttcttcaaaatcttatacctaatttgatatttctaaaaattgcacatgtaagtcatgtgtataacatgctaaagtactttaactgtgatcttaaaactgaataaaaatatttaataaaactttgaa

SEQ ID NO: 314081 - DNA, 258 bp, Homo sapiens
gcacgagcggcacgagcggcacgagtttttaaaggaaacaaactctcaaatcatgaagtgatataaaagctgcatatgcctacaaagctctgaattcaggtcccagttgctgtcacaaaggagtgagtgaaactcccaccctacccccttttttatataataaaagtgccttagcatgtgttgcagctgtcaccactacagtaagctggtttacagatgttttccactgagcatcacaataaagagaaccatgtgcta

SEQ ID NO: 314082 - DNA, 254 bp, Homo sapiens
ttcggcacgagaactagtctctttttaaaggaaacaaactctcaaatcatgaagtgatataaaagctgcatatgcctacaaagctctgaattcaggtcccagttgctgtcacaaaggagtgagtgaaactcccaccctacccccttttttatataataaaagtgccttagcatgtgttgcagctgtcaccactacagtaagctggtttacagatgttttccactgagcatcacaataaagagaaccatgtgcta

SEQ ID NO: 314083 - DNA, 230 bp, Homo sapiens
  misc_feature (21)..(21): n is a, c, g, or t
agcacattggttcttctttanttgtgatgcttcagtggaaaacatctgtaaaccagcttactgtagtggtcccagttgctgtcacaaaggagtgagtgaaactcccaccctacccccttttttatataataaaagtgccttagcatgtgttgcagctgtcaccactacagtaagctggttagcacatggttctctttattgtgatgctcagtggaactcgtgctgtaaac

SEQ ID NO: 314084 - DNA, 508 bp, Homo sapiens
cccacggactcaacccagttacctcacatggggcctcttctgagcaaggtctcgaaagcgcaggccgccctggctgagcagcaccgccctttcccagctgcagctcgcccctgagttaactcaggggcgagctgcagcgcgagctggaggacgccactgagacggccgatgccatgaaccgcgaagtcagctccctaaagaacaagctcaggcgcggggacctgccgtttgtcgtgccccgccgaatggcccggaaaggcgccggggatggctccgacgaagaggtagatggcaaagcggatggggctgaggccaaacctgccgaataagcctcttctcctgcagcctgagatggatggacagacagacaccacagcctccccttcccagaccccgcagcctgagttagcagctcgcccctgagttagcagctcgcgcctgagttagcagctcgccctgagtaagcagctgccctggagtagagctcgccatgaggggccgagctcat

SEQ ID NO: 314085 - DNA, 344 bp, Homo sapiens
  misc_feature (190)..(190): n is a, c, g, or t
  misc_feature (283)..(283): n is a, c, g, or t
  misc_feature (315)..(315): n is a, c, g, or t
cgtccttcatcatacctacccaccgaggcgaagctgaaaaagctggaggaggagcagatcatcctggaggaccagaactgcaagctggccaaggataagaaactggaagatgggaagatgatggcagattacggcatcagaaagggcaacttactcttcctggcatcttattgtattggagggtgaccancctgggcatggggtgttggcaggggtcaaaaagcttatttcttttaatctcttactcaacgacacatcttctgatgatttcccaaaattaatnagaatgagatgagtagagtaagatttgggtgnggtaggtatgatagaggacgggggtccta

SEQ ID NO: 314086 - DNA, 485 bp, Homo sapiens
gtgccccaggcaagggtagacccccagaaaagcttgaggacaagaccaggactgttaggtcgggtctgctgtccactgctccgcgctgaccatgttcctcaccacacagagcatttgccaagcggcagcagcagcttaccgccatgaaggtcctccagcggaactgcgctgcctacctgaagctgcggaactggcagtggtggcggctcttcaccaaggtgcgtgctagaagggcctcctgagtagctgggactacgggtgcacaccaccatacatacctgggctaattgtttgtattttttgtagaggtgtggtctcaccatgtcgcccaggttggtcacaaactcttgggctccagcaatcctcctacctcagcctcccaaagtgctgggaattacaggcatgagccactgtgcccggccctttttgatttttagtagagacaaggtcttcactattcttgcccaggctgaccttcctggcct

SEQ ID NO: 314087 - DNA, 83 bp, Homo sapiens
ccttgtctggggagtgcccacgtggccagggcccaccttgctatatcagtggtcggtggatgcccaggctgtgtcccttctga

SEQ ID NO: 314088 - DNA, 6956 bp, Homo sapiens
  misc_feature (449)..(449): n is a, c, g, or t
ggctcgcgagcagataccttcgtggagaaggtgatgcaggagcagggcacccaccccaagttccagaagcccaagcagctgaaggacaaagctgatttctgcattatccactatgccggcaaggtggattacaaagctgacgagtggctgatgaagaacatggatcccctgaatgacaacatcgccacactgctccaccagtcctctgacaagtctgtctcggagctgtggaaggatgtggaccgcatcatcggcctggaccaggtggccggcatgtcggagaccgcactgcccggggccttcaagacgcggaagggcatgttccgcactgtggggcagctttacaaggagcagctggccaagctgatggctacgctgaggaacacgaaccccaactttgtccgctgcatcatccccaacacgagaagaaggccggcaagctggacccncatctcgtgctggaccagctgcgctgcaacggtgttctcgagggcatccgtatctgccgccagggcttctccaacagggtggtcttccaggagtttcggcagagccgatctcctgttggagccgtacaacaaataccgcttcctgtccaatggacacgtcaccatccccgggcagcaggacaaggacatgttccaggagaccatggaggccatgaggattatgggcatcccagaagaggagcaaatgggcctgctgcgggtcatctcaggggttcttcagctcggcaacatcgtcttcaagaaggagcggaacactgaccaggcgtccatgcccgacaacacagctgcccaaaaggtgtcccatctcttgggtatcaatgtgaccgatttcaccagaggaatcctcaccccgcgcatcaaggtgggacgggattacgtccagaaggcgcagactaaagagcaggctgactttgccatcgaggccttggccaaggcgacctatgagcggatgttccgctggctggtgctgcgcatcaacaaggctctggacaagaccaagaggcagggcgcctccttcatcgggatcctggacattgccggcttcgagatctttgatctgaactcgtttgagcagctgtgcatcaattacaccaatgagaagctgcagcagctcttcaaccacaccatgttcatcctggagcaggaggagtaccagcgcgagggcatcgagtggaacttcatcgactttggcctcgacctgcagccctgcatcgacctcattgagaagccagcaggccccccgggcattctggccctgctggacgaggagtgctggttccccaaagccaccgacaagagcttcgtggagaaggtgatgcaggagcagggcacccaccccaagttccagaagcccaagcagctgaaggacaaagctgatttctgcattatccactatgccggcaaggtggattacaaagctgacgagtggctgatgaagaacatggatcccctgaatgacaacatcgccacactgctccaccagtcctctgacaagtttgtctcggagctgtggaaggatgtggaccgcatcatcggcctggaccaggtggccggcatgtcggagaccgcactgcccggggccttcaagacgcggaagggcatgttccgcactgtggggcagctttacaaggagcagctggccaagctgatggctacgctgaggaacacgaaccccaactttgtccgctgcatcatccccaaccacgagaagaaggccggcaagctggacccgcatctcgtgctggaccagctgcgctgcaacggtgttctcgagggcatccgtatctgccgccagggcttccccaacagggtggtcttccaggagtttcggcagagatatgagatcctgactccaaactccattcccaagggtttcatggacgggaagcaggcgtgcgtgctcatgataaaagccctggagctcgacagcaatctgtaccgcattggccagagcaaagtcttcttccgtgccggtgtgctggcccacctggaggaggagcgagacctgaagatcaccgacgtcatcatagggttccaggcctgctgcaggggctacctggccaggaaagcatttgccaagcggcagcagcagcttaccgccatgaaggtcctccagcggaactgcgctgcctacctgaagctgcggaactggcagtggtggcggctcttcaccaaggtcaagccgctgctgcaggtgagccggcaggaggaggagatgatggccaaggaggaggagctggtgaaggtcagagagaagcagctggctgcggagaacaggctcacggagatggagacgctgcagtctcagctcatggcagagaaattgcagctgcaggagcagctccaggcagaaaccgagctgtgtgccgaggctgaggagctccgggcccgcctgaccgccaagaagcaggaattagaagagatctgccatgacctagaggccagggtggaggaggaggaggagcgctgccagcacctgcaggcggagaagaagaagatgcagcagaacatccaggagcttgaggagcagctggaggaggaggagagcgcccggcagaagctgcagctggagaaggtgaccaccgaggcgaagctgaaaaagctggaggaggagcagatcatcctggaggaccagaactgcaagctggccaaggaaaagaaactgctggaagacagaatagctgagttcaccaccaacctcacagaagaggaggagaaatctaagagcctcgccaagctcaagaacaagcatgaggcaatgatcactgacttggaagagcgcctccgcagggaggagaagcagcgacaggagctggagaagacccgccggaagctggagggagactccacagacctcagcgaccagatcgccgagctccaggcccagatcgcggagctcaagatgcagctggccaagaaagaggaggagctccaggccgccctggccagagtggaagaggaagctgcccagaagaacatggccctcaagaagatccgggagctggaatctcagatctctgaactccaggaagacctggagtctgagcgtgcttccaggaataaagctgagaagcagaaacgggaccttggggaagagctagaggcgctgaaaacagagttggaggacacgctggattccacagctgcccagcaggagctcaggtcaaaacgtgagcaggaggtgaacatcctgaagaagaccctggaggaggaggccaagacccacgaggcccagatccaggagatgaggcagaagcactcacaggccgtggaggagctggcggagcagctggagcagacgaagcgggtgaaagcaaacctcgagaaggcaaagcagactctggagaacgagcggggggagctggccaacgaggtgaaggtgctgctgcagggcaaaggggactcggagcacaagcgcaagaaagtggaggcgcagctgcaggagctgcaggtcaagttcaacgagggagagcgcgtgcgcacagagctggccgacaaggtcaccaagctgcaggtggagctggacaacgtgaccgggcttctcagccagtccgacagcaagtccagcaagctcaccaaggacttctccgcgctggagtcccagctgcaggacactcaggagctgctgcaggaggagaaccggcagaagctgagcctgagcaccaagctcaagcaggtggaggacgagaagaattccttccgggagcagctggaggaggaggaggaggccaagcacaacctggagaagcagatcgccaccctccatgcccaggtggccgacatgaaaaagaagatggaggacagtgtggggtgcctggaaactgctgaggaggtgaagaggaagctccagaaggacctggagggcctgagccagcggcacgaggagaaggtggccgcctacgacaagctggagaagaccaagacgcggctgcagcaggagctggacgacctgctggtggacctggaccaccagcgccagagcgcgtgcaacctggagaagaagcagaagaagtttgaccagctcctggcggaggagaagaccatctctgccaagtatgcagaggagcgcgaccgggctgaggcggaggcccgagagaaggagaccaaggctctgtcgctggcccgggccctggaggaagccatggagcagaaggcggagctggagcggctcaacaagcagttccgcacggagatggaggaccttatgagctccaaggatgatgtgggcaagagtgtccacgagctggagaagtccaagcgggccctagagcagcaggtggaggagatgaagacgcagctggaagagctggaggacgagctgcaggccaccgaagatgccaagctgcggttggaggtcaacctgcaggccatgaaggcccagttcgagcgggacctgcagggccgggacgagcagagcgaggagaagaagaagcagctggtcagacaggtgcgggagatggaggcagagctggaggacgagaggaagcagcgctcgatggcagtggccgcccggaagaagctggagatggacctgaaggacctggaggcgcacatcgactcggccaacaagaaccgggacgaagccatcaaacagctgcggaagctgcaggcccagatgaaggactgcatgcgcgagctggatgacacccgcgcctctcgtgaggagatcctggcccaggccaaagagaacgagaagaagctgaagagcatggaggccgagatgatccagttgcaggaggaactggcagccgcggagcgtgccaagcgccaggcccagcaggagcgggatgagctggctgacgagatcgccaacagcagcggcaaaggagccctggcgttagaggagaagcggcgtctggaggcccgcatcgcccagctggaggaggagctggaggaggagcagggcaacacggagctgatcaacgaccggctgaagaaggccaacctgcagatcgaccagatcaacaccgacctgaacctggagcgcagccacgcccagaagaacgagaatgctcggcagcagctggaacgccagaacaaggagcttaaggtcaagctgcaggagatggagggcactgtcaagtccaagtacaaggcctccatcaccgccctcgaggccaagattgcacagctggaggagcagctggacaacgagaccaaggagcgccaggcagcctgcaaacaggtgcgtcggaccgagaagaagctgaaggatgtgctgctgcaggtggatgacgagcggaggaacgccgagcagtacaaggaccaggccgacaaggcatctacccgcctgaagcagctcaagcggcagctggaggaggccgaagaggaggcccagcgggccaacgcctcccgccggaaactgcagcgcgagctggaggacgccactgagacggccgatgccatgaaccgcgaagtcagctccctaaagaacaagctcaggcgcggggacctgccgtttgtcgtgccccgccgaatggcccggaaaggcgccggggatggctccgacgaagaggtagatggcaaagcggatggggctgaggccaaacctgccgaataagcctcttctcctgcagcctgagatggatggacagacagacaccacagcctccccttcccagaccccgcagcacgcctctccccaccttcttgggactgctgtgaacatgcctcctcctgccctccgccccgtccccccatcccgtttccctccaggtgttgttgagggcatttggcttcctctgctgcatccccttccagctccctcccctgctcagaatctgataccaaagagacagggcccgggcccaggcagagagcgaccagcaggctcctcagccctctcttgccaaaaagcacaagatgttgaggcgagcagggcaggcccccggggaggggccagagttttctatgaatctatttttcttcagactgaggccttttggtagtcggagcccccgcagtcgtcagcctccctgacgtctgccaccagcgcccccactcctcctcctttctttgctgtttgcaatcacacgtggtgacctcacacacctctgccccttgggcctcccactcccatggctctgggcggtccagaaggagcaggccctgggcctccacctctgtgcagggcacagaaggctggggtggggggaggagtggattcctccccaccctgtcccaggcagcgccactgtccgctgtctccctcctgattctaaaatgtctcaagtgcaatgccccctcccctcctttaccgaggacagcctgcctctgccacagcaaggctgtcggggtcaagctggaaaggccagcagccttccagtggcttctcccaacactcttggggaccaaatatatttaatggttaagggacttgtcccaagtctgacagccagagcgttagaggggccagcggccctcccaggcgatcttgtgtctactctaggactgggcccgagggtggtttacctgcaccgttgactcagtatagtttaaaaatctgccacctgcacaggtatttttgaaagcaaaataaggttttcttttttcccctttcttgtaataaatgataaaattccgagtctttctcactgcctttgtttagaagagagtagctcgtcctcactggtctacactggttgccgaatttacttgtattcctaactgttttgtatatgctgcattgagacttacggcaagaaggcattttttttttttaaaggaaacaaactctcaaatcatgaagtgatataaaagctgcatatgcctacaaagctctgaattcaggtcccagttgctgtcacaaaggagtgagtgaaactcccaccctacccccttttttatataataaaagtgccttagcatgtgttgcagctgtcaccactacagtaagctggtttacagatgttttccactgagcatcacaataaagagaaccatgtgcta

SEQ ID NO: 314089 - DNA, 6751 bp, Homo sapiens
  misc_feature (6686)..(6686): n is a, c, g, or t
  misc_feature (6689)..(6690): n is a, c, g, or t
  misc_feature (6699)..(6699): n is a, c, g, or t
  misc_feature (6712)..(6712): n is a, c, g, or t
  misc_feature (6714)..(6714): n is a, c, g, or t
  misc_feature (6723)..(6723): n is a, c, g, or t
  misc_feature (6729)..(6730): n is a, c, g, or t
  misc_feature (6732)..(6732): n is a, c, g, or t
  misc_feature (6738)..(6738): n is a, c, g, or t
cccgatattcggtcagtgggtgatagcaaaacctcgggtacgccaagaccgtgaagaatgacgaactcctcccgcttcggcaaattcattcgcatcaactttgatgtcaatggctacattgttggagccaacattgagacttatcttttggagaaatctcgtgctatccgccaagccaaggaagaacggaccttccacatcttctattatctcctgtctggggctggagagcacctgaagaccgatctcctgttggagccgtacaacaaataccgcttcctgtccaatggacacgtcaccatccccgggcagcaggacaaggacatgttccaggagaccatggaggccatgaggattatgggcatcccagaagaggagcaaatgggcctgctgcgggtcatctcaggggttcttcagctcggcaacatcgtcttcaagaaggagcggaacactgaccaggcgtccatgcccgacaacacagctgcccaaaaggtgtcccatctcttgggtatcaatgtgaccgatttcaccagaggaatcctcaccccgcgcatcaaggtgggacgggattacgtccagaaggcgcagactaaagagcaggctgactttgccatcgaggccttggccaaggcgacctatgagcggatgttccgctggctggtgctgcgcatcaacaaggctctggacaagaccaagaggcagggcgcctccttcatcgggatcctggacattgccggcttcgagatctttgatctgaactcgtttgagcagctgtgcatcaattacaccaatgagaagctgcagcagctcttcaaccacaccatgttcatcctggagcaggaggagtaccagcgcgagggcatcgagtggaacttcatcgactttggcctcgacctgcagccctgcatcgacctcattgagaagccagcaggccccccgggcattctggccctgctggacgaggagtgctggttccccaaagccaccgacaagagcttcgtggagaaggtgatgcaggagcagggcacccaccccaagttccagaagcccaagcagctgaaggacaaagctgatttctgcattatccactatgccggcaaggtggattacaaagctgacgagtggctgatgaagaacatggatcccctgaatgacaacatcgccacactgctccaccagtcctctgacaagtttgtctcggagctgtggaaggatgtggaccgcatcatcggcctggaccaggtggccggcatgtcggagaccgcactgcccggggccttcaagacgcggaagggcatgttccgcactgtggggcagctttacaaggagcagctggccaagctgatggctacgctgaggaacacgaaccccaactttgtccgctgcatcatccccaaccacgagaagaaggccggcaagctggacccgcatctcgtgctggaccagctgcgctgcaacggtgttctcgagggcatccgtatctgccgccagggcttccccaacagggtggtcttccaggagtttcggcagagatatgagatcctgactccaaactccattcccaagggtttcatggacgggaagcaggcgtgcgtgctcatgataaaagccctggagctcgacagcaatctgtaccgcattggccagagcaaagtcttcttccgtgccggtgtgctggcccacctggaggaggagcgagacctgaagatcaccgacgtcatcatagggttccaggcctgctgcaggggctacctggccaggaaagcatttgccaagcggcagcagcagcttaccgccatgaaggtcctccagcggaactgcgctgcctacctgaagctgcggaactggcagtggtggcggctcttcaccaaggtcaagccgctgctgcaggtgagccggcaggaggaggagatgatggccaaggaggaggagctggtgaaggtcagagagaagcagctggctgcggagaacaggctcacggagatggagacgctgcagtctcagctcatggcagagaaattgcagctgcaggagcagctccaggcagaaaccgagctgtgtgccgaggctgaggagctccgggcccgcctgaccgccaagaagcaggaattagaagagatctgccatgacctagaggccagggtggaggaggaggaggagcgctgccagcacctgcaggcggagaagaagaagatgcagcagaacatccaggagcttgaggagcagctggaggaggaggagagcgcccggcagaagctgcagctggagaaggtgaccaccgaggcgaagctgaaaaagctggaggaggagcagatcatcctggaggaccagaactgcaagctggccaaggaaaagaaactgctggaagacagaatagctgagttcaccaccaacctcacagaagaggaggagaaatctaagagcctcgccaagctcaagaacaagcatgaggcaatgatcactgacttggaagagcgcctccgcagggaggagaagcagcgacaggagctggagaagacccgccggaagctggagggagactccacagacctcagcgaccagatcgccgagctccaggcccagatcgcggagctcaagatgcagctggccaagaaagaggaggagctccaggccgccctggccagagtggaagaggaagctgcccagaagaacatggccctcaagaagatccgggagctggaatctcagatctctgaactccaggaagacctggagtctgagcgtgcttccaggaataaagctgagaagcagaaacgggaccttggggaagagctagaggcgctgaaaacagagttggaggacacgctggattccacagctgcccagcaggagctcaggtcaaaacgtgagcaggaggtgaacatcctgaagaagaccctggaggaggaggccaagacccacgaggcccagatccaggagatgaggcagaagcactcacaggccgtggaggagctggcggagcagctggagcagacgaagcgggtgaaagcaaacctcgagaaggcaaagcagactctggagaacgagcggggggagctggccaacgaggtgaaggtgctgctgcagggcaaaggggactcggagcacaagcgcaagaaagtggaggcgcagctgcaggagctgcaggtcaagttcaacgagggagagcgcgtgcgcacagagctggccgacaaggtcaccaagctgcaggtggagctggacaacgtgaccgggcttctcagccagtccgacagcaagtccagcaagctcaccaaggacttctccgcgctggagtcccagctgcaggacactcaggagctgctgcaggaggagaaccggcagaagctgagcctgagcaccaagctcaagcaggtggaggacgagaagaattccttccgggagcagctggaggaggaggaggaggccaagcacaacctggagaagcagatcgccaccctccatgcccaggtggccgacatgaaaaagaagatggaggacagtgtggggtgcctggaaactgctgaggaggtgaagaggaagctccagaaggacctggagggcctgagccagcggcacgaggagaaggtggccgcctacgacaagctggagaagaccaagacgcggctgcagcaggagctggacgacctgctggtggacctggaccaccagcgccagagcgcgtgcaacctggagaagaagcagaagaagtttgaccagctcctggcggaggagaagaccatctctgccaagtatgcagaggagcgcgaccgggctgaggcggaggcccgagagaaggagaccaaggctctgtcgctggcccgggccctggaggaagccatggagcagaaggcggagctggagcggctcaacaagcagttccgcacggagatggaggaccttatgagctccaaggatgatgtgggcaagagtgtccacgagctggagaagtccaagcgggccctagagcagcaggtggaggagatgaagacgcagctggaagagctggaggacgagctgcaggccaccgaagatgccaagctgcggttggaggtcaacctgcaggccatgaaggcccagttcgagcgggacctgcagggccgggacgagcagagcgaggagaagaagaagcagctggtcagacaggtgcgggagatggaggcagagctggaggacgagaggaagcagcgctcgatggcagtggccgcccggaagaagctggagatggacctgaaggacctggaggcgcacatcgactcggccaacaagaaccgggacgaagccatcaaacagctgcggaagctgcaggcccagatgaaggactgcatgcgcgagctggatgacacccgcgcctctcgtgaggagatcctggcccaggccaaagagaacgagaagaagctgaagagcatggaggccgagatgatccagttgcaggaggaactggcagccgcggagcgtgccaagcgccaggcccagcaggagcgggatgagctggctgacgagatcgccaacagcagcggcaaaggagccctggcgttagaggagaagcggcgtctggaggcccgcatcgcccagctggaggaggagctggaggaggagcagggcaacacggagctgatcaacgaccggctgaagaaggccaacctgcagatcgaccagatcaacaccgacctgaacctggagcgcagccacgcccagaagaacgagaatgctcggcagcagctggaacgccagaacaaggagcttaaggtcaagctgcaggagatggagggcactgtcaagtccaagtacaaggcctccatcaccgccctcgaggccaagattgcacagctggaggagcagctggacaacgagaccaaggagcgccaggcagcctgcaaacaggtgcgtcggaccgagaagaagctgaaggatgtgctgctgcaggtggatgacgagcggaggaacgccgagcagtacaaggaccaggccgacaaggcatctacccgcctgaagcagctcaagcggcagctggaggaggccgaagaggaggcccagcgggccaacgcctcccgccggaaactgcagcgcgagctggaggacgccactgagacggccgatgccatgaaccgcgaagtcagctccctaaagaacaagctcaggcgcggggacctgccgtttgtcgtgccccgccgaatggcccggaaaggcgccggggatggctccgacgaagaggtagatggcaaagcggatggggctgaggccaaacctgccgaataagcctcttctcctgcagcctgagatggatggacagacagacaccacagcctccccttcccagaccccgcagcacgcctctccccaccttcttgggactgctgtgaacatgcctcctcctgccctccgccccgtccccccatcccgtttccctccaggtgttgttgagggcatttggcttcctctgctgcatccccttccagctccctcccctgctcagaatctgataccaaagagacagggcccgggcccaggcagagagcgaccagcaggctcctcagccctctcttgccaaaaagcacaagatgttgaggcgagcagggcaggcccccggggaggggccagagttttctatgaatctatttttcttcagactgaggccttttggtagtcggagcccccgcagtcgtcagcctccctgacgtctgccaccagcgcccccactcctcctcctttctttgctgtttgcaatcacacgtggtgacctcacacacctctgccccttgggcctcccactcccatggctctgggcggtccagaaggagcaggccctgggcctccacctctgtgcagggcacagaaggctggggtggggggaggagtggattcctccccaccctgtcccaggcagcgccactgtccgctgtctccctcctgattctaaaatgtctcaagtgcaatgccccctcccctcctttaccgaggacagcctgcctctgccacagcaaggctgtcggggtcaagctggaaaggccagcagccttccagtggcttctcccaacactcttggggaccaaatatatttaatggttaagggacttgtcccaagtctgacagccagagcgttagaggggccagcggccctcccaggcgatcttgtgtctactctaggactgggcccgagggtggtttacctgcaccgttgactcagtatagtttaaaaatctgccacctgcacaggtatttttgaaagcaaaataaggttttcttttttcccctttcttgtaataaatgataaaattccgagtctttctcactgcctttgtttagaagagagtagctcgtcctcactggtctacactggttgccgaatttacttgtattcctaactgttttgtatatgctgcattgagacttacggcaagaaggcattttttttttttaaaggaaacaaactctcaaatcatgaagtgatataaaagctgcatatgcctacaaagctctgaattcaggtcccagttgctgtcacaaaggagtgagtgaaactcccaccctacccccttttttatataataaaagtgccttagcatgtgttgcagctgtcaccactacagtaagctggtttacagatgttttccactgagcatcacaataaagagaaccatgtgctaaaaaaaaaaaaaaaaaaaaaaaaaaaaactgtgtgtgggggngcnncgggcccgnagaaaaagctttntnaacacccantcggtnngngggcgnggcgggggcccca

SEQ ID NO: 314090 - DNA, 5325 bp, Homo sapiens
cgccacagcttcgtccctcattcattcattcattcagtccacaactacttattgaattcttgccttatgccaggcactgaggagagatctgtgaacataccaggcaaaaatctcagcctttatggggtgcattgttgggcaatacagatcaccaaatgaatacaggcgccacagcttctccaacagggtggtcttccaggagtttcggcagagatatgagatcctgactccaaactccattcccaagggtttcatggacgggaagcaggcgtgcgtgctcatgataaaagccctggagctcgacagcaatctgtaccgcattggccagagcaaagtcttcttccgtgccggtgtgctggcccacctggaggaggagcgagacctgaagatcaccgacgtcatcatagggttccaggcctgctgcaggggctacctggccaggaaagcatttgccaagcggcagcagcagcttaccgccatgaaggtcctccagcggaactgcgctgcctacctgaagctgcggaactggcagtggtggcggctcttcaccaaggtcaagccgctgctgcaggtgagccggcaggaggaggagatgatggccaaggaggaggagctggtgaaggtcagagagaagcagctggctgcggagaacaggctcacggagatggagacgctgcagtctcagctcatggcagagaaattgcagctgcaggagcagctccaggcagaaaccgagctgtgtgccgaggctgaggagctccgggcccgcctgaccgccaagaagcaggaattagaagagatctgccatgacctagaggccagggtggaggaggaggaggagcgctgccagcacctgcaggcggagaagaagaagatgcagcagaacatccaggagcttgaggagcagctggaggaggaggagagcgcccggcagaagctgcagctggagaaggtgaccaccgaggcgaagctgaaaaagctggaggaggagcagatcatcctggaggaccagaactgcaagctggccaaggaaaagaaactgctggaagacagaatagctgagttcaccaccaacctcacagaagaggaggagaaatctaagagcctcgccaagctcaagaacaagcatgaggcaatgatcactgacttggaagagcgcctccgcagggaggagaagcagcgacaggagctggagaagacccgccggaagctggagggagactccacagacctcagcgaccagatcgccgagctccaggcccagatcgcggagctcaagatgcagctggccaagaaagaggaggagctccaggccgccctggccagagtggaagaggaagctgcccagaagaacatggccctcaagaagatccgggagctggaatctcagatctctgaactccaggaagacctggagtctgagcgtgcttccaggaataaagctgagaagcagaaacgggaccttggggaagagctagaggcgctgaaaacagagttggaggacacgctggattccacagctgcccagcaggagctcaggtcaaaacgtgagcaggaggtgaacatcctgaagaagaccctggaggaggaggccaagacccacgaggcccagatccaggagatgaggcagaagcactcacaggccgtggaggagctggcggagcagctggagcagacgaagcgggtgaaagcaaacctcgagaaggcaaagcagactctggagaacgagcggggggagctggccaacgaggtgaaggtgctgctgcagggcaaaggggactcggagcacaagcgcaagaaagtggaggcgcagctgcaggagctgcaggtcaagttcaacgagggagagcgcgtgcgcacagagctggccgacaaggtcaccaagctgcaggtggagctggacaacgtgaccgggcttctcagccagtccgacagcaagtccagcaagctcaccaaggacttctccgcgctggagtcccagctgcaggacactcaggagctgctgcaggaggagaaccggcagaagctgagcctgagcaccaagctcaagcaggtggaggacgagaagaattccttccgggagcagctggaggaggaggaggaggccaagcacaacctggagaagcagatcgccaccctccatgcccaggtggccgacatgaaaaagaagatggaggacagtgtggggtgcctggaaactgctgaggaggtgaagaggaagctccagaaggacctggagggcctgagccagcggcacgaggagaaggtggccgcctacgacaagctggagaagaccaagacgcggctgcagcaggagctggacgacctgctggtggacctggaccaccagcgccagagcgcgtgcaacctggagaagaagcagaagaagtttgaccagctcctggcggaggagaagaccatctctgccaagtatgcagaggagcgcgaccgggctgaggcggaggcccgagagaaggagaccaaggctctgtcgctggcccgggccctggaggaagccatggagcagaaggcggagctggagcggctcaacaagcagttccgcacggagatggaggaccttatgagctccaaggatgatgtgggcaagagtgtccacgagctggagaagtccaagcgggccctagagcagcaggtggaggagatgaagacgcagctggaagagctggaggacgagctgcaggccaccgaagatgccaagctgcggttggaggtcaacctgcaggccatgaaggcccagttcgagcgggacctgcagggccgggacgagcagagcgaggagaagaagaagcagctggtcagacaggtgcgggagatggaggcagagctggaggacgagaggaagcagcgctcgatggcagtggccgcccggaagaagctggagatggacctgaaggacctggaggcgcacatcgactcggccaacaagaaccgggacgaagccatcaaacagctgcggaagctgcaggcccagatgaaggactgcatgcgcgagctggatgacacccgcgcctctcgtgaggagatcctggcccaggccaaagagaacgagaagaagctgaagagcatggaggccgagatgatccagttgcaggaggaactggcagccgcggagcgtgccaagcgccaggcccagcaggagcgggatgagctggctgacgagatcgccaacagcagcggcaaaggagccctggcgttagaggagaagcggcgtctggaggcccgcatcgcccagctggaggaggagctggaggaggagcagggcaacacggagctgatcaacgaccggctgaagaaggccaacctgcagatcgaccagatcaacaccgacctgaacctggagcgcagccacgcccagaagaacgagaatgctcggcagcagctggaacgccagaacaaggagcttaaggtcaagctgcaggagatggagggcactgtcaagtccaagtacaaggcctccatcaccgccctcgaggccaagattgcacagctggaggagcagctggacaacgagaccaaggagcgccaggcagcctgcaaacaggtgcgtcggaccgagaagaagctgaaggatgtgctgctgcaggtggatgacgagcggaggaacgccgagcagtacaaggaccaggccgacaaggcatctacccgcctgaagcagctcaagcggcagctggaggaggccgaagaggaggcccagcgggccaacgcctcccgccggaaactgcagcgcgagctggaggacgccactgagacggccgatgccatgaaccgcgaagtcagctccctaaagaacaagctcaggcgcggggacctgccgtttgtcgtgccccgccgaatggcccggaaaggcgccggggatggctccgacgaagaggtagatggcaaagcggatggggctgaggccaaacctgccgaataagcctcttctcctgcagcctgagatggatggacagacagacaccacagcctccccttcccagaccccgcagcacgcctctccccaccttcttgggactgctgtgaacatgcctcctcctgccctccgccccgtccccccatcccgtttccctccaggtgttgttgagggcatttggcttcctctgctgcatccccttccagctccctcccctgctcagaatctgataccaaagagacagggcccgggcccaggcagagagcgaccagcaggctcctcagccctctcttgccaaaaagcacaagatgttgaggcgagcagggcaggcccccggggaggggccagagttttctatgaatctatttttcttcagactgaggccttttggtagtcggagcccccgcagtcgtcagcctccctgacgtctgccaccagcgcccccactcctcctcctttctttgctgtttgcaatcacacgtggtgacctcacacacctctgccccttgggcctcccactcccatggctctgggcggtccagaaggagcaggccctgggcctccacctctgtgcagggcacagaaggctggggtggggggaggagtggattcctccccaccctgtcccaggcagcgccactgtccgctgtctccctcctgattctaaaatgtctcaagtgcaatgccccctcccctcctttaccgaggacagcctgcctctgccacagcaaggctgtcggggtcaagctggaaaggccagcagccttccagtggcttctcccaacactcttggggaccaaatatatttaatggttaagggacttgtcccaagtctgacagccagagcgttagaggggccagcggccctcccaggcgatcttgtgtctactctaggactgggcccgagggtggtttacctgcaccgttgactcagtatagtttaaaaatctgccacctgcacaggtatttttgaaagcaaaataaggttttcttttttcccctttcttgtaataaatgataaaattccgagtctttctcactgcctttgtttagaagagagtagctcgtcctcactggtctacactggttgccgaatttacttgtattcctaactgttttgtatatgctgcattgagacttacggcaagaaggcattttttttttttaaaggaaacaaactctcaaatcatgaagtgatataaaagctgcatatgcctacaaagctctgaattcaggtcccagttgctgtcacaaaggagtgagtgaaactcccaccctacccccttttttatataataaaagtgccttagcatgtgttgcagctgtcaccactacagtaagctggtttacagatgttttccactgagcatcacaataaagagaaccatgtgcta

SEQ ID NO: 314091 - DNA, 6368 bp, Homo sapiens
cccgatattcggtcagtgggtgatagcaaaacctcgggtacgccaagaccgtgaagaatgacgaactcctcccgcttcggcaaattcattcgcatcaactttgatgtcaatggctacattgttggagccaacattgagacttatcttttggagaaatctcgtgctatccgccaagccaaggaagaacggaccttccacatcttctattatctcctgtctggggctggagagcacctgaagaccgatctcctgttggagccgtacaacaaataccgcttcctgtccaatggacacgtcaccatccccgggcagcaggacaaggacatgttccaggagaccatggaggccatgaggattatgggcatcccagaagaggagcaaatgggcctgctgcgggtcatctcaggggttcttcagctcggcaacatcgtcttcaagaaggagcggaacactgaccaggcgtccatgcccgacaacacagctgcccaaaaggtgtcccatctcttgggtatcaatgtgaccgatttcaccagaggaatcctcaccccgcgcatcaaggtgggacgggattacgtccagaaggcgcagactaaagagcaggctgactttgccatcgaggccttggccaaggcgacctatgagcggatgttccgctggctggtgctgcgcatcaacaaggctctggacaagaccaagaggcagggcgcctccttcatcgggatcctggacattgccggcttcgagatctttgatctgaactcgtttgagcagctgtgcatcaattacaccaatgagaagctgcagcagctcttcaaccacaccatgttcatcctggagcaggaggagtaccagcgcgagggcatcgagtggaacttcatcgactttggcctcgacctgcagccctgcatcgacctcattgagaagccagcaggccccccgggcattctggccctgctggacgaggagtgctggttccccaaagccaccgacaagagcttcgtggagaaggtgatgcaggagcagggcacccaccccaagttccagaagcccaagcagctgaaggacaaagctgatttctgcattatccactatgccggcaaggtggattacaaagctgacgagtggctgatgaagaacatggatcccctgaatgacaacatcgccacactgctccaccagtcctctgacaagtttgtctcggagctgtggaaggatgtggaccgcatcatcggcctggaccaggtggccggcatgtcggagaccgcactgcccggggccttcaagacgcggaagggcatgttccgcactgtggggcagctttacaaggagcagctggccaagctgatggctacgctgaggaacacgaaccccaactttgtccgctgcatcatccccaaccacgagaagaaggccggcaagctggacccgcatctcgtgctggaccagctgcgctgcaacggtgttctcgagggcatccgtatctgccgccagggcttccccaacagggtggtcttccaggagtttcggcagagatatgagatcctgactccaaactccattcccaagggtttcatggacgggaagcaggcgtgcgtgctcatgataaaagccctggagctcgacagcaatctgtaccgcattggccagagcaaagtcttcttccgtgccggtgtgctggcccacctggaggaggagcgagacctgaagatcaccgacgtcatcatagggttccaggcctgctgcaggggctacctggccaggaaagcatttgccaagcggcagcagcagcttaccgccatgaaggtcctccagcggaactgcgctgcctacctgaagctgcggaactggcagtggtggcggctcttcaccaaggtcaagccgctgctgcaggtgagccggcaggaggaggagatgatggccaaggaggaggagctggtgaaggtcagagagaagcagctggctgcggagaacaggctcacggagatggagacgctgcagtctcagctcatggcagagaaattgcagctgcaggagcagctccaggcagaaaccgagctgtgtgccgaggctgaggagctccgggcccgcctgaccgccaagaagcaggaattagaagagatctgccatgacctagaggccagggtggaggaggaggaggagcgctgccagcacctgcaggcggagaagaagaagatgcagcagaacatccaggagcttgaggagcagctggaggaggaggagagcgcccggcagaagctgcagctggagaaggtgaccaccgaggcgaagctgaaaaagctggaggaggagcagatcatcctggaggaccagaactgcaagctggccaaggaaaagaaactgctggaagacagaatagctgagttcaccaccaacctcacagaagaggaggagaaatctaagagcctcgccaagctcaagaacaagcatgaggcaatgatcactgacttggaagagcgcctccgcagggaggagaagcagcgacaggagctggagaagacccgccggaagctggagggagactccacagacctcagcgaccagatcgccgagctccaggcccagatcgcggagctcaagatgcagctggccaagaaagaggaggagctccaggccgccctggccagagtggaagaggaagctgcccagaagaacatggccctcaagaagatccgggagctggaatctcagatctctgaactccaggaagacctggagtctgagcgtgcttccaggaataaagctgagaagcagaaacgggaccttggggaagagctagaggcgctgaaaacagagttggaggacacgctggattccacagctgcccagcaggagctcaggtcaaaacgtgagcaggaggtgaacatcctgaagaagaccctggaggaggaggccaagacccacgaggcccagatccaggagatgaggcagaagcactcacaggccgtggaggagctggcggagcagctggagcagacgaagcgggtgaaagcaaacctcgagaaggcaaagcagactctggagctgctgcaggaggagaaccggcagaagctgagcctgagcaccaagctcaagcaggtggaggacgagaagaattccttccgggagcagctggaggaggaggaggaggccaagcacaacctggagaagcagatcgccaccctccatgcccaggtggccgacatgaaaaagaagatggaggacagtgtggggtgcctggaaactgctgaggaggtgaagaggaagctccagaaggacctggagggcctgagccagcggcacgaggagaaggtggccgcctacgacaagctggagaagaccaagacgcggctgcagcaggagctggacgacctgctggtggacctggaccaccagcgccagagcgcgtgcaacctggagaagaagcagaagaagtttgaccagctcctggcggaggagaagaccatctctgccaagtatgcagaggagcgcgaccgggctgaggcggaggcccgagagaaggagaccaaggctctgtcgctggcccgggccctggaggaagccatggagcagaaggcggagctggagcggctcaacaagcagttccgcacggagatggaggaccttatgagctccaaggatgatgtgggcaagagtgtccacgagctggagaagtccaagcgggccctagagcagcaggtggaggagatgaagacgcagctggaagagctggaggacgagctgcaggccaccgaagatgccaagctgcggttggaggtcaacctgcaggccatgaaggcccagttcgagcgggacctgcagggccgggacgagcagagcgaggagaagaagaagcagctggtcagacaggtgcgggagatggaggcagagctggaggacgagaggaagcagcgctcgatggcagtggccgcccggaagaagctggagatggacctgaaggacctggaggcgcacatcgactcggccaacaagaaccgggacgaagccatcaaacagctgcggaagctgcaggcccagatgaaggactgcatgcgcgagctggatgacacccgcgcctctcgtgaggagatcctggcccaggccaaagagaacgagaagaagctgaagagcatggaggccgagatgatccagttgcaggaggaactggcagccgcggagcgtgccaagcgccaggcccagcaggagcgggatgagctggctgacgagatcgccaacagcagcggcaaaggagccctggcgttagaggagaagcggcgtctggaggcccgcatcgcccagctggaggaggagctggaggaggagcagggcaacacggagctgatcaacgaccggctgaagaaggccaacctgcagatcgaccagatcaacaccgacctgaacctggagcgcagccacgcccagaagaacgagaatgctcggcagcagctggaacgccagaacaaggagcttaaggtcaagctgcaggagatggagggcactgtcaagtccaagtacaaggcctccatcaccgccctcgaggccaagattgcacagctggaggagcagctggacaacgagaccaaggagcgccaggcagcctgcaaacaggtgcgtcggaccgagaagaagctgaaggatgtgctgctgcaggtggatgacgagcggaggaacgccgagcagtacaaggaccaggccgacaaggcatctacccgcctgaagcagctcaagcggcagctggaggaggccgaagaggaggcccagcgggccaacgcctcccgccggaaactgcagcgcgagctggaggacgccactgagacggccgatgccatgaaccgcgaagtcagctccctaaagaacaagctcaggcgcggggacctgccgtttgtcgtgccccgccgaatggcccggaaaggcgccggggatggctccgacgaagaggtagatggcaaagcggatggggctgaggccaaacctgccgaataagcctcttctcctgcagcctgagatggatggacagacagacaccacagcctccccttcccagaccccgcagcacgcctctccccaccttcttgggactgctgtgaacatgcctcctcctgccctccgccccgtccccccatcccgtttccctccaggtgttgttgagggcatttggcttcctctgctgcatccccttccagctccctcccctgctcagaatctgataccaaagagacagggcccgggcccaggcagagagcgaccagcaggctcctcagccctctcttgccaaaaagcacaagatgttgaggcgagcagggcaggcccccggggaggggccagagttttctatgaatctatttttcttcagactgaggccttttggtagtcggagcccccgcagtcgtcagcctccctgacgtctgccaccagcgcccccactcctcctcctttctttgctgtttgcaatcacacgtggtgacctcacacacctctgccccttgggcctcccactcccatggctctgggcggtccagaaggagcaggccctgggcctccacctctgtgcagggcacagaaggctggggtggggggaggagtggattcctccccaccctgtcccaggcagcgccactgtccgctgtctccctcctgattctaaaatgtctcaagtgcaatgccccctcccctcctttaccgaggacagcctgcctctgccacagcaaggctgtcggggtcaagctggaaaggccagcagccttccagtggcttctcccaacactcttggggaccaaatatatttaatggttaagggacttgtcccaagtctgacagccagagcgttagaggggccagcggccctcccaggcgatcttgtgtctactctaggactgggcccgagggtggtttacctgcaccgttgactcagtatagtttaaaaatctgccacctgcacaggtatttttgaaagcaaaataaggttttcttttttcccctttcttgtaataaatgataaaattccgagtctttctcactgcctttgtttagaagagagtagctcgtcctcactggtctacactggttgccgaatttacttgtattcctaactgttttgtatatgctgcattgagacttacggcaagaaggcattttttttttttaaaggaaacaaactctcaaatcatgaagtgatataaaagctgcatatgcctacaaagctctgaattcaggtcccagttgctgtcacaaaggagtgagtgaaactcccaccctacccccttttttatataataaaagtgccttagcatgtgttgcagctgtcaccactacagtaagctggtttacagatgttttccactgagcatcacaataaagagaaccatgtgcta

SEQ ID NO: 314092 - DNA, 6569 bp, Homo sapiens
cccgatattcggtcagtgggtgatagcaaaacctcgggtacgccaagaccgtgaagaatgacgaactcctcccgcttcggcaaattcattcgcatcaactttgatgtcaatggctacattgttggagccaacattgagacttatcttttggagaaatctcgtgctatccgccaagccaaggaagaacggaccttccacatcttctattatctcctgtctggggctggagagcacctgaagaccgatctcctgttggagccgtacaacaaataccgcttcctgtccaatggacacgtcaccatccccgggcagcaggacaaggacatgttccaggagaccatggaggccatgaggattatgggcatcccagaagaggagcaaatgggcctgctgcgggtcatctcaggggttcttcagctcggcaacatcgtcttcaagaaggagcggaacactgaccaggcgtccatgcccgacaacacagctgcccaaaaggtgtcccatctcttgggtatcaatgtgaccgatttcaccagaggaatcctcaccccgcgcatcaaggtgggacgggattacgtccagaaggcgcagactaaagagcaggctgactttgccatcgaggccttggccaaggcgacctatgagcggatgttccgctggctggtgctgcgcatcaacaaggctctggacaagaccaagaggcagggcgcctccttcatcgggatcctggacattgccggcttcgagatctttgatctgaactcgtttgagcagctgtgcatcaattacaccaatgagaagctgcagcagctcttcaaccacaccatgttcatcctggagcaggaggagtaccagcgcgagggcatcgagtggaacttcatcgactttggcctcgacctgcagccctgcatcgacctcattgagaagccagcaggccccccgggcattctggccctgctggacgaggagtgctggttccccaaagccaccgacaagagcttcgtggagaaggtgatgcaggagcagggcacccaccccaagttccagaagcccaagcagctgaaggacaaagctgatttctgcattatccactatgccggcaaggtggattacaaagctgacgagtggctgatgaagaacatggatcccctgaatgacaacatcgccacactgctccaccagtcctctgacaagtttgtctcggagctgtggaaggatgtggaccgcatcatcggcctggaccaggtggccggcatgtcggagaccgcactgcccggggccttcaagacgcggaagggcatgttccgcactgtggggcagctttacaaggagcagctggccaagctgatggctacgctgaggaacacgaaccccaactttgtccgctgcatcatccccaaccacgagaagaaggccggcaagctggacccgcatctcgtgctggaccagctgcgctgcaacggtgttctcgagggcatccgtatctgccgccagggcttccccaacagggtggtcttccaggagtttcggcagagatatgagatcctgactccaaactccattcccaagggtttcatggacgggaagcaggcgtgcgtgctcatgataaaagccctggagctcgacagcaatctgtaccgcattggccagagcaaagtcttcttccgtgccggtgtgctggcccacctggaggaggagcgagacctgaagatcaccgacgtcatcatagggttccaggcctgctgcaggggctacctggccaggaaagcatttgccaagcggcagcagcagcttaccgccatgaaggtcctccagcggaactgcgctgcctacctgaagctgcggaactggcagtggtggcggctcttcaccaaggtcaagccgctgctgcaggtgagccggcaggaggaggagatgatggccaaggaggaggagctggtgaaggtcagagagaagcagctggctgcggagaacaggctcacggagatggagacgctgcagtctcagctcatggcagagaaattgcagctgcaggagcagctccaggcagaaaccgagctgtgtgccgaggctgaggagctccgggcccgcctgaccgccaagaagcaggaattagaagagatctgccatgacctagaggccagggtggaggaggaggaggagcgctgccagcacctgcaggcggagaagaagaagatgcagcagaacatccaggagcttgaggagcagctggaggaggaggagagcgcccggcagaagctgcagctggagaaggtgaccaccgaggcgaagctgaaaaagctggaggaggagcagatcatcctggaggaccagaactgcaagctggccaaggaaaagaaactgctggaagacagaatagctgagttcaccaccaacctcacagaagaggaggagaaatctaagagcctcgccaagctcaagaacaagcatgaggcaatgatcactgacttggaagagcgcctccgcagggaggagaagcagcgacaggagctggagaagacccgccggaagctggagggagactccacagacctcagcgaccagatcgccgagctccaggcccagatcgcggagctcaagatgcagctggccaagaaagaggaggagctccaggccgccctggccagagtggaagaggaagctgcccagaagaacatggccctcaagaagatccgggagctggaatctcagatctctgaactccaggaagacctggagtctgagcgtgcttccaggaataaagctgagaagcagaaacgggaccttggggaagagctagaggcgctgaaaacagagttggaggacacgctggattccacagctgcccagcaggagctcaggtcaaaacgtgagcaggaggtgaacatcctgaagaagaccctggaggaggaggccaagacccacgaggcccagatccaggagatgaggcagaagcactcacaggccgtggaggagctggcggagcagctggagcagacgaagcgggtgaaagcaaacctcgagaaggcaaagcagactctggagaacgagcggggggagctggccaacgaggtgaaggtgctgctgcagggcaaaggggactcggagcacaagcgcaagaaagtggaggcgcagctgcaggagctgcaggtcaagttcaacgagggagagcgcgtgcgcacagagctggccgacaaggtcaccaagctgcaggtggagctggacaacgtgaccgggcttctcagccagtccgacagcaagtccagcaagctcaccaaggacttctccgcgctggagtcccagctgcaggacactcaggagctgctgcaggaggagaaccggcagaagctgagcctgagcaccaagctcaagcaggtggaggacgagaagaattccttccgggagcagctggaggaggaggaggaggccaagcacaacctggagaagcagatcgccaccctccatgcccaggtggccgacatgaaaaagaagatggaggacagtgtggggtgcctggaaactgctgaggaggtgaagaggaagctccagaaggacctggagggcctgagccagcggcacgaggagaaggtggccgcctacgacaagctggagaagaccaagacgcggctgcagcaggagctggacgacctgctggtggacctggaccaccagcgccagagcgcgtgcaacctggagaagaagcagaagaagtttgaccagctcctggcggaggagaagaccatctctgccaagtatgcagaggagcgcgaccgggctgaggcggaggcccgagagaaggagaccaaggctctgtcgctggcccgggccctggaggaagccatggagcagaaggcggagctggagcggctcaacaagcagttccgcacggagatggaggaccttatgagctccaaggatgatgtgggcaagagtgtccacgagctggagaagtccaagcgggccctagagcagcaggtggaggagatgaagacgcagctggaagagctggaggacgagctgcaggccaccgaagatgccaagctgcggttggaggtcaacctgcaggccatgaaggcccagttcgagcgggacctgcagggccgggagaagcagcgctcgatggcagtggccgcccggaagaagctggagatggacctgaaggacctggaggcgcacatcgactcggccaacaagaaccgggacgaagccatcaaacagctgcggaagctgcaggcccagatgaaggactgcatgcgcgagctggatgacacccgcgcctctcgtgaggagatcctggcccaggccaaagagaacgagaagaagctgaagagcatggaggccgagatgatccagttgcaggaggaactggcagccgcggagcgtgccaagcgccaggcccagcaggagcgggatgagctggctgacgagatcgccaacagcagcggcaaaggagccctggcgttagaggagaagcggcgtctggaggcccgcatcgcccagctggaggaggagctggaggaggagcagggcaacacggagctgatcaacgaccggctgaagaaggccaacctgcagatcgaccagatcaacaccgacctgaacctggagcgcagccacgcccagaagaacgagaatgctcggcagcagctggaacgccagaacaaggagcttaaggtcaagctgcaggagatggagggcactgtcaagtccaagtacaaggcctccatcaccgccctcgaggccaagattgcacagctggaggagcagctggacaacgagaccaaggagcgccaggcagcctgcaaacaggtgcgtcggaccgagaagaagctgaaggatgtgctgctgcaggtggatgacgagcggaggaacgccgagcagtacaaggaccaggccgacaaggcatctacccgcctgaagcagctcaagcggcagctggaggaggccgaagaggaggcccagcgggccaacgcctcccgccggaaactgcagcgcgagctggaggacgccactgagacggccgatgccatgaaccgcgaagtcagctccctaaagaacaagctcaggcgcggggacctgccgtttgtcgtgccccgccgaatggcccggaaaggcgccggggatggctccgacgaagaggtagatggcaaagcggatggggctgaggccaaacctgccgaataagcctcttctcctgcagcctgagatggatggacagacagacaccacagcctccccttcccagaccccgcagcacgcctctccccaccttcttgggactgctgtgaacatgcctcctcctgccctccgccccgtccccccatcccgtttccctccaggtgttgttgagggcatttggcttcctctgctgcatccccttccagctccctcccctgctcagaatctgataccaaagagacagggcccgggcccaggcagagagcgaccagcaggctcctcagccctctcttgccaaaaagcacaagatgttgaggcgagcagggcaggcccccggggaggggccagagttttctatgaatctatttttcttcagactgaggccttttggtagtcggagcccccgcagtcgtcagcctccctgacgtctgccaccagcgcccccactcctcctcctttctttgctgtttgcaatcacacgtggtgacctcacacacctctgccccttgggcctcccactcccatggctctgggcggtccagaaggagcaggccctgggcctccacctctgtgcagggcacagaaggctggggtggggggaggagtggattcctccccaccctgtcccaggcagcgccactgtccgctgtctccctcctgattctaaaatgtctcaagtgcaatgccccctcccctcctttaccgaggacagcctgcctctgccacagcaaggctgtcggggtcaagctggaaaggccagcagccttccagtggcttctcccaacactcttggggaccaaatatatttaatggttaagggacttgtcccaagtctgacagccagagcgttagaggggccagcggccctcccaggcgatcttgtgtctactctaggactgggcccgagggtggtttacctgcaccgttgactcagtatagtttaaaaatctgccacctgcacaggtatttttgaaagcaaaataaggttttcttttttcccctttcttgtaataaatgataaaattccgagtctttctcactgcctttgtttagaagagagtagctcgtcctcactggtctacactggttgccgaatttacttgtattcctaactgttttgtatatgctgcattgagacttacggcaagaaggcattttttttttttaaaggaaacaaactctcaaatcatgaagtgatataaaagctgcatatgcctacaaagctctgaattcaggtcccagttgctgtcacaaaggagtgagtgaaactcccaccctacccccttttttatataataaaagtgccttagcatgtgttgcagctgtcaccactacagtaagctggtttacagatgttttccactgagcatcacaataaagagaaccatgtgcta

SEQ ID NO: 314093 - DNA, 4349 bp, Homo sapiens
accgcagccatggacgccatcaagatgaagatgcagatgctgaagctggacaaggaaaagaaactgctggaagacagaatagctgagttcaccaccaacctcacagaagaggaggagaaatctaagagcctcgccaagctcaagaacaagcatgaggcaatgatcactgacttggaagagcgcctccgcagggaggagaagcagcgacaggagctggagaagacccgccggaagctggagggagactccacagacctcagcgaccagatcgccgagctccaggcccagatcgcggagctcaagatgcagctggccaagaaagaggaggagctccaggccgccctggccagagtggaagaggaagctgcccagaagaacatggccctcaagaagatccgggagctggaatctcagatctctgaactccaggaagacctggagtctgagcgtgcttccaggaataaagctgagaagcagaaacgggaccttggggaagagctagaggcgctgaaaacagagttggaggacacgctggattccacagctgcccagcaggagctcaggtcaaaacgtgagcaggaggtgaacatcctgaagaagaccctggaggaggaggccaagacccacgaggcccagatccaggagatgaggcagaagcactcacaggccgtggaggagctggcggagcagctggagcagacgaagcgggtgaaagcaaacctcgagaaggcaaagcagactctggagaacgagcggggggagctggccaacgaggtgaaggtgctgctgcagggcaaaggggactcggagcacaagcgcaagaaagtggaggcgcagctgcaggagctgcaggtcaagttcaacgagggagagcgcgtgcgcacagagctggccgacaaggtcaccaagctgcaggtggagctggacaacgtgaccgggcttctcagccagtccgacagcaagtccagcaagctcaccaaggacttctccgcgctggagtcccagctgcaggacactcaggagctgctgcaggaggagaaccggcagaagctgagcctgagcaccaagctcaagcaggtggaggacgagaagaattccttccgggagcagctggaggaggaggaggaggccaagcacaacctggagaagcagatcgccaccctccatgcccaggtggccgacatgaaaaagaagatggaggacagtgtggggtgcctggaaactgctgaggaggtgaagaggaagctccagaaggacctggagggcctgagccagcggcacgaggagaaggtggccgcctacgacaagctggagaagaccaagacgcggctgcagcaggagctggacgacctgctggtggacctggaccaccagcgccagagcgcgtgcaacctggagaagaagcagaagaagtttgaccagctcctggcggaggagaagaccatctctgccaagtatgcagaggagcgcgaccgggctgaggcggaggcccgagagaaggagaccaaggctctgtcgctggcccgggccctggaggaagccatggagcagaaggcggagctggagcggctcaacaagcagttccgcacggagatggaggaccttatgagctccaaggatgatgtgggcaagagtgtccacgagctggagaagtccaagcgggccctagagcagcaggtggaggagatgaagacgcagctggaagagctggaggacgagctgcaggccaccgaagatgccaagctgcggttggaggtcaacctgcaggccatgaaggcccagttcgagcgggacctgcagggccgggacgagcagagcgaggagaagaagaagcagctggtcagacaggtgcgggagatggaggcagagctggaggacgagaggaagcagcgctcgatggcagtggccgcccggaagaagctggagatggacctgaaggacctggaggcgcacatcgactcggccaacaagaaccgggacgaagccatcaaacagctgcggaagctgcaggcccagatgaaggactgcatgcgcgagctggatgacacccgcgcctctcgtgaggagatcctggcccaggccaaagagaacgagaagaagctgaagagcatggaggccgagatgatccagttgcaggaggaactggcagccgcggagcgtgccaagcgccaggcccagcaggagcgggatgagctggctgacgagatcgccaacagcagcggcaaaggagccctggcgttagaggagaagcggcgtctggaggcccgcatcgcccagctggaggaggagctggaggaggagcagggcaacacggagctgatcaacgaccggctgaagaaggccaacctgcagatcgaccagatcaacaccgacctgaacctggagcgcagccacgcccagaagaacgagaatgctcggcagcagctggaacgccagaacaaggagcttaaggtcaagctgcaggagatggagggcactgtcaagtccaagtacaaggcctccatcaccgccctcgaggccaagattgcacagctggaggagcagctggacaacgagaccaaggagcgccaggcagcctgcaaacaggtgcgtcggaccgagaagaagctgaaggatgtgctgctgcaggtggatgacgagcggaggaacgccgagcagtacaaggaccaggccgacaaggcatctacccgcctgaagcagctcaagcggcagctggaggaggccgaagaggaggcccagcgggccaacgcctcccgccggaaactgcagcgcgagctggaggacgccactgagacggccgatgccatgaaccgcgaagtcagctccctaaagaacaagctcaggcgcggggacctgccgtttgtcgtgccccgccgaatggcccggaaaggcgccggggatggctccgacgaagaggtagatggcaaagcggatggggctgaggccaaacctgccgaataagcctcttctcctgcagcctgagatggatggacagacagacaccacagcctccccttcccagaccccgcagcacgcctctccccaccttcttgggactgctgtgaacatgcctcctcctgccctccgccccgtccccccatcccgtttccctccaggtgttgttgagggcatttggcttcctctgctgcatccccttccagctccctcccctgctcagaatctgataccaaagagacagggcccgggcccaggcagagagcgaccagcaggctcctcagccctctcttgccaaaaagcacaagatgttgaggcgagcagggcaggcccccggggaggggccagagttttctatgaatctatttttcttcagactgaggccttttggtagtcggagcccccgcagtcgtcagcctccctgacgtctgccaccagcgcccccactcctcctcctttctttgctgtttgcaatcacacgtggtgacctcacacacctctgccccttgggcctcccactcccatggctctgggcggtccagaaggagcaggccctgggcctccacctctgtgcagggcacagaaggctggggtggggggaggagtggattcctccccaccctgtcccaggcagcgccactgtccgctgtctccctcctgattctaaaatgtctcaagtgcaatgccccctcccctcctttaccgaggacagcctgcctctgccacagcaaggctgtcggggtcaagctggaaaggccagcagccttccagtggcttctcccaacactcttggggaccaaatatatttaatggttaagggacttgtcccaagtctgacagccagagcgttagaggggccagcggccctcccaggcgatcttgtgtctactctaggactgggcccgagggtggtttacctgcaccgttgactcagtatagtttaaaaatctgccacctgcacaggtatttttgaaagcaaaataaggttttcttttttcccctttcttgtaataaatgataaaattccgagtctttctcactgcctttgtttagaagagagtagctcgtcctcactggtctacactggttgccgaatttacttgtattcctaactgttttgtatatgctgcattgagacttacggcaagaaggcattttttttttttaaaggaaacaaactctcaaatcatgaagtgatataaaagctgcatatgcctacaaagctctgaattcaggtcccagttgctgtcacaaaggagtgagtgaaactcccaccctacccccttttttatataataaaagtgccttagcatgtgttgcagctgtcaccactacagtaagctggtttacagatgttttccactgagcatcacaataaagagaaccatgtgcta

SEQ ID NO: 314094 - DNA, 6035 bp, Homo sapiens
cccgatattcggtcagtgggtgatagcaaaacctcgggtacgccaagaccgtgaagaatgacgaactcctcccgcttcggcaaattcattcgcatcaactttgatgtcaatggctacattgttggagccaacattgagacttatcttttggagaaatctcgtgctatccgccaagccaaggaagaacggaccttccacatcttctattatctcctgtctggggctggagagcacctgaagaccgatctcctgttggagccgtacaacaaataccgcttcctgtccaatggacacgtcaccatccccgggcagcaggacaaggacatgttccaggagaccatggaggccatgaggattatgggcatcccagaagaggagcaaatgggcctgctgcgggtcatctcaggggttcttcagctcggcaacatcgtcttcaagaaggagcggaacactgaccaggcgtccatgcccgacaacacagctgcccaaaaggtgtcccatctcttgggtatcaatgtgaccgatttcaccagaggaatcctcaccccgcgcatcaaggtgggacgggattacgtccagaaggcgcagactaaagagcaggctgactttgccatcgaggccttggccaaggcgacctatgagcggatgttccgctggctggtgctgcgcatcaacaaggctctggacaagaccaagaggcagggcgcctccttcatcgggatcctggacattgccggcttcgagatctttgatctgaactcgtttgagcagctgtgcatcaattacaccaatgagaagctgcagcagctcttcaaccacaccatgttcatcctggagcaggaggagtaccagcgcgagggcatcgagtggaacttcatcgactttggcctcgacctgcagccctgcatcgacctcattgagaagccagcaggccccccgggcattctggccctgctggacgaggagtgctggttccccaaagccaccgacaagagcttcgtggagaaggtgatgcaggagcagggcacccaccccaagttccagaagcccaagcagctgaaggacaaagctgatttctgcattatccactatgccggcaaggtggattacaaagctgacgagtggctgatgaagaacatggatcccctgaatgacaacatcgccacactgctccaccagtcctctgacaagtttgtctcggagctgtggaaggatgtggaccgcatcatcggcctggaccaggtggccggcatgtcggagaccgcactgcccggggccttcaagacgcggaagggcatgttccgcactgtggggcagctttacaaggagcagctggccaagctgatggctacgctgaggaacacgaaccccaactttgtccgctgcatcatccccaaccacgagaagaaggccggcaagctggacccgcatctcgtgctggaccagctgcgctgcaacggtgttctcgagggcatccgtatctgccgccagggcttccccaacagggtggtcttccaggagtttcggcagagatatgagatcctgactccaaactccattcccaagggtttcatggacgggaagcaggcgtgcgtgctcatgataaaagccctggagctcgacagcaatctgtaccgcattggccagagcaaagtcttcttccgtgccggtgtgctggcccacctggaggaggagcgagacctgaagatcaccgacgtcatcatagggttccaggcctgctgcaggggctacctggccaggaaagcatttgccaagcggcagcagcagcttaccgccatgaaggtcctccagcggaactgcgctgcctacctgaagctgcggaactggcagtggtggcggctcttcaccaaggtcaagccgctgctgcaggtgagccggcaggaggaggagatgatggccaaggaggaggagctggtgaaggtcagagagaagcagctggctgcggagaacaggctcacggagatggagacgctgcagtctcagctcatggcagagaaattgcagctgcaggagcagctccaggcagaaaccgagctgtgtgccgaggctgaggagctccgggcccgcctgaccgccaagaagcaggaattagaagagatctgccatgacctagaggccagggtggaggaggaggaggagcgctgccagcacctgcaggcggagaagaagaagatgcagcagaacatccaggagcttgaggagcagctggaggaggaggagagcgcccggcagaagctgcagctggagaaggtgaccaccgaggcgaagctgaaaaagctggaggaggagcagatcatcctggaggaccagaactgcaagctggccaaggaaaagaaactgctggaagacagaatagctgagttcaccaccaacctcacagaagaggaggagaaatctaagagcctcgccaagctcaagaacaagcatgaggcaatgatcactgacttggaagagcgcctccgcagggaggagaagcagcgacaggagctggagaagacccgccggaagctggagggagactccacagacctcagcgaccagatcgccgagctccaggcccagatcgcggagctcaagatgcagctggccaagaaagaggaggagctccaggccgccctggccagagtggaagaggaagctgcccagaagaacatggccctcaagaagatccgggagctggaatctcagatctctgaactccaggaagacctggagtctgagcgtgcttccaggaataaagctgagaagcagaaacgggaccttggggaagagctagaggcgctgaaaacagagttggaggacacgctggattccacagctgcccagcaggagctcaggtcaaaacgtgagcaggaggtgaacatcctgaagaagaccctggaggaggaggccaagacccacgaggcccagatccaggagatgaggcagaagcactcacaggccgtggaggagctggcggagcagctggagcagacgaagcgggtgaaagcaaacctcgagaaggcaaagcagactctggagaacgagcggggggagctggccaacgaggtgaaggtgctgctgcagggcaaaggggactcggagcacaagcgcaagaaagtggaggcgcagctgcaggagctgcaggtcaagttcaacgagggagagcgcgtgcgcacagagctggccgacaaggtcaccaagctgcaggtggagctggacaacgtgaccgggcttctcagccagtccgacagcaagtccagcaagctcaccaaggacttctccgcgctggagtcccagctgcaggacactcaggagctgctgcaggaggagaaccggcagaagctgagcctgagcaccaagctcaagcaggtggaggacgagaagaattccttccgggagcagctggaggaggaggaggaggccaagcacaacttggaggtcaacctgcaggccatgaaggcccagttcgagcgggacctgcagggccgggacgagcagagcgaggagaagaagaagcagctggtcagacaggtgcgggagatggaggcagagctggaggacgagaggaagcagcgctcgatggcagtggccgcccggaagaagctggagatggacctgaaggacctggaggcgcacatcgactcggccaacaagaaccgggacgaagccatcaaacagctgcggaagctgcaggcccagatgaaggactgcatgcgcgagctggatgacacccgcgcctctcgtgaggagatcctggcccaggccaaagagaacgagaagaagctgaagagcatggaggccgagatgatccagttgcaggaggaactggcagccgcggagcgtgccaagcgccaggcccagcaggagcgggatgagctggctgacgagatcgccaacagcagcggcaaaggagccctggcgttagaggagaagcggcgtctggaggcccgcatcgcccagctggaggaggagctggaggaggagcagggcaacacggagctgatcaacgaccggctgaagaaggccaacctgcagatcgaccagatcaacaccgacctgaacctggagcgcagccacgcccagaagaacgagaatgctcggcagcagctggaacgccagaacaaggagcttaaggtcaagctgcaggagatggagggcactgtcaagtccaagtacaaggcctccatcaccgccctcgaggccaagattgcacagctggaggagcagctggacaacgagaccaaggagcgccaggcagcctgcaaacaggtgcgtcggaccgagaagaagctgaaggatgtgctgctgcaggtggatgacgagcggaggaacgccgagcagtacaaggaccaggccgacaaggcatctacccgcctgaagcagctcaagcggcagctggaggaggccgaagaggaggcccagcgggccaacgcctcccgccggaaactgcagcgcgagctggaggacgccactgagacggccgatgccatgaaccgcgaagtcagctccctaaagaacaagctcaggcgcggggacctgccgtttgtcgtgccccgccgaatggcccggaaaggcgccggggatggctccgacgaagaggtagatggcaaagcggatggggctgaggccaaacctgccgaataagcctcttctcctgcagcctgagatggatggacagacagacaccacagcctccccttcccagaccccgcagcacgcctctccccaccttcttgggactgctgtgaacatgcctcctcctgccctccgccccgtccccccatcccgtttccctccaggtgttgttgagggcatttggcttcctctgctgcatccccttccagctccctcccctgctcagaatctgataccaaagagacagggcccgggcccaggcagagagcgaccagcaggctcctcagccctctcttgccaaaaagcacaagatgttgaggcgagcagggcaggcccccggggaggggccagagttttctatgaatctatttttcttcagactgaggccttttggtagtcggagcccccgcagtcgtcagcctccctgacgtctgccaccagcgcccccactcctcctcctttctttgctgtttgcaatcacacgtggtgacctcacacacctctgccccttgggcctcccactcccatggctctgggcggtccagaaggagcaggccctgggcctccacctctgtgcagggcacagaaggctggggtggggggaggagtggattcctccccaccctgtcccaggcagcgccactgtccgctgtctccctcctgattctaaaatgtctcaagtgcaatgccccctcccctcctttaccgaggacagcctgcctctgccacagcaaggctgtcggggtcaagctggaaaggccagcagccttccagtggcttctcccaacactcttggggaccaaatatatttaatggttaagggacttgtcccaagtctgacagccagagcgttagaggggccagcggccctcccaggcgatcttgtgtctactctaggactgggcccgagggtggtttacctgcaccgttgactcagtatagtttaaaaatctgccacctgcacaggtatttttgaaagcaaaataaggttttcttttttcccctttcttgtaataaatgataaaattccgagtctttctcactgcctttgtttagaagagagtagctcgtcctcactggtctacactggttgccgaatttacttgtattcctaactgttttgtatatgctgcattgagacttacggcaagaaggcattttttttttttaaaggaaacaaactctcaaatcatgaagtgatataaaagctgcatatgcctacaaagctctgaattcaggtcccagttgctgtcacaaaggagtgagtgaaactcccaccctacccccttttttatataataaaagtgccttagcatgtgttgcagctgtcaccactacagtaagctggtttacagatgttttccactgagcatcacaataaagagaaccatgtgcta

SEQ ID NO: 314095 - DNA, 6497 bp, Homo sapiens
cccgatattcggtcagtgggtgatagcaaaacctcgggtacgccaagaccgtgaagaatgacgaactcctcccgcttcggcaaattcattcgcatcaactttgatgtcaatggctacattgttggagccaacattgagacttatcttttggagaaatctcgtgctatccgccaagccaaggaagaacggaccttccacatcttctattatctcctgtctggggctggagagcacctgaagaccgatctcctgttggagccgtacaacaaataccgcttcctgtccaatggacacgtcaccatccccgggcagcaggacaaggacatgttccaggagaccatggaggccatgaggattatgggcatcccagaagaggagcaaatgggcctgctgcgggtcatctcaggggttcttcagctcggcaacatcgtcttcaagaaggagcggaacactgaccaggcgtccatgcccgacaacacagctgcccaaaaggtgtcccatctcttgggtatcaatgtgaccgatttcaccagaggaatcctcaccccgcgcatcaaggtgggacgggattacgtccagaaggcgcagactaaagagcaggctgactttgccatcgaggccttggccaaggcgacctatgagcggatgttccgctggctggtgctgcgcatcaacaaggctctggacaagaccaagaggcagggcgcctccttcatcgggatcctggacattgccggcttcgagatctttgatctgaactcgtttgagcagctgtgcatcaattacaccaatgagaagctgcagcagctcttcaaccacaccatgttcatcctggagcaggaggagtaccagcgcgagggcatcgagtggaacttcatcgactttggcctcgacctgcagccctgcatcgacctcattgagaagccagcaggccccccgggcattctggccctgctggacgaggagtgctggttccccaaagccaccgacaagagcttcgtggagaaggtgatgcaggagcagggcacccaccccaagttccagaagcccaagcagctgaaggacaaagctgatttctgcattatccactatgccggcaaggtggattacaaagctgacgagtggctgatgaagaacatggatcccctgaatgacaacatcgccacactgctccaccagtcctctgacaagtttgtctcggagctgtggaaggatgtggaccgcatcatcggcctggaccaggtggccggcatgtcggagaccgcactgcccggggccttcaagacgcggaagggcatgttccgcactgtggggcagctttacaaggagcagctggccaagctgatggctacgctgaggaacacgaaccccaactttgtccgctgcatcatccccaaccacgagaagaaggccggcaagctggacccgcatctcgtgctggaccagctgcgctgcaacggtgttctcgagggcatccgtatctgccgccagggcttccccaacagggtggtcttccaggagtttcggcagagatatgagatcctgactccaaactccattcccaagggtttcatggacgggaagcaggcgtgcgtgctcatgataaaagccctggagctcgacagcaatctgtaccgcattggccagagcaaagtcttcttccgtgccggtgtgctggcccacctggaggaggagcgagacctgaagatcaccgacgtcatcatagggttccaggcctgctgcaggggctacctggccaggaaagcatttgccaagcggcagcagcagcttaccgccatgaaggtcctccagcggaactgcgctgcctacctgaagctgcggaactggcagtggtggcggctcttcaccaaggtcaagccgctgctgcaggtgagccggcaggaggaggagatgatggccaaggaggaggagctggtgaaggtcagagagaagcagctggctgcggagaacaggctcacggagatggagacgctgcagtctcagctcatggcagagaaattgcagctgcaggagcagctccaggcagaaaccgagctgtgtgccgaggctgaggagctccgggcccgcctgaccgccaagaagcaggaattagaagagatctgccatgacctagaggccagggtggaggaggaggaggagcgctgccagcacctgcaggcggagaagaagaagatgcagcagaacatccaggagcttgaggagcagctggaggaggaggagagcgcccggcagaagctgcagctggagaaggtgaccaccgaggcgaagctgaaaaagctggaggaggagcagatcatcctggaggaccagaactgcaagctggccaaggaaaagaaactgctggaagacagaatagctgagttcaccaccaacctcacagaagaggaggagaaatctaagagcctcgccaagctcaagaacaagcatgaggcaatgatcactgacttggaagagcgcctccgcagggaggagaagcagcgacaggagctggagaagacccgccggaagctggagggagactccacagacctcagcgaccagatcgccgagctccaggcccagatcgcggagctcaagatgcagctggccaagaaagaggaggagctccaggccgccctggccagagtggaagaggaagctgcccagaagaacatggccctcaagaagatccgggagctggaatctcagatctctgaactccaggaagacctggagtctgagcgtgcttccaggaataaagctgagaagcagaaacgggaccttggggaagagctagaggcgctgaaaacagagttggaggacacgctggattccacagctgcccagcaggagctcaggtcaaaacgtgagcaggaggtgaacatcctgaagaagaccctggaggaggaggccaagacccacgaggcccagatccaggagatgaggcagaagcactcacaggccgtggaggagctggcggagcagctggagcagacgaagcgggtgaaagcaaacctcgagaaggcaaagcagactctggagaacgagcggggggagctggccaacgaggtgaaggtgctgctgcagggcaaaggggactcggagcacaagcgcaagaaagtggaggcgcagctgcaggagctgcaggtcaagttcaacgagggagagcgcgtgcgcacagagctggccgacaaggtcaccaagctgcaggtggagctggacaacgtgaccgggcttctcagccagtccgacagcaagtccagcaagctcaccaaggacttctccgcgctggagtcccagctgcaggacactcaggagctgctgcaggaggagaaccggcagaagctgagcctgagcaccaagctcaagcaggtggaggacgagaagaattccttccgggagcagctggaggaggaggaggaggccaagcacaacctggagaagcagatcgccaccctccatgcccaggtggccgacatgaaaaagaagatggaggacagtgtggggtgcctggaaactgctgaggaggtgaagaggaagctccagaaggacctggagggcctgagccagcggcacgaggagaaggtggccgcctacgacaagctggagaagaccaagacgcggctgcagcaggagctggacgacctgctggtggacctggaccaccagcgccagagcgcgtgcaacctggagaagaagcagaagaagtttgaccagctcctggcggaggagaagaccatctctgccaagtatgcagaggagcgcgaccgggctgaggcggaggcccgagagaaggagaccaaggctctgtcgctggcccgggccctggaggaagccatggagcagaaggcggagctggagcggctcaacaagcagttccgcacggagatggaggaccttatgagctccaaggatgatgtgggcaagagtgtccacgagctggagaagtccaagcgggccctagagcagcaggtggaggagatgaagacgcagctggaagagctggaggacgagctgcaggccaccgaagatgccaagctgcggttggaggtcaacctgcaggccatgaaggcccagttcgagcgggacctgcagggccgggacgagcagagcgaggagaagaagaagcagctggtcagacaggtgcgggagatggaggcagagctggaggacgagaggaagcagcgctcgatggcagtggccgcccggaagaagctggagatggacctgaaggacctggaggcgcacatcgactcggccaacaagaaccgggacgaagccatcaaacagctgcggaagctgcaggcccagatgaaggactgcatgcgcgagctggatgacacccgcgcctctcgtgaggagatcctggcccaggccaaagagaacgagaagaagctgaagagcatggaggccgagatgatccagttgcaggaggaactggcagccgcggagcgtgccaagcgccaggcccagcaggagcgggatgagctggctgacgagatcgccaacagcagcggcaaaggagccctggcgttagaggagaagcggcgtctggaggcccgcatcgcccagctggaggaggagctggaggaggagcagggcaacacggagctgatcaacgaccggctgaagaaggccaacctgcagatcgaccagatcaacaccgacctgaacctggagcgcagccacgcccagaagaacgagaatgctcggcagcagctggaacgccagaacaaggagcttaaggtcaagctgcaggagatggagggcactgtcaagtccaagtacaaggcctccatcaccgccctcgaggccaagattgcacagctggaggagcagctggacaacgagaccaaggagcgccaggcagcctgcaaacaggtgcgtcggaccgagaagaagctgaaggatgtgctgctgcaggtggatgacgagcggaggaacgccgagcagtacaaggaccaggccgacaaggcatctacccgcctgaagcagctcaagcggcagctggaggaggccgaagaggaggcccagcgggccaacgcctcccgccggaaactgcagcgcgagctggaggacgccactgagacggccgatgccatgaaccgcgaagtcagctccctaaagaacaagctcaggcgcggggacctgccgtttgtcgtgccccgccgaatggcccggaaaggcgccggggatggctccgacgaagaggtagatggcaaagcggatggggctgaggccaaacctgccgaataagcctcttctcctgcagcctgagatggatggacagacagacaccacagcctccccttcccagaccccgcagcacgcctctccccaccttcttgggactgctgtgaacatgcctcctcctgccctccgccccgtccccccatcccgtttccctccaggtgttgttgagggcatttggcttcctctgctgcatccccttccagctccctcccctgctcagaatctgataccaaagagacagggcccgggcccaggcagagagcgaccagcaggctcctcagccctctcttgccaaaaagcacaagatgttgaggcgagcagggcaggcccccggggaggggccagagttttctatgaatctatttttcttcagactgaggccttttggtagtcggagcccccgcagtcgtcagcctccctgacgtctgccaccagcgcccccactcctcctcctttctttgctgtttgcaatcacacgtggtgacctcacacacctctgccccttgggcctcccactcccatggctctgggcggtccagaaggagcaggccctgggcctccacctctgtgcagggcacagaaggctggggtggggggaggagtggattcctccccaccctgtcccaggcagcgccactgtccgctgtctccctcctgattctaaaatgtctcaagtgcaatgccccctcccctcctttaccgaggacagcctgcctctgccacagcaaggctgtcggggtcaagctggaaaggccagcagccttccagtggcttctcccaacactcttggggaccaaatatatttaatggttaagggacttgtcccaagtctgacagccagagcgttagaggggccagcggccctcccaggcgatcttgtgtctactctaggactgggcccgagggtggtttacctgcaccgttgactcagtatagtttaaaaatctgccacctgcacaggtatttttgaaagcaaaataaggttttcttttttcccctttcttgtaataaatgataaaattccgagtctttctcactgcctttgtttagaagagagtagctcgtcctcactggtctacactggttgccgaatttacttgtattcctaactgttttgtatatgctgcattgagacttacggcaagaaggcattttttttttttaaaggaaacaaactctcaatgtgtgaaatgtgtattacgctagcagtatggctatcagagcgtatggggagtcctctagag

SEQ ID NO: 314096 - DNA, 6462 bp, Homo sapiens
cccgatattcggtcagtgggtgatagcaaaacctcgggtacgccaagaccgtgaagaatgacgaactcctcccgcttcggcaaattcattcgcatcaactttgatgtcaatggctacattgttggagccaacattgagacttatcttttggagaaatctcgtgctatccgccaagccaaggaagaacggaccttccacatcttctattatctcctgtctggggctggagagcacctgaagaccgatctcctgttggagccgtacaacaaataccgcttcctgtccaatggacacgtcaccatccccgggcagcaggacaaggacatgttccaggagaccatggaggccatgaggattatgggcatcccagaagaggagcaaatgggcctgctgcgggtcatctcaggggttcttcagctcggcaacatcgtcttcaagaaggagcggaacactgaccaggcgtccatgcccgacaacacagctgcccaaaaggtgtcccatctcttgggtatcaatgtgaccgatttcaccagaggaatcctcaccccgcgcatcaaggtgggacgggattacgtccagaaggcgcagactaaagagcaggctgactttgccatcgaggccttggccaaggcgacctatgagcggatgttccgctggctggtgctgcgcatcaacaaggctctggacaagaccaagaggcagggcgcctccttcatcgggatcctggacattgccggcttcgagatctttgatctgaactcgtttgagcagctgtgcatcaattacaccaatgagaagctgcagcagctcttcaaccacaccatgttcatcctggagcaggaggagtaccagcgcgagggcatcgagtggaacttcatcgactttggcctcgacctgcagccctgcatcgacctcattgagaagccagcaggccccccgggcattctggccctgctggacgaggagtgctggttccccaaagccaccgacaagagcttcgtggagaaggtgatgcaggagcagggcacccaccccaagttccagaagcccaagcagctgaaggacaaagctgatttctgcattatccactatgccggcaaggtggattacaaagctgacgagtggctgatgaagaacatggatcccctgaatgacaacatcgccacactgctccaccagtcctctgacaagtttgtctcggagctgtggaaggatgtggaccgcatcatcggcctggaccaggtggccggcatgtcggagaccgcactgcccggggccttcaagacgcggaagggcatgttccgcactgtggggcagctttacaaggagcagctggccaagctgatggctacgctgaggaacacgaaccccaactttgtccgctgcatcatccccaaccacgagaagaaggccggcaagctggacccgcatctcgtgctggaccagctgcgctgcaacggtgttctcgagggcatccgtatctgccgccagggcttccccaacagggtggtcttccaggagtttcggcagagatatgagatcctgactccaaactccattcccaagggtttcatggacgggaagcaggcgtgcgtgctcatgataaaagccctggagctcgacagcaatctgtaccgcattggccagagcaaagtcttcttccgtgccggtgtgctggcccacctggaggaggagcgagacctgaagatcaccgacgtcatcatagggttccaggcctgctgcaggggctacctggccaggaaagcatttgccaagcggcagcagcagcttaccgccatgaaggtcctccagcggaactgcgctgcctacctgaagctgcggaactggcagtggtggcggctcttcaccaaggtcaagccgctgctgcaggtgagccggcaggaggaggagatgatggccaaggaggaggagctggtgaaggtcagagagaagcagctggctgcggagaacaggctcacggagatggagacgctgcagtctcagctcatggcagagaaattgcagctgcaggagcagctccaggcagaaaccgagctgtgtgccgaggctgaggagctccgggcccgcctgaccgccaagaagcaggaattagaagagatctgccatgacctagaggccagggtggaggaggaggaggagcgctgccagcacctgcaggcggagaagaagaagatgcagcagaacatccaggagcttgaggagcagctggaggaggaggagagcgcccggcagaagctgcagctggagaaggtgaccaccgaggcgaagctgaaaaagctggaggaggagcagatcatcctggaggaccagaactgcaagctggccaaggaaaagaaactgctggaagacagaatagctgagttcaccaccaacctcacagaagaggaggagaaatctaagagcctcgccaagctcaagaacaagcatgaggcaatgatcactgacttggaagagcgcctccgcagggaggagaagcagcgacaggagctggagaagacccgccggaagctggagggagactccacagacctcagcgaccagatcgccgagctccaggcccagatcgcggagctcaagatgcagctggccaagaaagaggaggagctccaggccgccctggccagagtggaagaggaagctgcccagaagaacatggccctcaagaagatccgggagctggaatctcagatctctgaactccaggaagacctggagtctgagcgtgcttccaggaataaagctgagaagcagaaacgggaccttggggaagagctagaggcgctgaaaacagagttggaggacacgctggattccacagctgcccagcaggagctcaggtcaaaacgtgagcaggaggtgaacatcctgaagaagaccctggaggaggaggccaagacccacgaggcccagatccaggagatgaggcagaagcactcacaggccgtggaggagctggcggagcagctggagcagacgaagcgggtgaaagcaaacctcgagaaggcaaagcagactctggagaacgagcggggggagctggccaacgaggtgaaggtgctgctgcagggcaaaggggactcggagcacaagcgcaagaaagtggaggcgcagctgcaggagctgcaggtcaagttcaacgagggagagcgcgtgcgcacagagctggccgacaaggtcaccaagctgcaggtggagctggacaacgtgaccgggcttctcagccagtccgacagcaagtccagcaagctcaccaaggacttctccgcgctggagtcccagctgcaggacactcaggagctgctgcaggaggagaaccggcagaagctgagcctgagcaccaagctcaagcaggtggaggacgagaagaattccttccgggagcagctggaggaggaggaggaggccaagcacaacctggagaagcagatcgccaccctccatgcccaggtggccgacatgaaaaagaagatggaggacagtgtggggtgcctggaaactgctgaggaggtgaagaggaagctccagaaggacctggagggcctgagccagcggcacgaggagaaggtggccgcctacgacaagctggagaagaccaagacgcggctgcagcaggagctggacgacctgctggtggacctggaccaccagcgccagagcgcgtgcaacctggagaagaagcagaagaagtttgaccagctcctggcggaggagaagaccatctctgccaagtatgcagaggagcgcgaccgggctgaggcggaggcccgagagaaggagaccaaggctctgtcgctggcccgggccctggaggaagccatggagcagaaggcggagctggagcggctcaacaagcagttccgcacggagatggaggaccttatgagctccaaggatgatgtgggcaagagtgtccacgagctggagaagtccaagcgggccctagagcagcaggtggaggagatgaagacgcagctggaagagctggaggacgagctgcaggccaccgaagatgccaagctgcggttggaggtcaacctgcaggccatgaaggcccagttcgagcgggacctgcagggccgggacgagcagagcgaggagaagaagaagcagctggtcagacaggtgcgggagatggaggcagagctggaggacgagaggaagcagcgctcgatggcagtggccgcccggaagaagctggagatggacctgaaggacctggaggcgcacatcgactcggccaacaagaaccgggacgaagccatcaaacagctgcggaagctgcaggcccagatgaaggactgcatgcgcgagctggatgacacccgcgcctctcgtgaggagatcctggcccaggccaaagagaacgagaagaagctgaagagcatggaggccgagatgatccagttgcaggaggaactggcagccgcggagcgtgccaagcgccaggcccagcaggagcgggatgagctggctgacgagatcgccaacagcagcggcaaaggagccctggcgttagaggagaagcggcgtctggaggcccgcatcgcccagctggaggaggagctggaggaggagcagggcaacacggagctgatcaacgaccggctgaagaaggccaacctgcagatcgaccagatcaacaccgacctgaacctggagcgcagccacgcccagaagaacgagaatgctcggcagcagctggaacgccagaacaaggagcttaaggtcaagctgcaggagatggagggcactgtcaagtccaagtacaaggcctccatcaccgccctcgaggccaagattgcacagctggaggagcagctggacaacgagaccaaggagcgccaggcagcctgcaaacaggtgcgtcggaccgagaagaagctgaaggatgtgctgctgcaggtggatgacgagcggaggaacgccgagcagtacaaggaccaggccgacaaggcatctacccgcctgaagcagctcaagcggcagctggaggaggccgaagaggaggcccagcgggccaacgcctcccgccggaaactgcagcgcgagctggaggacgccactgagacggccgatgccatgaaccgcgaagtcagctccctaaagaacaagctcaggcgcggggacctgccgtttgtcgtgccccgccgaatggcccggaaaggcgccggggatggctccgacgaagaggtagatggcaaagcggatggggctgaggccaaacctgccgaataagcctcttctcctgcagcctgagatggatggacagacagacaccacagcctccccttcccagaccccgcagcacgcctctccccaccttcttgggactgctgtgaacatgcctcctcctgccctccgccccgtccccccatcccgtttccctccaggtgttgttgagggcatttggcttcctctgctgcatccccttccagctccctcccctgctcagaatctgataccaaagagacagggcccgggcccaggcagagagcgaccagcaggctcctcagccctctcttgccaaaaagcacaagatgttgaggcgagcagggcaggcccccggggaggggccagagttttctatgaatctatttttcttcagactgaggccttttggtagtcggagcccccgcagtcgtcagcctccctgacgtctgccaccagcgcccccactcctcctcctttctttgctgtttgcaatcacacgtggtgacctcacacacctctgccccttgggcctcccactcccatggctctgggcggtccagaaggagcaggccctgggcctccacctctgtgcagggcacagaaggctggggtggggggaggagtggattcctccccaccctgtcccaggcagcgccactgtccgctgtctccctcctgattctaaaatgtctcaagtgcaatgccccctcccctcctttaccgaggacagcctgcctctgccacagcaaggctgtcggggtcaagctggaaaggccagcagccttccagtggcttctcccaacactcttggggaccaaatatatttaatggttaagggacttgtcccaagtctgacagccagagcgttagaggggccagcggccctcccaggcgatcttgtgtctactctaggactgggcccgagggtggtttacctgcaccgttgactcagtatagtttaaaaatctgccacctgcacaggtatttttgaaagcaaaataaggttttcttttttcccctttcttgtaataaatgataaaattccgagtctttctcactgcctttgtttagaagagagtagctcgtcctcactggtctacactggttgccgaatttacttgtattcctaactgttttgtatatgctgcattgagacttacggcaagaaggcattttttttttttttttattttttttttttttttttgtgggggggggtggggggggggg

SEQ ID NO: 314097 - DNA, 6575 bp, Homo sapiens
cccgatattcggtcagtgggtgatagcaaaacctcgggtacgccaagaccgtgaagaatgacgaactcctcccgcttcggcaaattcattcgcatcaactttgatgtcaatggctacattgttggagccaacattgagacttatcttttggagaaatctcgtgctatccgccaagccaaggaagaacggaccttccacatcttctattatctcctgtctggggctggagagcacctgaagaccgatctcctgttggagccgtacaacaaataccgcttcctgtccaatggacacgtcaccatccccgggcagcaggacaaggacatgttccaggagaccatggaggccatgaggattatgggcatcccagaagaggagcaaatgggcctgctgcgggtcatctcaggggttcttcagctcggcaacatcgtcttcaagaaggagcggaacactgaccaggcgtccatgcccgacaacacagctgcccaaaaggtgtcccatctcttgggtatcaatgtgaccgatttcaccagaggaatcctcaccccgcgcatcaaggtgggacgggattacgtccagaaggcgcagactaaagagcaggctgactttgccatcgaggccttggccaaggcgacctatgagcggatgttccgctggctggtgctgcgcatcaacaaggctctggacaagaccaagaggcagggcgcctccttcatcgggatcctggacattgccggcttcgagatctttgatctgaactcgtttgagcagctgtgcatcaattacaccaatgagaagctgcagcagctcttcaaccacaccatgttcatcctggagcaggaggagtaccagcgcgagggcatcgagtggaacttcatcgactttggcctcgacctgcagccctgcatcgacctcattgagaagccagcaggccccccgggcattctggccctgctggacgaggagtgctggttccccaaagccaccgacaagagcttcgtggagaaggtgatgcaggagcagggcacccaccccaagttccagaagcccaagcagctgaaggacaaagctgatttctgcattatccactatgccggcaaggtggattacaaagctgacgagtggctgatgaagaacatggatcccctgaatgacaacatcgccacactgctccaccagtcctctgacaagtttgtctcggagctgtggaaggatgtggaccgcatcatcggcctggaccaggtggccggcatgtcggagaccgcactgcccggggccttcaagacgcggaagggcatgttccgcactgtggggcagctttacaaggagcagctggccaagctgatggctacgctgaggaacacgaaccccaactttgtccgctgcatcatccccaaccacgagaagaaggccggcaagctggacccgcatctcgtgctggaccagctgcgctgcaacggtgttctcgagggcatccgtatctgccgccagggcttccccaacagggtggtcttccaggagtttcggcagagatatgagatcctgactccaaactccattcccaagggtttcatggacgggaagcaggcgtgcgtgctcatgataaaagccctggagctcgacagcaatctgtaccgcattggccagagcaaagtcttcttccgtgccggtgtgctggcccacctggaggaggagcgagacctgaagatcaccgacgtcatcatagggttccaggcctgctgcaggggctacctggccaggaaagcatttgccaagcggcagcagcagcttaccgccatgaaggtcctccagcggaactgcgctgcctacctgaagctgcggaactggcagtggtggcggctcttcaccaaggtcaagccgctgctgcaggtgagccggcaggaggaggagatgatggccaaggaggaggagctggtgaaggtcagagagaagcagctggctgcggagaacaggctcacggagatggagacgctgcagtctcagctcatggcagagaaattgcagctgcaggagcagctccaggcagaaaccgagctgtgtgccgaggctgaggagctccgggcccgcctgaccgccaagaagcaggaattagaagagatctgccatgacctagaggccagggtggaggaggaggaggagcgctgccagcacctgcaggcggagaagaagaagatgcagcagaacatccaggagcttgaggagcagctggaggaggaggagagcgcccggcagaagctgcagctggagaaggtgaccaccgaggcgaagctgaaaaagctggaggaggagcagatcatcctggaggaccagaactgcaagctggccaaggaaaagaaactgctggaagacagaatagctgagttcaccaccaacctcacagaagaggaggagaaatctaagagcctcgccaagctcaagaacaagcatgaggcaatgatcactgacttggaagagcgcctccgcagggaggagaagcagcgacaggagctggagaagacccgccggaagctggagggagactccacagacctcagcgaccagatcgccgagctccaggcccagatcgcggagctcaagatgcagctggccaagaaagaggaggagctccaggccgccctggccagagtggaagaggaagctgcccagaagaacatggccctcaagaagatccgggagctggaatctcagatctctgaactccaggaagacctggagtctgagcgtgcttccaggaataaagctgagaagcagaaacgggaccttggggaagagctagaggcgctgaaaacagagttggaggacacgctggattccacagctgcccagcaggagctcaggtcaaaacgtgagcaggaggtgaacatcctgaagaagaccctggaggaggaggccaagacccacgaggcccagatccaggagatgaggcagaagcactcacaggccgtggaggagctggcggagcagctggagcagacgaagcgggtgaaagcaaacctcgagaaggcaaagcagactctggagaacgagcggggggagctggccaacgaggtgaaggtgctgctgcagggcaaaggggactcggagcacaagcgcaagaaagtggaggcgcagctgcaggagctgcaggtcaagttcaacgagggagagcgcgtgcgcacagagctggccgacaaggtcaccaagctgcaggtggagctggacaacgtgaccgggcttctcagccagtccgacagcaagtccagcaagctcaccaaggacttctccgcgctggagtcccagctgcaggacactcaggagctgctgcaggaggagaaccggcagaagctgagcctgagcaccaagctcaagcaggtggaggacgagaagaattccttccgggagcagctggaggaggaggaggaggccaagcacaacctggagaagcagatcgccaccctccatgcccaggtggccgacatgaaaaagaagatggaggacagtgtggggtgcctggaaactgctgaggaggtgaagaggaagctccagaaggacctggagggcctgagccagcggcacgaggagaaggtggccgcctacgacaagctggagaagaccaagacgcggctgcagcaggagctggacgacctgctggtggacctggaccaccagcgccagagcgcgtgcaacctggagaagaagcagaagaagtttgaccagctcctggcggaggagaagaccatctctgccaagtatgcagaggagcgcgaccgggctgaggcggaggcccgagagaaggagaccaaggctctgtcgctggcccgggccctggaggaagccatggagcagaaggcggagctggagcggctcaacaagcagttccgcacggagatggaggaccttatgagctccaaggatgatgtgggcaagagtgtccacgagctggagaagtccaagcgggccctagagcagcaggtggaggagatgaagacgcagctggaagagctggaggacgagctgcaggccaccgaagatgccaagctgcggttggaggtcaacctgcaggccatgaaggcccagttcgagcgggacctgcagggccgggacgagcagagcgaggagaagaagaagcagctggtcagacaggtgcgggagatggaggcagagctggaggacgagaggaagcagcgctcgatggcagtggccgcccggaagaagctggagatggacctgaaggacctggaggcgcacatcgactcggccaacaagaaccgggacgaagccatcaaacagctgcggaagctgcaggcccagatgaaggactgcatgcgcgagctggatgacacccgcgcctctcgtgaggagatcctggcccaggccaaagagaacgagaagaagctgaagagcatggaggccgagatgatccagttgcaggaggaactggcagccgcggagcgtgccaagcgccaggcccagcaggagcgggatgagctggctgacgagatcgccaacagcagcggcaaaggagccctggcgttagaggagaagcggcgtctggaggcccgcatcgcccagctggaggaggagctggaggaggagcagggcaacacggagctgatcaacgaccggctgaagaaggccaacctgcagatcgaccagatcaacaccgacctgaacctggagcgcagccacgcccagaagaacgagaatgctcggcagcagctggaacgccagaacaaggagcttaaggtcaagctgcaggagatggagggcactgtcaagtccaagtacaaggcctccatcaccgccctcgaggccaagattgcacagctggaggagcagctggacaacgagaccaaggagcgccaggcagcctgcaaacaggtgcgtcggaccgagaagaagctgaaggatgtgctgctgcaggtggatgacgagcggaggaacgccgagcagtacaaggaccaggccgacaaggcatctacccgcctgaagcagctcaagcggcagctggaggaggccgaagaggaggcccagcgggccaacgcctcccgccggaaactgcagcgcgagctggaggacgccactgagacggccgatgccatgaaccgcgaagtcagctccctaaagaacaagctcaggcgcggggacctgccgtttgtcgtgccccgccgaatggcccggaaaggcgccggggatggctccgacgaagaggtagatggcaaagcggatggggctgaggccaaacctgccgaataagcctcttctcctgcagcctgagatggatggacagacagacaccacagcctccccttcccagaccccgcagcacgcctctccccaccttcttgggactgctgtgaacatgcctcctcctgccctccgccccgtccccccatcccgtttccctccaggtgttgttgagggcatttggcttcctctgctgcatccccttccagctccctcccctgctcagaatctgataccaaagagacagggcccgggcccaggcagagagcgaccagcaggctcctcagccctctcttgccaaaaagcacaagatgttgaggcgagcagggcaggcccccggggaggggccagagttttctatgaatctatttttcttcagactgaggccttttggtagtcggagcccccgcagtcgtcagcctccctgacgtctgccaccagcgcccccactcctcctcctttctttgctgtttgcaatcacacgtggtgacctcacacacctctgtgcagggcacagaaggctggggtggggggaggagtggattcctccccaccctgtcccaggcagcgccactgtccgctgtctccctcctgattctaaaatgtctcaagtgcaatgccccctcccctcctttaccgaggacagcctgcctctgccacagcaaggctgtcggggtcaagctggaaaggccagcagccttccagtggcttctcccaacactcttggggaccaaatatatttaatggttaagggacttgtcccaagtctgacagccagagcgttagaggggccagcggccctcccaggcgatcttgtgtctactctaggactgggcccgagggtggtttacctgcaccgttgactcagtatagtttaaaaatctgccacctgcacaggtatttttgaaagcaaaataaggttttcttttttcccctttcttgtaataaatgataaaattccgagtctttctcactgcctttgtttagaagagagtagctcgtcctcactggtctacactggttgccgaatttacttgtattcctaactgttttgtatatgctgcattgagacttacggcaagaaggcattttttttttttaaaggaaacaaactctcaaatcatgaagtgatataaaagctgcatatgcctacaaagctctgaattcaggtcccagttgctgtcacaaaggagtgagtgaaactcccaccctacccccttttttatataataaaagtgccttagcatgtgttgcagctgtcaccactacagtaagctggtttacagatgttttccactgagcatcacaataaagagaaccatgtgcta

SEQ ID NO: 314098 - DNA, 3845 bp, Homo sapiens
  misc_feature (38)..(38): n is a, c, g, or t
tgctgcagtgtgacttagaggatccccaacgatggtcntcagctgcagcaggagctcaggtcaaaacgtgagcaggaggtgaacatcctgaagaagaccctggaggaggaggccaagacccacgaggcccagatccaggagatgaggcagaagcactcacaggccgtggaggagctggcggagcagctggagcagacgaagcgggtgaaagcaaacctcgagaaggcaaagcagactctggagaacgagcggggggagctggccaacgaggtgaaggtgctgctgcagggcaaaggggactcggagcacaagcgcaagaaagtggaggcgcagctgcaggagctgcaggtcaagttcaacgagggagagcgcgtgcgcacagagctggccgacaaggtcaccaagctgcaggtggagctggacaacgtgaccgggcttctcagccagtccgacagcaagtccagcaagctcaccaaggacttctccgcgctggagtcccagctgcaggacactcaggagctgctgcaggaggagaaccggcagaagctgagcctgagcaccaagctcaagcaggtggaggacgagaagaattccttccgggagcagctggaggaggaggaggaggccaagcacaacctggagaagcagatcgccaccctccatgcccaggtggccgacatgaaaaagaagatggaggacagtgtggggtgcctggaaactgctgaggaggtgaagaggaagctccagaaggacctggagggcctgagccagcggcacgaggagaaggtggccgcctacgacaagctggagaagaccaagacgcggctgcagcaggagctggacgacctgctggtggacctggaccaccagcgccagagcgcgtgcaacctggagaagaagcagaagaagtttgaccagctcctggcggaggagaagaccatctctgccaagtatgcagaggagcgcgaccgggctgaggcggaggcccgagagaaggagaccaaggctctgtcgctggcccgggccctggaggaagccatggagcagaaggcggagctggagcggctcaacaagcagttccgcacggagatggaggaccttatgagctccaaggatgatgtgggcaagagtgtccacgagctggagaagtccaagcgggccctagagcagcaggtggaggagatgaagacgcagctggaagagctggaggacgagctgcaggccaccgaagatgccaagctgcggttggaggtcaacctgcaggccatgaaggcccagttcgagcgggacctgcagggccgggacgagcagagcgaggagaagaagaagcagctggtcagacaggtgcgggagatggaggcagagctggaggacgagaggaagcagcgctcgatggcagtggccgcccggaagaagctggagatggacctgaaggacctggaggcgcacatcgactcggccaacaagaaccgggacgaagccatcaaacagctgcggaagctgcaggcccagatgaaggactgcatgcgcgagctggatgacacccgcgcctctcgtgaggagatcctggcccaggccaaagagaacgagaagaagctgaagagcatggaggccgagatgatccagttgcaggaggaactggcagccgcggagcgtgccaagcgccaggcccagcaggagcgggatgagctggctgacgagatcgccaacagcagcggcaaaggagccctggcgttagaggagaagcggcgtctggaggcccgcatcgcccagctggaggaggagctggaggaggagcagggcaacacggagctgatcaacgaccggctgaagaaggccaacctgcagatcgaccagatcaacaccgacctgaacctggagcgcagccacgcccagaagaacgagaatgctcggcagcagctggaacgccagaacaaggagcttaaggtcaagctgcaggagatggagggcactgtcaagtccaagtacaaggcctccatcaccgccctcgaggccaagattgcacagctggaggagcagctggacaacgagaccaaggagcgccaggcagcctgcaaacaggtgcgtcggaccgagaagaagctgaaggatgtgctgctgcaggtggatgacgagcggaggaacgccgagcagtacaaggaccaggccgacaaggcatctacccgcctgaagcagctcaagcggcagctggaggaggccgaagaggaggcccagcgggccaacgcctcccgccggaaactgcagcgcgagctggaggacgccactgagacggccgatgccatgaaccgcgaagtcagctccctaaagaacaagctcaggcgcggggacctgccgtttgtcgtgccccgccgaatggcccggaaaggcgccggggatggctccgacgaagaggtagatggcaaagcggatggggctgaggccaaacctgccgaataagcctcttctcctgcagcctgagatggatggacagacagacaccacagcctccccttcccagaccccgcagcacgcctctccccaccttcttgggactgctgtgaacatgcctcctcctgccctccgccccgtccccccatcccgtttccctccaggtgttgttgagggcatttggcttcctctgctgcatccccttccagctccctcccctgctcagaatctgataccaaagagacagggcccgggcccaggcagagagcgaccagcaggctcctcagccctctcttgccaaaaagcacaagatgttgaggcgagcagggcaggcccccggggaggggccagagttttctatgaatctatttttcttcagactgaggccttttggtagtcggagcccccgcagtcgtcagcctccctgacgtctgccaccagcgcccccactcctcctcctttctttgctgtttgcaatcacacgtggtgacctcacacacctctgccccttgggcctcccactcccatggctctgggcggtccagaaggagcaggccctgggcctccacctctgtgcagggcacagaaggctggggtggggggaggagtggattcctccccaccctgtcccaggcagcgccactgtccgctgtctccctcctgattctaaaatgtctcaagtgcaatgccccctcccctcctttaccgaggacagcctgcctctgccacagcaaggctgtcggggtcaagctggaaaggccagcagccttccagtggcttctcccaacactcttggggaccaaatatatttaatggttaagggacttgtcccaagtctgacagccagagcgttagaggggccagcggccctcccaggcgatcttgtgtctactctaggactgggcccgagggtggtttacctgcaccgttgactcagtatagtttaaaaatctgccacctgcacaggtatttttgaaagcaaaataaggttttcttttttcccctttcttgtaataaatgataaaattccgagtctttctcactgcctttgtttagaagagagtagctcgtcctcactggtctacactggttgccgaatttacttgtattcctaactgttttgtatatgctgcattgagacttacggcaagaaggcattttttttttttaaaggaaacaaactctcaaatcatgaagtgatataaaagctgcatatgcctacaaagctctgaattcaggtcccagttgctgtcacaaaggagtgagtgaaactcccaccctacccccttttttatataataaaagtgccttagcatgtgttgcagctgtcaccactacagtaagctggtttacagatgttttccactgagcatcacaataaagagaaccatgtgcta

SEQ ID NO: 314099 - DNA, 4282 bp, Homo sapiens
tcctgctgctgctgcagtgtacacgaaagaggaggagctccaggccgcctggcagagtggaagaggaagctgcccagaagaacatggccctcaagaagatccgggagctggaatctcagatctctgaactccaggaagacctggagtctgagcgtgcttccaggaataaagctgagaagcagaaacgggaccttggggaagagctagaggcgctgaaaacagagttggaggacacgctggattccacagctgcccagcaggagctcaggtcaaaacgtgagcaggaggtgaacatcctgaagaagaccctggaggaggaggccaagacccacgaggcccagatccaggagatgaggcagaagcactcacaggccgtggaggagctggcggagcagctggagcagacgaagcgggtgaaagcaaacctcgagaaggcaaagcagactctggagaacgagcggggggagctggccaacgaggtgaaggtgctgctgcagggcaaaggggactcggagcacaagcgcaagaaagtggaggcgcagctgcaggagctgcaggtcaagttcaacgagggagagcgcgtgcgcacagagctggccgacaaggtcaccaagctgcaggtgaggcctccgccaggaccctggtgcgggcagtgggccctagcagcagttgtggcccaggtccccaggtgcatgtgtgctctctgtctctctctcttctcaaactggctcgtcagaccctcatggttcagcttgtgactcaggtccagctttacctaaaggagatgaggtggggcaggagcagtgggggtgggtccatggtcctttgtgtctccccgcccggtgcaggtggagctggacaacgtgaccgggcttctcagccagtccgacagcaagtccagcaagctcaccaaggacttctccgcgctggagtcccagctgcaggacactcaggagctgctgcaggaggagaaccggcagaagctgagcctgagcaccaagctcaagcaggtggaggacgagaagaattccttccgggagcagctggaggaggaggaggaggccaagcacaacctggagaagcagatcgccaccctccatgcccaggtggccgacatgaaaaagaagatggaggacagtgtggggtgcctggaaactgctgaggaggtgaagaggaagctccagaaggacctggagggcctgagccagcggcacgaggagaaggtggccgcctacgacaagctggagaagaccaagacgcggctgcagcaggagctggacgacctgctggtggacctggaccaccagcgccagagcgcgtgcaacctggagaagaagcagaagaagtttgaccagctcctggcggaggagaagaccatctctgccaagtatgcagaggagcgcgaccgggctgaggcggaggcccgagagaaggagaccaaggctctgtcgctggcccgggccctggaggaagccatggagcagaaggcggagctggagcggctcaacaagcagttccgcacggagatggaggaccttatgagctccaaggatgatgtgggcaagagtgtccacgagctggagaagtccaagcgggccctagagcagcaggtggaggagatgaagacgcagctggaagagctggaggacgagctgcaggccaccgaagatgccaagctgcggttggaggtcaacctgcaggccatgaaggcccagttcgagcgggacctgcagggccgggacgagcagagcgaggagaagaagaagcagctggtcagacaggtgcgggagatggaggcagagctggaggacgagaggaagcagcgctcgatggcagtggccgcccggaagaagctggagatggacctgaaggacctggaggcgcacatcgactcggccaacaagaaccgggacgaagccatcaaacagctgcggaagctgcaggcccagatgaaggactgcatgcgcgagctggatgacacccgcgcctctcgtgaggagatcctggcccaggccaaagagaacgagaagaagctgaagagcatggaggccgagatgatccagttgcaggaggaactggcagccgcggagcgtgccaagcgccaggcccagcaggagcgggatgagctggctgacgagatcgccaacagcagcggcaaaggagccctggcgttagaggagaagcggcgtctggaggcccgcatcgcccagctggaggaggagctggaggaggagcagggcaacacggagctgatcaacgaccggctgaagaaggccaacctgcagatcgaccagatcaacaccgacctgaacctggagcgcagccacgcccagaagaacgagaatgctcggcagcagctggaacgccagaacaaggagcttaaggtcaagctgcaggagatggagggcactgtcaagtccaagtacaaggcctccatcaccgccctcgaggccaagattgcacagctggaggagcagctggacaacgagaccaaggagcgccaggcagcctgcaaacaggtgcgtcggaccgagaagaagctgaaggatgtgctgctgcaggtggatgacgagcggaggaacgccgagcagtacaaggaccaggccgacaaggcatctacccgcctgaagcagctcaagcggcagctggaggaggccgaagaggaggcccagcgggccaacgcctcccgccggaaactgcagcgcgagctggaggacgccactgagacggccgatgccatgaaccgcgaagtcagctccctaaagaacaagctcaggcgcggggacctgccgtttgtcgtgccccgccgaatggcccggaaaggcgccggggatggctccgacgaagaggtagatggcaaagcggatggggctgaggccaaacctgccgaataagcctcttctcctgcagcctgagatggatggacagacagacaccacagcctccccttcccagaccccgcagcacgcctctccccaccttcttgggactgctgtgaacatgcctcctcctgccctccgccccgtccccccatcccgtttccctccaggtgttgttgagggcatttggcttcctctgctgcatccccttccagctccctcccctgctcagaatctgataccaaagagacagggcccgggcccaggcagagagcgaccagcaggctcctcagccctctcttgccaaaaagcacaagatgttgaggcgagcagggcaggcccccggggaggggccagagttttctatgaatctatttttcttcagactgaggccttttggtagtcggagcccccgcagtcgtcagcctccctgacgtctgccaccagcgcccccactcctcctcctttctttgctgtttgcaatcacacgtggtgacctcacacacctctgccccttgggcctcccactcccatggctctgggcggtccagaaggagcaggccctgggcctccacctctgtgcagggcacagaaggctggggtggggggaggagtggattcctccccaccctgtcccaggcagcgccactgtccgctgtctccctcctgattctaaaatgtctcaagtgcaatgccccctcccctcctttaccgaggacagcctgcctctgccacagcaaggctgtcggggtcaagctggaaaggccagcagccttccagtggcttctcccaacactcttggggaccaaatatatttaatggttaagggacttgtcccaagtctgacagccagagcgttagaggggccagcggccctcccaggcgatcttgtgtctactctaggactgggcccgagggtggtttacctgcaccgttgactcagtatagtttaaaaatctgccacctgcacaggtatttttgaaagcaaaataaggttttcttttttcccctttcttgtaataaatgataaaattccgagtctttctcactgcctttgtttagaagagagtagctcgtcctcactggtctacactggttgccgaatttacttgtattcctaactgttttgtatatgctgcattgagacttacggcaagaaggcattttttttttttaaaggaaacaaactctcaaatcatgaagtgatataaaagctgcatatgcctacaaagctctgaattcaggtcccagttgctgtcacaaaggagtgagtgaaactcccaccctacccccttttttatataataaaagtgccttagcatgtgttgcagctgtcaccactacagtaagctggtttacagatgttttccactgagcatcacaataaagagaaccatgtgcta

SEQ ID NO: 314100 - DNA, 2928 bp, Homo sapiens
tggcctgcaggttgacctccaaccgcagcttggcatcttcggtggcctgcagctcgtcctccagctcttccagctgcgtcttaccaaggctctgtcgctggcccgggccctggaggaagccatggagcagaaggcggagctggagcggctcaacaagcagttccgcacggagatggaggaccttatgagctccaaggatgatgtgggcaagagtgtccacgagctggagaagtccaagcgggccctagagcagcaggtggaggagatgaagacgcagctggaagagctggaggacgagctgcaggccaccgaagatgccaagctgcggttggaggtcaacctgcaggccatgaaggcccagttcgagcgggacctgcagggccgggacgagcagagcgaggagaagaagaagcagctggtcagacaggtgcgggagatggaggcagagctggaggacgagaggaagcagcgctcgatggcagtggccgcccggaagaagctggagatggacctgaaggacctggaggcgcacatcgactcggccaacaagaaccgggacgaagccatcaaacagctgcggaagctgcaggcccagatgaaggactgcatgcgcgagctggatgacacccgcgcctctcgtgaggagatcctggcccaggccaaagagaacgagaagaagctgaagagcatggaggccgagatgatccagttgcaggaggaactggcagccgcggagcgtgccaagcgccaggcccagcaggagcgggatgagctggctgacgagatcgccaacagcagcggcaaaggagccctggcgttagaggagaagcggcgtctggaggcccgcatcgcccagctggaggaggagctggaggaggagcagggcaacacggagctgatcaacgaccggctgaagaaggccaacctgcagatcgaccagatcaacaccgacctgaacctggagcgcagccacgcccagaagaacgagaatgctcggcagcagctggaacgccagaacaaggagcttaaggtcaagctgcaggagatggagggcactgtcaagtccaagtacaaggcctccatcaccgccctcgaggccaagattgcacagctggaggagcagctggacaacgagaccaaggagcgccaggcagcctgcaaacaggtgcgtcggaccgagaagaagctgaaggatgtgctgctgcaggtggatgacgagcggaggaacgccgagcagtacaaggaccaggccgacaaggcatctacccgcctgaagcagctcaagcggcagctggaggaggccgaagaggaggcccagcgggccaacgcctcccgccggaaactgcagcgcgagctggaggacgccactgagacggccgatgccatgaaccgcgaagtcagctccctaaagaacaagctcaggcgcggggacctgccgtttgtcgtgccccgccgaatggcccggaaaggcgccggggatggctccgacgaagaggtagatggcaaagcggatggggctgaggccaaacctgccgaataagcctcttctcctgcagcctgagatggatggacagacagacaccacagcctccccttcccagaccccgcagcacgcctctccccaccttcttgggactgctgtgaacatgcctcctcctgccctccgccccgtccccccatcccgtttccctccaggtgttgttgagggcatttggcttcctctgctgcatccccttccagctccctcccctgctcagaatctgataccaaagagacagggcccgggcccaggcagagagcgaccagcaggctcctcagccctctcttgccaaaaagcacaagatgttgaggcgagcagggcaggcccccggggaggggccagagttttctatgaatctatttttcttcagactgaggccttttggtagtcggagcccccgcagtcgtcagcctccctgacgtctgccaccagcgcccccactcctcctcctttctttgctgtttgcaatcacacgtggtgacctcacacacctctgccccttgggcctcccactcccatggctctgggcggtccagaaggagcaggccctgggcctccacctctgtgcagggcacagaaggctggggtggggggaggagtggattcctccccaccctgtcccaggcagcgccactgtccgctgtctccctcctgattctaaaatgtctcaagtgcaatgccccctcccctcctttaccgaggacagcctgcctctgccacagcaaggctgtcggggtcaagctggaaaggccagcagccttccagtggcttctcccaacactcttggggaccaaatatatttaatggttaagggacttgtcccaagtctgacagccagagcgttagaggggccagcggccctcccaggcgatcttgtgtctactctaggactgggcccgagggtggtttacctgcaccgttgactcagtatagtttaaaaatctgccacctgcacaggtatttttgaaagcaaaataaggttttcttttttcccctttcttgtaataaatgataaaattccgagtctttctcactgcctttgtttagaagagagtagctcgtcctcactggtctacactggttgccgaatttacttgtattcctaactgttttgtatatgctgcattgagacttacggcaagaaggcattttttttttttaaaggaaacaaactctcaaatcatgaagtgatataaaagctgcatatgcctacaaagctctgaattcaggtcccagttgctgtcacaaaggagtgagtgaaactcccaccctacccccttttttatataataaaagtgccttagcatgtgttgcagctgtcaccactacagtaagctggtttacagatgttttccactgagcatcacaataaagagaaccatgtgcta

SEQ ID NO: 314101 - DNA, 6329 bp, Homo sapiens
cccgatattcggtcagtgggtgatagcaaaacctcgggtacgccaagaccgtgaagaatgacgaactcctcccgcttcggcaaattcattcgcatcaactttgatgtcaatggctacattgttggagccaacattgagacttatcttttggagaaatctcgtgctatccgccaagccaaggaagaacggaccttccacatcttctattatctcctgtctggggctggagagcacctgaagaccgatctcctgttggagccgtacaacaaataccgcttcctgtccaatggacacgtcaccatccccgggcagcaggacaaggacatgttccaggagaccatggaggccatgaggattatgggcatcccagaagaggagcaaatgggcctgctgcgggtcatctcaggggttcttcagctcggcaacatcgtcttcaagaaggagcggaacactgaccaggcgtccatgcccgacaacacagctgcccaaaaggtgtcccatctcttgggtatcaatgtgaccgatttcaccagaggaatcctcaccccgcgcatcaaggtgggacgggattacgtccagaaggcgcagactaaagagcaggctgactttgccatcgaggccttggccaaggcgacctatgagcggatgttccgctggctggtgctgcgcatcaacaaggctctggacaagaccaagaggcagggcgcctccttcatcgggatcctggacattgccggcttcgagatctttgatctgaactcgtttgagcagctgtgcatcaattacaccaatgagaagctgcagcagctcttcaaccacaccatgttcatcctggagcaggaggagtaccagcgcgagggcatcgagtggaacttcatcgactttggcctcgacctgcagccctgcatcgacctcattgagaagccagcaggccccccgggcattctggccctgctggacgaggagtgctggttccccaaagccaccgacaagagcttcgtggagaaggtgatgcaggagcagggcacccaccccaagttccagaagcccaagcagctgaaggacaaagctgatttctgcattatccactatgccggcaaggtggattacaaagctgacgagtggctgatgaagaacatggatcccctgaatgacaacatcgccacactgctccaccagtcctctgacaagtttgtctcggagctgtggaaggatgtggaccgcatcatcggcctggaccaggtggccggcatgtcggagaccgcactgcccggggccttcaagacgcggaagggcatgttccgcactgtggggcagctttacaaggagcagctggccaagctgatggctacgctgaggaacacgaaccccaactttgtccgctgcatcatccccaaccacgagaagaaggccggcaagctggacccgcatctcgtgctggaccagctgcgctgcaacggtgttctcgagggcatccgtatctgccgccagggcttccccaacagggtggtcttccaggagtttcggcagagatatgagatcctgactccaaactccattcccaagggtttcatggacgggaagcaggcgtgcgtgctcatgataaaagccctggagctcgacagcaatctgtaccgcattggccagagcaaagtcttcttccgtgccggtgtgctggcccacctggaggaggagcgagacctgaagatcaccgacgtcatcatagggttccaggcctgctgcaggggctacctggccaggaaagcatttgccaagcggcagcagcagcttaccgccatgaaggtcctccagcggaactgcgctgcctacctgaagctgcggaactggcagtggtggcggctcttcaccaaggtcaagccgctgctgcaggtgagccggcaggaggaggagatgatggccaaggaggaggagctggtgaaggtcagagagaagcagctggctgcggagaacaggctcacggagatggagacgctgcagtctcagctcatggcagagaaattgcagctgcaggagcagctccaggcagaaaccgagctgtgtgccgaggctgaggagctccgggcccgcctgaccgccaagaagcaggaattagaagagatctgccatgacctagaggccagggtggaggaggaggaggagcgctgccagcacctgcaggcggagaagaagaagatgcagcagaacatccaggagcttgaggagcagctggaggaggaggagagcgcccggcagaagctgcagctggagaaggtgaccaccgaggcgaagctgaaaaagctggaggaggagcagatcatcctggaggaccagaactgcaagctggccaaggaaaagaaactgctggaagacagaatagctgagttcaccaccaacctcacagaagaggaggagaaatctaagagcctcgccaagctcaagaacaagcatgaggcaatgatcactgacttggaagagcgcctccgcagggaggagaagcagcgacaggagctggagaagacccgccggaagctggagggagactccacagacctcagcgaccagatcgccgagctccaggcccagatcgcggagctcaagatgcagctggccaagaaagaggaggagctccaggccgccctggccagagtggaagaggaagctgcccagaagaacatggccctcaagaagatccgggagctggaatctcagatctctgaactccaggaagacctggagtctgagcgtgcttccaggaataaagctgagaagcagaaacgggaccttggggaagagctagaggcgctgaaaacagagttggaggacacgctggattccacagctgcccagcaggagctcaggtcaaaacgtgagcaggaggtgaacatcctgaagaagaccctggaggaggaggccaagacccacgaggcccagatccaggagatgaggcagaagcactcacaggccgtggaggagctggcggagcagctggagcagacgaagcgggtgaaagcaaacctcgagaaggcaaagcagactctggagaacgagcggggggagctggccaacgaggtgaaggtgctgctgcagggcaaaggggactcggagcacaagcgcaagaaagtggaggcgcagctgcaggagctgcaggtcaagttcaacgagggagagcgcgtgcgcacagagctggccgacaaggtcaccaagctgcaggtggagctggacaacgtgaccgggcttctcagccagtccgacagcaagtccagcaagctcaccaaggacttctccgcgctggagtcccagctgcaggacactcaggagctgctgcaggaggagaaccggcagaagctgagcctgagcaccaagctcaagcaggtggaggacgagaagaattccttccgggagcagctggaggaggaggaggaggccaagcacaacctggagaagcagatcgccaccctccatgcccaggtggccgacatgaaaaagaagatggaggacagtgtggggtgcctggaaactgctgaggaggtgaagaggaagctccagaaggacctggagggcctgagccagcggcacgaggagaaggtggccgcctacgacaagctggagaagaccaagacgcggctgcagcaggagctggacgacctgctggtggacctggaccaccagcgccagagcgcgtgcaacctggagaagaagcagaagaagtttgaccagctcctggcggaggagaagaccatctctgccaagtatgcagaggagcgcgaccgggctgaggcggaggcccgagagaaggagaccaaggctctgtcgctggcccgggccctggaggaagccatggagcagaaggcggagctggagcggctcaacaagcagttccgcacggagatggaggaccttatgagctccaaggatgatgtgggcaagagtgtccacgagctggagaagtccaagcgggccctagagcagcaggtggaggagatgaagacgcagctggaagagctggaggacgagctgcaggccaccgaagatgccaagctgcggttggaggtcaacctgcaggccatgaaggcccagttcgagcgggacctgcagggccgggacgagcagagcgaggagaagaagaagcagctggtcagacaggtgcgggagatggaggcagagctggaggacgagaggaagcagcgctcgatggcagtggccgcccggaagaagctggagatggacctgaaggacctggaggcgcacatcgactcggccaacaagaaccgggacgaagccatcaaacagctgcggaagctgcaggcccagatgaaggactgcatgcgcgagctggatgacacccgcgcctctcgtgaggagatcctggcccaggccaaagagaacgagaagaagctgaagagcatggaggccgagatgatccagttgcaggaggaactggcagccgcggagcgtgccaagcgccaggcccagcaggagcgggatgagctggctgacgagatcgccaacagcagcggcaaaggagccctggcgttagaggagaagcggcgtctggaggcccgcatcgcccagctggaggaggagctggaggaggagcagggcaacacggagctgatcaacgaccggctgaagaaggccaacctgcagatcgaccagatcaacaccgacctgaacctggagcgcagccacgcccagaagaacgagaatgctcggcagcagctggaacgccagaacaaggagcttaaggtcaagctgcaggagatggagggcactgtcaagtccaagtacaaggcctccatcaccgccctcgaggccaagattgcacagctggaggagcagctggacaacgagaccaaggagcgccaggcagcctgcaaacaggtgcgtcggaccgagaagaagctgaaggatgtgctgctgcaggtggatgacgagcggaggaacgccgagcagtacaaggaccaggccgacaaggcatctacccgcctgaagcagctcaagcggcagctggaggaggccgaagaggaggcccagcgggccaacgcctcccgccggaaactgcagcgcgagctggaggacgccactgagacggccgatgccatgaaccgcgaagtcagctccctaaagaacaagctcaggcgcggggacctgccgtttgtcgtgccccgccgaatggcccggaaaggcgccggggatggctccgacgaagaggtagatggcaaagcggatggggctgaggccaaacctgccgaataagcctcttctcctgcagcctgagatggatggacagacagacaccacagcctccccttcccagaccccgcagcacgcctctccccaccttcttgggactgctgtgaacatgcctcctcctgccctccgccccgtccccccatcccgtttccctccaggtgttgttgagggcatttggcttcctctgctgcatccccttccagctccctcccctgctcagaatctgataccaaagagacagggcccgggcccaggcagagagcgaccagcaggctcctcagccctctcttgccaaaaagcacaagatgttgaggcgagcagggcaggcccccggggaggggccagagttttctatgaatctatttttcttcagactgaggccttttggtagtcggagcccccgcagtcgtcagcctccctgacgtctgccaccagcgcccccactcctcctcctttctttgctgtttgcaatcacacgtggtgacctcacacacctctgccccttgggcctcccactcccatggctctgggcggtccagaaggagcaggccctgggcctccacctctgtgcagggcacagaaggctggggtggggggaggagtggattcctccccaccctgtcccaggcagcgccactgtccgctgtctccctcctgattctaaaatgtctcaagtgcaatgccccctcccctcctttaccgaggacagcctgcctctgccacagcaaggctgtcggggtcaagctggaaaggccagcagccttccagtggcttctcccaacactcttggggaccaaatatatttaatggttaagggacttgtcccaagtctgacagccagagcgttagaggggccagcggccctcccaggcgatcttgtgtctactctaggactgggcccgagggtggtttacctgcaccgttgactcagtatagtttaaaaatctgccacctgcacaggtatttttgaaagcaaaataaggttttcttttttcccctttcttgtaataaatgataaaattccaaaaaaaaagtcgaccggccgcgaatttagtagtagtagtagtagtagtagc

SEQ ID NO: 314102 - DNA, 5749 bp, Homo sapiens
cccgatattcggtcagtgggtgatagcaaaacctcgggtacgccaagaccgtgaagaatgacgaactcctcccgcttcggcaaattcattcgcatcaactttgatgtcaatggctacattgttggagccaacattgagacttatcttttggagaaatctcgtgctatccgccaagccaaggaagaacggaccttccacatcttctattatctcctgtctggggctggagagcacctgaagaccgatctcctgttggagccgtacaacaaataccgcttcctgtccaatggacacgtcaccatccccgggcagcaggacaaggacatgttccaggagaccatggaggccatgaggattatgggcatcccagaagaggagcaaatgggcctgctgcgggtcatctcaggggttcttcagctcggcaacatcgtcttcaagaaggagcggaacactgaccaggcgtccatgcccgacaacacagctgcccaaaaggtgtcccatctcttgggtatcaatgtgaccgatttcaccagaggaatcctcaccccgcgcatcaaggtgggacgggattacgtccagaaggcgcagactaaagagcaggctgactttgccatcgaggccttggccaaggcgacctatgagcggatgttccgctggctggtgctgcgcatcaacaaggctctggacaagaccaagaggcagggcgcctccttcatcgggatcctggacattgccggcttcgagatctttgatctgaactcgtttgagcagctgtgcatcaattacaccaatgagaagctgcagcagctcttcaaccacaccatgttcatcctggagcaggaggagtaccagcgcgagggcatcgagtggaacttcatcgactttggcctcgacctgcagccctgcatcgacctcattgagaagccagcaggccccccgggcattctggccctgctggacgaggagtgctggttccccaaagccaccgacaagagcttcgtggagaaggtgatgcaggagcagggcacccaccccaagttccagaagcccaagcagctgaaggacaaagctgatttctgcattatccactatgccggcaaggtggattacaaagctgacgagtggctgatgaagaacatggatcccctgaatgacaacatcgccacactgctccaccagtcctctgacaagtttgtctcggagctgtggaaggatgtggaccgcatcatcggcctggaccaggtggccggcatgtcggagaccgcactgcccggggccttcaagacgcggaagggcatgttccgcactgtggggcagctttacaaggagcagctggccaagctgatggctacgctgaggaacacgaaccccaactttgtccgctgcatcatccccaaccacgagaagaaggccggcaagctggacccgcatctcgtgctggaccagctgcgctgcaacggtgttctcgagggcatccgtatctgccgccagggcttccccaacagggtggtcttccaggagtttcggcagagatatgagatcctgactccaaactccattcccaagggtttcatggacgggaagcaggcgtgcgtgctcatgataaaagccctggagctcgacagcaatctgtaccgcattggccagagcaaagtcttcttccgtgccggtgtgctggcccacctggaggaggagcgagacctgaagatcaccgacgtcatcatagggttccaggcctgctgcaggggctacctggccaggaaagcatttgccaagcggcagcagcagcttaccgccatgaaggtcctccagcggaactgcgctgcctacctgaagctgcggaactggcagtggtggcggctcttcaccaaggtcaagccgctgctgcaggtgagccggcaggaggaggagatgatggccaaggaggaggagctggtgaaggtcagagagaagcagctggctgcggagaacaggctcacggagatggagacgctgcagtctcagctcatggcagagaaattgcagctgcaggagcagctccaggcagaaaccgagctgtgtgccgaggctgaggagctccgggcccgcctgaccgccaagaagcaggaattagaagagatctgccatgacctagaggccagggtggaggaggaggaggagcgctgccagcacctgcaggcggagaagaagaagatgcagcagaacatccaggagcttgaggagcagctggaggaggaggagagcgcccggcagaagctgcagctggagaaggtgaccaccgaggcgaagctgaaaaagctggaggaggagcagatcatcctggaggaccagaactgcaagctggccaaggaaaagaaactgctggaagacagaatagctgagttcaccaccaacctcacagaagaggaggagaaatctaagagcctcgccaagctcaagaacaagcatgaggcaatgatcactgacttggaagagcgcctccgcagggaggagaagcagcgacaggagctggagaagacccgccggaagctggagggagactccacagacctcagcgaccagatcgccgagctccaggcccagatcgcggagctcaagatgcagctggccaagaaagaggaggagctccaggccgccctggccagagtggaagaggaagctgcccagaagaacatggccctcaagaagatccgggagctggaatctcagatctctgaactccaggaagacctggagtctgagcgtgcttccaggaataaagctgagaagcagaaacgggaccttggggaagagctagaggcgctgaaaacagagttggaggacacgctggattccacagctgcccagcaggagctcaggtcaaaacgtgagcaggaggtgaacatcctgaagaagaccctggaggaggaggccaagacccacgaggcccagatccaggagatgaggcagaagcactcacaggccgtggaggagctggcggagcagctggagcagacgaagcgggtgaaagcaaacctcgagaaggcaaagcagactctggagaacgagcggggggagctggccaacgaggtgaaggtgctgctgcagggcaaaggggactcggagcacaagcgcaagaaagtggaggcgcagctgcaggagctgcaggtcaagttcaacgagggagagcgcgtgcgcacagagctggccgacaaggtcaccaagctgcaggtggagctggacaacgtgaccgggcttctcagccagtccgacagcaagtccagcaagctcaccaaggacttctccgcgctggagtcccagctgcaggacactcaggagctgctgcaggaggagaaccggcagaagctgagcctgagcaccaagctcaagcaggtggaggacgagaagaattccttccgggagcagctggaggaggaggaggaggccaagcacaacctggagaagcagatcgccaccctccatgcccaggtggccgacatgaaaaagaagatggaggacagtgtggggtgcctggaaactgctgaggaggtgaagaggaagctccagaaggacctggagggcctgagccagcggcacgaggagaaggtggccgcctacgacaagctggagaagaccaagacgcggctgcagcaggagctggacgacctgctggtggacctggaccaccagcgccagagcgcgtgcaacctggagaagaagcagaagaagtttgaccagctcctggcggaggagaagaccatctctgccaagtatgcagaggagcgcgaccgggctgaggcggaggcccgagagaaggagaccaaggctctgtcgctggcccgggccctggaggaagccatggagcagaaggcggagctggagcggctcaacaagcagttccgcacggagatggaggaccttatgagctccaaggatgatgtgggcaagagtgtccacgagctggagaagtccaagcgggccctagagcagcaggtggaggagatgaagacgcagctggaagagctggaggacgagctgcaggccaccgaagatgccaagctgcggttggaggtcaacctgcaggccatgaaggcccagttcgagcgggacctgcagggccgggacgagcagagcgaggagaagaagaagcagctggtcagacaggtgcgggagatggaggcagagctggaggacgagaggaagcagcgctcgatggcagtggccgcccggaagaagctggagatggacctgaaggacctggaggcgcacatcgactcggccaacaagaaccgggacgaagccatcaaacagctgcggaagctgcaggcccagatgaaggactgcatgcgcgagctggatgacacccgcgcctctcgtgaggagatcctggcccaggccaaagagaacgagaagaagctgaagagcatggaggccgagatgatccagttgcaggaggaactggcagccgcggagcgtgccaagcgccaggcccagcaggagcgggatgagctggctgacgagatcgccaacagcagcggcaaaggagccctggcgttagaggagaagcggcgtctggaggcccgcatcgcccctgctcagaatctgataccaaagagacagggcccgggcccaggcagagagcgaccagcaggctcctcagccctctcttgccaaaaagcacaagatgttgaggcgagcagggcaggcccccggggaggggccagagttttctatgaatctatttttcttcagactgaggccttttggtagtcggagcccccgcagtcgtcagcctccctgacgtctgccaccagcgcccccactcctcctcctttctttgctgtttgcaatcacacgtggtgacctcacacacctctgccccttgggcctcccactcccatggctctgggcggtccagaaggagcaggccctgggcctccacctctgtgcagggcacagaaggctggggtggggggaggagtggattcctccccaccctgtcccaggcagcgccactgtccgctgtctccctcctgattctaaaatgtctcaagtgcaatgccccctcccctcctttaccgaggacagcctgcctctgccacagcaaggctgtcggggtcaagctggaaaggccagcagccttccagtggcttctcccaacactcttggggaccaaatatatttaatggttaagggacttgtcccaagtctgacagccagagcgttagaggggccagcggccctcccaggcgatcttgtgtctactctaggactgggcccgagggtggtttacctgcaccgttgactcagtatagtttaaaaatctgccacctgcacaggtatttttgaaagcaaaataaggttttcttttttcccctttcttgtaataaatgataaaattccgagtctttctcactgcctttgtttagaagagagtagctcgtcctcactggtctacactggttgccgaatttacttgtattcctaactgttttgtatatgctgcattgagacttacggcaagaaggcattttttttttttaaaggaaacaaactctcaaatcatgaagtgatataaaagctgcatatgcctacaaagctctgaattcaggtcccagttgctgtcacaaaggagtgagtgaaactcccaccctacccccttttttatataataaaagtgccttagcatgtgttgcagctgtcaccactacagtaagctggtttacagatgttttccactgagcatcacaataaagagaaccatgtgcta

SEQ ID NO: 314103 - DNA, 6234 bp, Homo sapiens
  misc_feature (6205)..(6205): n is a, c, g, or t
  misc_feature (6231)..(6231): n is a, c, g, or t
cccgatattcggtcagtgggtgatagcaaaacctcgggtacgccaagaccgtgaagaatgacgaactcctcccgcttcggcaaattcattcgcatcaactttgatgtcaatggctacattgttggagccaacattgagacttatcttttggagaaatctcgtgctatccgccaagccaaggaagaacggaccttccacatcttctattatctcctgtctggggctggagagcacctgaagaccgatctcctgttggagccgtacaacaaataccgcttcctgtccaatggacacgtcaccatccccgggcagcaggacaaggacatgttccaggagaccatggaggccatgaggattatgggcatcccagaagaggagcaaatgggcctgctgcgggtcatctcaggggttcttcagctcggcaacatcgtcttcaagaaggagcggaacactgaccaggcgtccatgcccgacaacacagctgcccaaaaggtgtcccatctcttgggtatcaatgtgaccgatttcaccagaggaatcctcaccccgcgcatcaaggtgggacgggattacgtccagaaggcgcagactaaagagcaggctgactttgccatcgaggccttggccaaggcgacctatgagcggatgttccgctggctggtgctgcgcatcaacaaggctctggacaagaccaagaggcagggcgcctccttcatcgggatcctggacattgccggcttcgagatctttgatctgaactcgtttgagcagctgtgcatcaattacaccaatgagaagctgcagcagctcttcaaccacaccatgttcatcctggagcaggaggagtaccagcgcgagggcatcgagtggaacttcatcgactttggcctcgacctgcagccctgcatcgacctcattgagaagccagcaggccccccgggcattctggccctgctggacgaggagtgctggttccccaaagccaccgacaagagcttcgtggagaaggtgatgcaggagcagggcacccaccccaagttccagaagcccaagcagctgaaggacaaagctgatttctgcattatccactatgccggcaaggtggattacaaagctgacgagtggctgatgaagaacatggatcccctgaatgacaacatcgccacactgctccaccagtcctctgacaagtttgtctcggagctgtggaaggatgtggaccgcatcatcggcctggaccaggtggccggcatgtcggagaccgcactgcccggggccttcaagacgcggaagggcatgttccgcactgtggggcagctttacaaggagcagctggccaagctgatggctacgctgaggaacacgaaccccaactttgtccgctgcatcatccccaaccacgagaagaaggccggcaagctggacccgcatctcgtgctggaccagctgcgctgcaacggtgttctcgagggcatccgtatctgccgccagggcttccccaacagggtggtcttccaggagtttcggcagagatatgagatcctgactccaaactccattcccaagggtttcatggacgggaagcaggcgtgcgtgctcatgataaaagccctggagctcgacagcaatctgtaccgcattggccagagcaaagtcttcttccgtgccggtgtgctggcccacctggaggaggagcgagacctgaagatcaccgacgtcatcatagggttccaggcctgctgcaggggctacctggccaggaaagcatttgccaagcggcagcagcagcttaccgccatgaaggtcctccagcggaactgcgctgcctacctgaagctgcggaactggcagtggtggcggctcttcaccaaggtcaagccgctgctgcaggtgagccggcaggaggaggagatgatggccaaggaggaggagctggtgaaggtcagagagaagcagctggctgcggagaacaggctcacggagatggagacgctgcagtctcagctcatggcagagaaattgcagctgcaggagcagctccaggcagaaaccgagctgtgtgccgaggctgaggagctccgggcccgcctgaccgccaagaagcaggaattagaagagatctgccatgacctagaggccagggtggaggaggaggaggagcgctgccagcacctgcaggcggagaagaagaagatgcagcagaacatccaggagcttgaggagcagctggaggaggaggagagcgcccggcagaagctgcagctggagaaggtgaccaccgaggcgaagctgaaaaagctggaggaggagcagatcatcctggaggaccagaactgcaagctggccaaggaaaagaaactgctggaagacagaatagctgagttcaccaccaacctcacagaagaggaggagaaatctaagagcctcgccaagctcaagaacaagcatgaggcaatgatcactgacttggaagagcgcctccgcagggaggagaagcagcgacaggagctggagaagacccgccggaagctggagggagactccacagacctcagcgaccagatcgccgagctccaggcccagatcgcggagctcaagatgcagctggccaagaaagaggaggagctccaggccgccctggccagagtggaagaggaagctgcccagaagaacatggccctcaagaagatccgggagctggaatctcagatctctgaactccaggaagacctggagtctgagcgtgcttccaggaataaagctgagaagcagaaacgggaccttggggaagagctagaggcgctgaaaacagagttggaggacacgctggattccacagctgcccagcaggagctcaggtcaaaacgtgagcaggaggtgaacatcctgaagaagaccctggaggaggaggccaagacccacgaggcccagatccaggagatgaggcagaagcactcacaggccgtggaggagctggcggagcagctggagcagacgaagcgggtgaaagcaaacctcgagaaggcaaagcagactctggagaacgagcggggggagctggccaacgaggtgaaggtgctgctgcagggcaaaggggactcggagcacaagcgcaagaaagtggaggcgcagctgcaggagctgcaggtcaagttcaacgagggagagcgcgtgcgcacagagctggccgacaaggtcaccaagctgcaggtggagctggacaacgtgaccgggcttctcagccagtccgacagcaagtccagcaagctcaccaaggacttctccgcgctggagtcccagctgcaggacactcaggagctgctgcaggaggagaaccggcagaagctgagcctgagcaccaagctcaagcaggtggaggacgagaagaattccttccgggagcagctggaggaggaggaggaggccaagcacaacctggagaagcagatcgccaccctccatgcccaggtggccgacatgaaaaagaagatggaggacagtgtggggtgcctggaaactgctgaggaggtgaagaggaagctccagaaggacctggagggcctgagccagcggcacgaggagaaggtggccgcctacgacaagctggagaagaccaagacgcggctgcagcaggagctggacgacctgctggtggacctggaccaccagcgccagagcgcgtgcaacctggagaagaagcagaagaagtttgaccagctcctggcggaggagaagaccatctctgccaagtatgcagaggagcgcgaccgggctgaggcggaggcccgagagaaggagaccaaggctctgtcgctggcccgggccctggaggaagccatggagcagaaggcggagctggagcggctcaacaagcagttccgcacggagatggaggaccttatgagctccaaggatgatgtgggcaagagtgtccacgagctggagaagtccaagcgggccctagagcagcaggtggaggagatgaagacgcagctggaagagctggaggacgagctgcaggccaccgaagatgccaagctgcggttggaggtcaacctgcaggccatgaaggcccagttcgagcgggacctgcagggccgggacgagcagagcgaggagaagaagaagcagctggtcagacaggtgcgggagatggaggcagagctggaggacgagaggaagcagcgctcgatggcagtggccgcccggaagaagctggagatggacctgaaggacctggaggcgcacatcgactcggccaacaagaaccgggacgaagccatcaaacagctgcggaagctgcaggcccagatgaaggactgcatgcgcgagctggatgacacccgcgcctctcgtgaggagatcctggcccaggccaaagagaacgagaagaagctgaagagcatggaggccgagatgatccagttgcaggaggaactggcagccgcggagcgtgccaagcgccaggcccagcaggagcgggatgagctggctgacgagatcgccaacagcagcggcaaaggagccctggcgttagaggagaagcggcgtctggaggcccgcatcgcccagctggaggaggagctggaggaggagcagggcaacacggagctgatcaacgaccggctgaagaaggccaacctgcagatcgaccagatcaacaccgacctgaacctggagcgcagccacgcccagaagaacgagaatgctcggcagcagctggaacgccagaacaaggagcttaaggtcaagctgcaggagatggagggcactgtcaagtccaagtacaaggcctccatcaccgccctcgaggccaagattgcacagctggaggagcagctggacaacgagaccaaggagcgccaggcagcctgcaaacaggtgcgtcggaccgagaagaagctgaaggatgtgctgctgcaggtggatgacgagcggaggaacgccgagcagtacaaggaccaggccgacaaggcatctacccgcctgaagcagctcaagcggcagctggaggaggccgaagaggaggcccagcgggccaacgcctcccgccggaaactgcagcgcgagctggaggacgccactgagacggccgatgccatgaaccgcgaagtcagctccctaaagaacaagctcaggcgcggggacctgccgtttgtcgtgccccgccgaatggcccggaaaggcgccggggatggctccgacgaagaggtagatggcaaagcggatggggctgaggccaaacctgccgaataagcctcttctcctgcagcctgagatggatggacagacagacaccacagcctccccttcccagaccccgcagcacgcctctccccaccttcttgggactgctgtgaacatgcctcctcctgccctccgccccgtccccccatcccgtttccctccaggtgttgttgagggcatttggcttcctctgctgcatccccttccagctccctcccctgctcagaatctgataccaaagagacagggcccgggcccaggcagagagcgaccagcaggctcctcagccctctcttgccaaaaagcacaagatgttgaggcgagcagggcaggcccccggggaggggccagagttttctatgaatctatttttcttcagactgaggccttttggtagtcggagcccccgcagtcgtcagcctccctgacgtctgccaccagcgcccccactcctcctcctttctttgctgtttgcaatcacacgtggtgacctcacacacctctgccccttgggcctcccactcccatggctctgggcggtccagaaggagcaggccctgggcctccacctctgtgcagggcacagaaggctggggtggggggaggagtggattcctccccaccctgtcccaggcagcgccactgtccgctgtctccctcctgattctaaaatgtctcaagtgcaatgccccctcccctcctttaccgaggacagcctgcctctgccacagcaaggctgtcggggtcaagctggaaaggccagcagccttccagtggcttctcccaacactcttggggaccaaatatatttaatggttaagggacttgtcccaagtctgacagccagagcgttagaggggccagcggccctcccaggcgatcttgtgtctactctaggactgggcccgagggtggtttacctgcaccgttgactcagtatagtttaaaaatccttatnttgctttcaaaaatacctgtgcagtngac

SEQ ID NO: 314104 - DNA, 5925 bp, Homo sapiens
cccgatattcggtcagtgggtgatagcaaaacctcgggtacgccaagaccgtgaagaatgacgaactcctcccgcttcggcaaattcattcgcatcaactttgatgtcaatggctacattgttggagccaacattgagacttatcttttggagaaatctcgtgctatccgccaagccaaggaagaacggaccttccacatcttctattatctcctgtctggggctggagagcacctgaagaccgatctcctgttggagccgtacaacaaataccgcttcctgtccaatggacacgtcaccatccccgggcagcaggacaaggacatgttccaggagaccatggaggccatgaggattatgggcatcccagaagaggagcaaatgggcctgctgcgggtcatctcaggggttcttcagctcggcaacatcgtcttcaagaaggagcggaacactgaccaggcgtccatgcccgacaacacagctgcccaaaaggtgtcccatctcttgggtatcaatgtgaccgatttcaccagaggaatcctcaccccgcgcatcaaggtgggacgggattacgtccagaaggcgcagactaaagagcaggctgactttgccatcgaggccttggccaaggcgacctatgagcggatgttccgctggctggtgctgcgcatcaacaaggctctggacaagaccaagaggcagggcgcctccttcatcgggatcctggacattgccggcttcgagatctttgatctgaactcgtttgagcagctgtgcatcaattacaccaatgagaagctgcagcagctcttcaaccacaccatgttcatcctggagcaggaggagtaccagcgcgagggcatcgagtggaacttcatcgactttggcctcgacctgcagccctgcatcgacctcattgagaagccagcaggccccccgggcattctggccctgctggacgaggagtgctggttccccaaagccaccgacaagagcttcgtggagaaggtgatgcaggagcagggcacccaccccaagttccagaagcccaagcagctgaaggacaaagctgatttctgcattatccactatgccggcaaggtggattacaaagctgacgagtggctgatgaagaacatggatcccctgaatgacaacatcgccacactgctccaccagtcctctgacaagtttgtctcggagctgtggaaggatgtggaccgcatcatcggcctggaccaggtggccggcatgtcggagaccgcactgcccggggccttcaagacgcggaagggcatgttccgcactgtggggcagctttacaaggagcagctggccaagctgatggctacgctgaggaacacgaaccccaactttgtccgctgcatcatccccaaccacgagaagaaggccggcaagctggacccgcatctcgtgctggaccagctgcgctgcaacggtgttctcgagggcatccgtatctgccgccagggcttccccaacagggtggtcttccaggagtttcggcagagatatgagatcctgactccaaactccattcccaagggtttcatggacgggaagcaggcgtgcgtgctcatgataaaagccctggagctcgacagcaatctgtaccgcattggccagagcaaagtcttcttccgtgccggtgtgctggcccacctggaggaggagcgagacctgaagatcaccgacgtcatcatagggttccaggcctgctgcaggggctacctggccaggaaagcatttgccaagcggcagcagcagcttaccgccatgaaggtcctccagcggaactgcgctgcctacctgaagctgcggaactggcagtggtggcggctcttcaccaaggtcaagccgctgctgcaggtgagccggcaggaggaggagatgatggccaaggaggaggagctggtgaaggtcagagagaagcagctggctgcggagaacaggctcacggagatggagacgctgcagtctcagctcatggcagagaaattgcagctgcaggagcagctccaggcagaaaccgagctgtgtgccgaggctgaggagctccgggcccgcctgaccgccaagaagcaggaattagaagagatctgccatgacctagaggccagggtggaggaggaggaggagcgctgccagcacctgcaggcggagaagaagaagatgcagcagaacatccaggagcttgaggagcagctggaggaggaggagagcgcccggcagaagctgcagctggagaaggtgaccaccgaggcgaagctgaaaaagctggaggaggagcagatcatcctggaggaccagaactgcaagctggccaaggaaaagaaactgctggaagacagaatagctgagttcaccaccaacctcacagaagaggaggagaaatctaagagcctcgccaagctcaagaacaagcatgaggcaatgatcactgacttggaagagcgcctccgcagggaggagaagcagcgacaggagctggagaagacccgccggaagctggagggagactccacagacctcagcgaccagatcgccgagctccaggcccagatcgcggagctcaagatgcagctggccaagaaagaggaggagctccaggccgccctggccagagtggaagaggaagctgcccagaagaacatggccctcaagaagatccgggagctggaatctcagatctctgaactccaggaagacctggagtctgagcgtgcttccaggaataaagctgagaagcagaaacgggaccttggggaagagctagaggcgctgaaaacagagttggaggacacgctggattccacagctgcccagcaggagctcaggtcaaaacgtgagcaggaggtgaacatcctgaagaagaccctggaggaggaggccaagacccacgaggcccagatccaggagatgaggcagaagcactcacaggccgtggaggagctggcggagcagctggagcagacgaagcgggtgaaagcaaacctcgagaaggcaaagcagactctggagaacgagcggggggagctggccaacgaggtgaaggtgctgctgcagggcaaaggggactcggagcacaagcgcaagaaagtggaggcgcagctgcaggagctgcaggtcaagttcaacgagggagagcgcgtgcgcacagagctggccgacaaggtcaccaagctgcaggtggagctggacaacgtgaccgggcttctcagccagtccgacagcaagtccagcaagctcaccaaggacttctccgcgctggagtcccagctgcaggacactcaggagctgctgcaggaggagaaccggcagaagctgagcctgagcaccaagctcaagcaggtggaggacgagaagaattccttccgggagcagctggaggaggaggaggaggccaagcacaacctggagaagcagatcgccaccctccatgcccaggtggccgacatgaaaaagaagatggaggacagtgtggggtgcctggaaactgctgaggaggtgaagaggaagctccagaaggacctggagggcctgagccagcggcacgaggagaaggtggccgcctacgacaagctggagaagaccaagacgcggctgcagcaggagctggacgacctgctggtggacctggaccaccagcgccagagcgcgtgcaacctggagaagaagcagaagaagtttgaccagctcctggcggaggagaagaccatctctgccaagtatgcagaggagcgcgaccgggctgaggcggaggcccgagagaaggagaccaaggctctgtcgctggcccgggccctggaggaagccatggagcagaaggcggagctggagcggctcaacaagcagttccgcacggagatggaggaccttatgagctccaaggatgatgtgggcaagagtgtccacgagctggagaagtccaagcgggccctagagcagcaggtggaggagatgaagacgcagctggaagagctggaggacgagctgcaggccaccgaagatgccaagctgcggttggaggtcaacctgcaggccatgaaggcccagttcgagcgggacctgcagggccgggacgagcagagcgaggagaagaagaagcagctggtcagacaggtgcgggagatggaggcagagctggaggacgagaggaagcagcgctcgatggcagtggccgcccggaagaagctggagatggacctgaaggacctggaggcgcacatcgactcggccaacaagaaccgggacgaagccatcaaacagctgcggaagctgcaggcccagatgaaggactgcatgcgcgagctggatgacacccgcgcctctcgtgaggagatcctggcccaggccaaagagaacgagaagaagctgaagagcatggaggccgagatgatccagttgcaggaggaactggcagccgcggagcgtgccaagcgccaggcccagcaggagcgggatgagctggctgacgagatcgccaacagcagcggcaaaggagccctggcgttagaggagaagcggcgtctggaggcccgcatcgcccagctggaggaggagctggaggaggagcagggcaacacggagctgatcaacgaccggctgaagaaggccaacctgcagatcgaccagatcaacaccgacctgaacctggagcgcagccacgcccagaagaacgagaatgctcggcagcagctggaacgccagaacaaggagcttaaggtcaagctgcaggagatggagggcactgtcaagtccaagtacaaggcctccatcaccgccctcgaggccaagattgcacagctggaggagcagctggacaacgagaccaaggagcgccaggcagcctgcaaacaggtgcgtcggaccgagaagaagctgaaggatgtgctgctgcaggtggatgacgagcggaggaacgccgagcagtacaaggaccaggccgacaaggcatctacccgcctgaagcagctcaagcggcagctggaggaggccgaagaggaggcccagcgggccaacgcctcccgccggaaactgcagcgcgagctggaggacgccactgagacggccgatgccatgaaccgcgaagtcagctccctaaagaacaagctcaggcgcggggacctgccgtttgtcgtgccccgccgaatggcccggaaaggcgccggggatggctccgacgaagaggtagatggcaaagcggatggggctgaggccaaacctgccgaataagcctcttctcctgcagcctgagatggaaaggccagcagccttccagtggcttctcccaacactcttggggaccaaatatatttaatggttaagggacttgtcccaagtctgacagccagagcgttagaggggccagcggccctcccaggcgatcttgtgtctactctaggactgggcccgagggtggtttacctgcaccgttgactcagtatagtttaaaaatctgccacctgcacaggtatttttgaaagcaaaataaggttttcttttttcccctttcttgtaataaatgataaaattccgagtctttctcactgcctttgtttagaagagagtagctcgtcctcactggtctacactggttgccgaatttacttgtattcctaactgttttgtatatgctgcattgagacttacggcaagaaggcattttttttttttaaaggaaacaaactctcaaatcatgaagtgatataaaagctgcatatgcctacaaagctctgaattcaggtcccagttgctgtcacaaaggagtgagtgaaactcccaccctacccccttttttatataataaaagtgccttagcatgtgttgcagctgtcaccactacagtaagctggtttacagatgttttccactgagcatcacaataaagagaaccatgtgcta

SEQ ID NO: 314105 - DNA, 5396 bp, Homo sapiens
cccgatattcggtcagtgggtgatagcaaaacctcgggtacgccaagaccgtgaagaatgacgaactcctcccgcttcggcaaattcattcgcatcaactttgatgtcaatggctacattgttggagccaacattgagacttatcttttggagaaatctcgtgctatccgccaagccaaggaagaacggaccttccacatcttctattatctcctgtctggggctggagagcacctgaagaccgatctcctgttggagccgtacaacaaataccgcttcctgtccaatggacacgtcaccatccccgggcagcaggacaaggacatgttccaggagaccatggaggccatgaggattatgggcatcccagaagaggagcaaatgggcctgctgcgggtcatctcaggggttcttcagctcggcaacatcgtcttcaagaaggagcggaacactgaccaggcgtccatgcccgacaacacagctgcccaaaaggtgtcccatctcttgggtatcaatgtgaccgatttcaccagaggaatcctcaccccgcgcatcaaggtgggacgggattacgtccagaaggcgcagactaaagagcaggctgactttgccatcgaggccttggccaaggcgacctatgagcggatgttccgctggctggtgctgcgcatcaacaaggctctggacaagaccaagaggcagggcgcctccttcatcgggatcctggacattgccggcttcgagatctttgatctgaactcgtttgagcagctgtgcatcaattacaccaatgagaagctgcagcagctcttcaaccacaccatgttcatcctggagcaggaggagtaccagcgcgagggcatcgagtggaacttcatcgactttggcctcgacctgcagccctgcatcgacctcattgagaagccagcaggccccccgggcattctggccctgctggacgaggagtgctggttccccaaagccaccgacaagagcttcgtggagaaggtgatgcaggagcagggcacccaccccaagttccagaagcccaagcagctgaaggacaaagctgatttctgcattatccactatgccggcaaggtggattacaaagctgacgagtggctgatgaagaacatggatcccctgaatgacaacatcgccacactgctccaccagtcctctgacaagtttgtctcggagctgtggaaggatgtggaccgcatcatcggcctggaccaggtggccggcatgtcggagaccgcactgcccggggccttcaagacgcggaagggcatgttccgcactgtggggcagctttacaaggagcagctggccaagctgatggctacgctgaggaacacgaaccccaactttgtccgctgcatcatccccaaccacgagaagaaggccggcaagctggacccgcatctcgtgctggaccagctgcgctgcaacggtgttctcgagggcatccgtatctgccgccagggcttccccaacagggtggtcttccaggagtttcggcagagatatgagatcctgactccaaactccattcccaagggtttcatggacgggaagcaggcgtgcgtgctcatgataaaagccctggagctcgacagcaatctgtaccgcattggccagagcaaagtcttcttccgtgccggtgtgctggcccacctggaggaggagcgagacctgaagatcaccgacgtcatcatagggttccaggcctgctgcaggggctacctggccaggaaagcatttgccaagcggcagcagcagcttaccgccatgaaggtcctccagcggaactgcgctgcctacctgaagctgcggaactggcagtggtggcggctcttcaccaaggtcaagccgctgctgcaggtgagccggcaggaggaggagatgatggccaaggaggaggagctggtgaaggtcagagagaagcagctggctgcggagaacaggctcacggagatggagacgctgcagtctcagctcatggcagagaaattgcagctgcaggagcagctccaggcagaaaccgagctgtgtgccgaggctgaggagctccgggcccgcctgaccgccaagaagcaggaattagaagagatctgccatgacctagaggccagggtggaggaggaggaggagcgctgccagcacctgcaggcggagaagaagaagatgcagcagaacatccaggagcttgaggagcagctggaggaggaggagagcgcccggcagaagctgcagctggagaaggtgaccaccgaggcgaagctgaaaaagctggaggaggagcagatcatcctggaggaccagaactgcaagctggccaaggaaaagaaactgctggaagacagaatagctgagttcaccaccaacctcacagaagaggaggagaaatctaagagcctcgccaagctcaagaacaagcatgaggcaatgatcactgacttggaagagcgcctccgcagggaggagaagcagcgacaggagctggagaagacccgccggaagctggagggagactccacagacctcagcgaccagatcgccgagctccaggcccagatcgcggagctcaagatgcagctggccaagaaagaggaggagctccaggccgccctggccagagtggaagaggaagctgcccagaagaacatggccctcaagaagatccgggagctggaatctcagatctctgaactccaggaagacctggagtctgagcgtgcttccaggaataaagctgagaagcagaaacgggaccttggggaagagctagaggcgctgaaaacagagttggaggacacgctggattccacagctgcccagcaggagctcaggtcaaaacgtgagcaggaggtgaacatcctgaagaagaccctggaggaggaggccaagacccacgaggcccagatccaggagatgaggcagaagcactcacaggccgtggaggagctggcggagcagctggagcagacgaagcgggtgaaagcaaacctcgagaaggcaaagcagactctggagaacgagcggggggagctggccaacgaggtgaaggtgctgctgcagggcaaaggggactcggagcacaagcgcaagaaagtggaggcgcagctgcaggagctgcaggtcaagttcaacgagggagagcgcgtgcgcacagagctggccgacaaggtcaccaagctgcaggtggagctggacaacgtgaccgggcttctcagccagtccgacagcaagtccagcaagctcaccaaggacttctccgcgctggagtcccagctgcaggacactcaggagctgctgcaggaggagaaccggcagaagctgagcctgagcaccaagctcaagcaggtggaggacgagaagaattccttccgggagcagctggaggaggaggaggaggccaagcacaacctggagaagcagatcgccaccctccatgcccaggtggccgacatgaaaaagaagatggaggacagtgtggggtgcctggaaactgctgaggaggtgaagaggaagctccagaaggacctggagggcctgagccagcggcacgaggagaaggtggccgcctacgacaagctggagaagaccaagacgcggctgcagcaggagctggacgacctgctggtggacctggaccaccagcgccagagcgcgtgcaacctggagaagaagcagaagaagtttgaccagctcctggcggaggagaagaccatctctgccaagtatgcagaggagcgcgaccgggctgaggcggaggcccgagagaaggagaccaaggctctgtcgctggcccgggccctggaggaagccatggagcagaaggcggagctggagcggctcaacaagcagttccgcacggagatggaggaccttatgagctccaaggatgatgtgggcaagagtgtccacgagctggagaagtccaagcgggccctagagcagcaggtggaggagatgaagacgcagctggaagagctggaggacgagctgcaggccaccgaagatgccaagctgcggttggaggtcaacctgcaggccatgaaggcccagttcgagcgggacctgcagggccgggacgagcagagcgaggagaagaagaagcagctggtcagacaggtgcgggagatggaggcagagctggaggacgagaggaagcagcgctcgatggcagtggccgcccggaagaagctggagatggacctgaaggacctggaggcgcacatcgactcggccaacaagaaccgggacgaagccatcaaacagctgcggaagctgcaggcccagatgaaggactgcatgcgcgagctggatgacacccgcgcctctcgtgaggagatcctggcccaggccaaagagaacgagaagaagctgaagagcatggaggccgagatgatccagttgcaggaggaactggcagccgcggagcgtgccaagcgccaggcccagcaggagcgggatgagctggctgacgagatcgccaacagcagcggcaaaggagccctggcgttagaggagaagcggcgtctggaggcccgcatcgcccagctggaggaggagctggaggaggagcagggcaacacggagctgatcaacgaccggctgaagaaggccaacctgcagatcgaccagatcaacaccgacctgaacctggagcgcagccacgcccagaagaacgagaatgctcggcagcagctggaacgccagaacaaggagcttaaggtcaagctgcaggagatggagggcactgtcaagtccaagtacaaggcctccatcaccgccctcgaggccaagattgcacagctggaggagcagctggacaacgagaccaagggccagcggccctcccaggcgatcttgtgtctactctaggactgggcccgagggtggtttacctgcaccgttgactcagtatagtttaaaaatctgccacctgcacaggtatttttgaaagcaaaataaggttttcttttttcccctttcttgtaataaatgataaaattccgagtctttctcactgcctttgtttagaagagagtagctcgtcctcactggtctacactggttgccgaatttacttgtattcctaactgttttgtatatgctgcattgagacttacggcaagaaggcattttttttttttaaaggaaacaaactctcaaatcatgaagtgatataaaagctgcatatgcctacaaagctctgaattcaggtcccagttgctgtcacaaaggagtgagtgaaactcccaccctacccccttttttatataataaaagtgccttagcatgtgttgcagctgtcaccactacagtaagctggtttacagatgttttccactgagcatcacaataaagagaaccatgtgcta

SEQ ID NO: 314106 - DNA, 4942 bp, Homo sapiens
cccgatattcggtcagtgggtgatagcaaaacctcgggtacgccaagaccgtgaagaatgacgaactcctcccgcttcggcaaattcattcgcatcaactttgatgtcaatggctacattgttggagccaacattgagacttatcttttggagaaatctcgtgctatccgccaagccaaggaagaacggaccttccacatcttctattatctcctgtctggggctggagagcacctgaagaccgatctcctgttggagccgtacaacaaataccgcttcctgtccaatggacacgtcaccatccccgggcagcaggacaaggacatgttccaggagaccatggaggccatgaggattatgggcatcccagaagaggagcaaatgggcctgctgcgggtcatctcaggggttcttcagctcggcaacatcgtcttcaagaaggagcggaacactgaccaggcgtccatgcccgacaacacagctgcccaaaaggtgtcccatctcttgggtatcaatgtgaccgatttcaccagaggaatcctcaccccgcgcatcaaggtgggacgggattacgtccagaaggcgcagactaaagagcaggctgactttgccatcgaggccttggccaaggcgacctatgagcggatgttccgctggctggtgctgcgcatcaacaaggctctggacaagaccaagaggcagggcgcctccttcatcgggatcctggacattgccggcttcgagatctttgatctgaactcgtttgagcagctgtgcatcaattacaccaatgagaagctgcagcagctcttcaaccacaccatgttcatcctggagcaggaggagtaccagcgcgagggcatcgagtggaacttcatcgactttggcctcgacctgcagccctgcatcgacctcattgagaagccagcaggccccccgggcattctggccctgctggacgaggagtgctggttccccaaagccaccgacaagagcttcgtggagaaggtgatgcaggagcagggcacccaccccaagttccagaagcccaagcagctgaaggacaaagctgatttctgcattatccactatgccggcaaggtggattacaaagctgacgagtggctgatgaagaacatggatcccctgaatgacaacatcgccacactgctccaccagtcctctgacaagtttgtctcggagctgtggaaggatgtggaccgcatcatcggcctggaccaggtggccggcatgtcggagaccgcactgcccggggccttcaagacgcggaagggcatgttccgcactgtggggcagctttacaaggagcagctggccaagctgatggctacgctgaggaacacgaaccccaactttgtccgctgcatcatccccaaccacgagaagaaggccggcaagctggacccgcatctcgtgctggaccagctgcgctgcaacggtgttctcgagggcatccgtatctgccgccagggcttccccaacagggtggtcttccaggagtttcggcagagatatgagatcctgactccaaactccattcccaagggtttcatggacgggaagcaggcgtgcgtgctcatgataaaagccctggagctcgacagcaatctgtaccgcattggccagagcaaagtcttcttccgtgccggtgtgctggcccacctggaggaggagcgagacctgaagatcaccgacgtcatcatagggttccaggcctgctgcaggggctacctggccaggaaagcatttgccaagcggcagcagcagcttaccgccatgaaggtcctccagcggaactgcgctgcctacctgaagctgcggaactggcagtggtggcggctcttcaccaaggtcaagccgctgctgcaggtgagccggcaggaggaggagatgatggccaaggaggaggagctggtgaaggtcagagagaagcagctggctgcggagaacaggctcacggagatggagacgctgcagtctcagctcatggcagagaaattgcagctgcaggagcagctccaggcagaaaccgagctgtgtgccgaggctgaggagctccgggcccgcctgaccgccaagaagcaggaattagaagagatctgccatgacctagaggccagggtggaggaggaggaggagcgctgccagcacctgcaggcggagaagaagaagatgcagcagaacatccaggagcttgaggagcagctggaggaggaggagagcgcccggcagaagctgcagctggagaaggtgaccaccgaggcgaagctgaaaaagctggaggaggagcagatcatcctggaggaccagaactgcaagctggccaaggaaaagaaactgctggaagacagaatagctgagttcaccaccaacctcacagaagaggaggagaaatctaagagcctcgccaagctcaagaacaagcatgaggcaatgatcactgacttggaagagcgcctccgcagggaggagaagcagcgacaggagctggagaagacccgccggaagctggagggagactccacagacctcagcgaccagatcgccgagctccaggcccagatcgcggagctcaagatgcagctggccaagaaagaggaggagctccaggccgccctggccagagtggaagaggaagctgcccagaagaacatggccctcaagaagatccgggagctggaatctcagatctctgaactccaggaagacctggagtctgagcgtgcttccaggaataaagctgagaagcagaaacgggaccttggggaagagctagaggcgctgaaaacagagttggaggacacgctggattccacagctgcccagcaggagctcaggtcaaaacgtgagcaggaggtgaacatcctgaagaagaccctggaggaggaggccaagacccacgaggcccagatccaggagatgaggcagaagcactcacaggccgtggaggagctggcggagcagctggagcagacgaagcgggtgaaagcaaacctcgagaaggcaaagcagactctggagaacgagcggggggagctggccaacgaggtgaaggtgctgctgcagggcaaaggggactcggagcacaagcgcaagaaagtggaggcgcagctgcaggagctgcaggtcaagttcaacgagggagagcgcgtgcgcacagagctggccgacaaggtcaccaagctgcaggtggagctggacaacgtgaccgggcttctcagccagtccgacagcaagtccagcaagctcaccaaggacttctccgcgctggagtcccagctgcaggacactcaggagctgctgcaggaggagaaccggcagaagctgagcctgagcaccaagctcaagcaggtggaggacgagaagaattccttccgggagcagctggaggaggaggaggaggccaagcacaacctggagaagcagatcgccaccctccatgcccaggtggccgacatgaaaaagaagatggaggacagtgtggggtgcctggaaactgctgaggaggtgaagaggaagctccagaaggacctggagggcctgagccagcggcacgaggagaaggtggccgcctacgacaagctggagaagaccaagacgcggctgcagcaggagctggacgacctgctggtggacctggaccaccagcgccagagcgcgtgcaacctggagaagaagcagaagaagtttgaccagctcctggcggaggagaagaccatctctgccaagtatgcagaggagcgcgaccgggctgaggcggaggcccgagagaaggagaccaaggctctgtcgctggcccgggccctggaggaagccatggagcagaaggcggagctggagcggctcaacaagcagttccgcacggagatggaggaccttatgagctccaaggatgatgtgggcaagagtgtccacgagctggagaagtccaagcgggccctagagcagcaggtggaggagatgaagacgcagctggaagagctggaggacgagctgcaggccaccgaagatgccaagctgcggttggaggtcaacctgcaggccatgaaggcccagttcgagcgggacctgcagggccgggacgagcagagcgaggagaagaagaagcagctggtcagacaggtgcgggagatggaggcagagctggaggacgagaggcagcgccactgtccgctgtctccctcctgattctaaaatgtctcaagtgcaatgccccctcccctcctttaccgaggacagcctgcctctgccacagcaaggctgtcggggtcaagctggaaaggccagcagccttccagtggcttctcccaacactcttggggaccaaatatatttaatggttaagggacttgtcccaagtctgacagccagagcgttagaggggccagcggccctcccaggcgatcttgtgtctactctaggactgggcccgagggtggtttacctgcaccgttgactcagtatagtttaaaaatctgccacctgcacaggtatttttgaaagcaaaataaggttttcttttttcccctttcttgtaataaatgataaaattccgagtctttctcactgcctttgtttagaagagagtagctcgtcctcactggtctacactggttgccgaatttacttgtattcctaactgttttgtatatgctgcattgagacttacggcaagaaggcattttttttttttaaaggaaacaaactctcaaatcatgaagtgatataaaagctgcatatgcctacaaagctctgaattcaggtcccagttgctgtcacaaaggagtgagtgaaactcccaccctacccccttttttatataataaaagtgccttagcatgtgttgcagctgtcaccactacagtaagctggtttacagatgttttccactgagcatcacaataaagagaaccatgtgcta

SEQ ID NO: 314107 - DNA, 1747 bp, Homo sapiens
gactagttctaggactagttctagatcgcgagctaagaactagtaacgccgagcagtacaaggaccaggccgacaaggcatctacccgcctgaagcagctcaagcggcagctggaggaggccgaagaggaggcccagcgggccaacgcctcccgccggaaactgcagcgcgagctggaggacgccactgagacggccgatgccatgaaccgcgaagtcagctccctaaagaacaagctcaggcgcggggacctgccgtttgtcgtgccccgccgaatggcccggaaaggcgccggggatggctccgacgaagaggtagatggcaaagcggatggggctgaggccaaacctgccgaataagcctcttctcctgcagcctgagatggatggacagacagacaccacagcctccccttcccagaccccgcagcacgcctctccccaccttcttgggactgctgtgaacatgcctcctcctgccctccgccccgtccccccatcccgtttccctccaggtgttgttgagggcatttggcttcctctgctgcatccccttccagctccctcccctgctcagaatctgataccaaagagacagggcccgggcccaggcagagagcgaccagcaggctcctcagccctctcttgccaaaaagcacaagatgttgaggcgagcagggcaggcccccggggaggggccagagttttctatgaatctatttttcttcagactgaggccttttggtagtcggagcccccgcagtcgtcagcctccctgacgtctgccaccagcgcccccactcctcctcctttctttgctgtttgcaatcacacgtggtgacctcacacacctctgccccttgggcctcccactcccatggctctgggcggtccagaaggagcaggccctgggcctccacctctgtgcagggcacagaaggctggggtggggggaggagtggattcctccccaccctgtcccaggcagcgccactgtccgctgtctccctcctgattctaaaatgtctcaagtgcaatgccccctcccctcctttaccgaggacagcctgcctctgccacagcaaggctgtcggggtcaagctggaaaggccagcagccttccagtggcttctcccaacactcttggggaccaaatatatttaatggttaagggacttgtcccaagtctgacagccagagcgttagaggggccagcggccctcccaggcgatcttgtgtctactctaggactgggcccgagggtggtttacctgcaccgttgactcagtatagtttaaaaatctgccacctgcacaggtatttttgaaagcaaaataaggttttcttttttcccctttcttgtaataaatgataaaattccgagtctttctcactgcctttgtttagaagagagtagctcgtcctcactggtctacactggttgccgaatttacttgtattcctaactgttttgtatatgctgcattgagacttacggcaagaaggcattttttttttttaaaggaaacaaactctcaaatcatgaagtgatataaaagctgcatatgcctacaaagctctgaattcaggtcccagttgctgtcacaaaggagtgagtgaaactcccaccctacccccttttttatataataaaagtgccttagcatgtgttgcagctgtcaccactacagtaagctggtttacagatgttttccactgagcatcacaataaagagaaccatgtgcta

SEQ ID NO: 314108 - DNA, 5333 bp, Homo sapiens
cccgatattcggtcagtgggtgatagcaaaacctcgggtacgccaagaccgtgaagaatgacgaactcctcccgcttcggcaaattcattcgcatcaactttgatgtcaatggctacattgttggagccaacattgagacttatcttttggagaaatctcgtgctatccgccaagccaaggaagaacggaccttccacatcttctattatctcctgtctggggctggagagcacctgaagaccgatctcctgttggagccgtacaacaaataccgcttcctgtccaatggacacgtcaccatccccgggcagcaggacaaggacatgttccaggagaccatggaggccatgaggattatgggcatcccagaagaggagcaaatgggcctgctgcgggtcatctcaggggttcttcagctcggcaacatcgtcttcaagaaggagcggaacactgaccaggcgtccatgcccgacaacacagctgcccaaaaggtgtcccatctcttgggtatcaatgtgaccgatttcaccagaggaatcctcaccccgcgcatcaaggtgggacgggattacgtccagaaggcgcagactaaagagcaggctgactttgccatcgaggccttggccaaggcgacctatgagcggatgttccgctggctggtgctgcgcatcaacaaggctctggacaagaccaagaggcagggcgcctccttcatcgggatcctggacattgccggcttcgagatctttgatctgaactcgtttgagcagctgtgcatcaattacaccaatgagaagctgcagcagctcttcaaccacaccatgttcatcctggagcaggaggagtaccagcgcgagggcatcgagtggaacttcatcgactttggcctcgacctgcagccctgcatcgacctcattgagaagccagcaggccccccgggcattctggccctgctggacgaggagtgctggttccccaaagccaccgacaagagcttcgtggagaaggtgatgcaggagcagggcacccaccccaagttccagaagcccaagcagctgaaggacaaagctgatttctgcattatccactatgccggcaaggtggattacaaagctgacgagtggctgatgaagaacatggatcccctgaatgacaacatcgccacactgctccaccagtcctctgacaagtttgtctcggagctgtggaaggatgtggaccgcatcatcggcctggaccaggtggccggcatgtcggagaccgcactgcccggggccttcaagacgcggaagggcatgttccgcactgtggggcagctttacaaggagcagctggccaagctgatggctacgctgaggaacacgaaccccaactttgtccgctgcatcatccccaaccacgagaagaaggccggcaagctggacccgcatctcgtgctggaccagctgcgctgcaacggtgttctcgagggcatccgtatctgccgccagggcttccccaacagggtggtcttccaggagtttcggcagagatatgagatcctgactccaaactccattcccaagggtttcatggacgggaagcaggcgtgcgtgctcatgataaaagccctggagctcgacagcaatctgtaccgcattggccagagcaaagtcttcttccgtgccggtgtgctggcccacctggaggaggagcgagacctgaagatcaccgacgtcatcatagggttccaggcctgctgcaggggctacctggccaggaaagcatttgccaagcggcagcagcagcttaccgccatgaaggtcctccagcggaactgcgctgcctacctgaagctgcggaactggcagtggtggcggctcttcaccaaggtcaagccgctgctgcaggtgagccggcaggaggaggagatgatggccaaggaggaggagctggtgaaggtcagagagaagcagctggctgcggagaacaggctcacggagatggagacgctgcagtctcagctcatggcagagaaattgcagctgcaggagcagctccaggcagaaaccgagctgtgtgccgaggctgaggagctccgggcccgcctgaccgccaagaagcaggaattagaagagatctgccatgacctagaggccagggtggaggaggaggaggagcgctgccagcacctgcaggcggagaagaagaagatgcagcagaacatccaggagcttgaggagcagctggaggaggaggagagcgcccggcagaagctgcagctggagaaggtgaccaccgaggcgaagctgaaaaagctggaggaggagcagatcatcctggaggaccagaactgcaagctggccaaggaaaagaaactgctggaagacagaatagctgagttcaccaccaacctcacagaagaggaggagaaatctaagagcctcgccaagctcaagaacaagcatgaggcaatgatcactgacttggaagagcgcctccgcagggaggagaagcagcgacaggagctggagaagacccgccggaagctggagggagactccacagacctcagcgaccagatcgccgagctccaggcccagatcgcggagctcaagatgcagctggccaagaaagaggaggagctccaggccgccctggccagagtggaagaggaagctgcccagaagaacatggccctcaagaagatccgggagctggaatctcagatctctgaactccaggaagacctggagtctgagcgtgcttccaggaataaagctgagaagcagaaacgggaccttggggaagagctagaggcgctgaaaacagagttggaggacacgctggattccacagctgcccagcaggagctcaggtcaaaacgtgagcaggaggtgaacatcctgaagaagaccctggaggaggaggccaagacccacgaggcccagatccaggagatgaggcagaagcactcacaggccgtggaggagctggcggagcagctggagcagacgaagcgggtgaaagcaaacctcgagaaggcaaagcagactctggagaacgagcggggggagctggccaacgaggtgaaggtgctgctgcagggcaaaggggactcggagcacaagcgcaagaaagtggaggcgcagctgcaggagctgcaggtcaagttcaacgagggagagcgcgtgcgcacagagctggccgacaaggtcaccaagctgcaggtggagctggacaacgtgaccgggcttctcagccagtccgacagcaagtccagcaagctcaccaaggacttctccgcgctggagtcccagctgcaggacactcaggagctgctgcaggaggagaaccggcagaagctgagcctgagcaccaagctcaagcaggtggaggacgagaagaattccttccgggagcagctggaggaggaggaggaggccaagcacaacctggagaagcagatcgccaccctccatgcccaggtggccgacatgaaaaagaagatggaggacagtgtggggtgcctggaaactgctgaggaggtgaagaggaagctccagaaggacctggagggcctgagccagcggcacgaggagaaggtggccgcctacgacaagctggagaagaccaagacgcggctgcagcaggagctggacgacctgctggtggacctggaccaccagcgccagagcgcgtgcaacctggagaagaagcagaagaagtttgaccagctcctggcggaggagaagaccatctctgccaagtatgcagaggagcgcgaccgggctgaggcggaggcccgagagaaggagaccaaggctctgtcgctggcccgggccctggaggaagccatggagcagaaggcggagctggagcggctcaacaagcagttccgcacggagatggaggaccttatgagctccaaggatgatgtgggcaagagtgtccacgagctggagaagtccaagcgggccctagagcagcaggtggaggagatgaagacgcagctggaagagctggaggacgagctgcaggccaccgaagatgccaagctgcggttggaggtcaacctgcaggccatgaaggcccagttcgagcgggacctgcagggccgggacgagcagagcgaggagaagaagaagcagctggtcagacaggtgcgggagatggaggcagagctggaggacgagaggaagcagcgctcgatggcagtggccgcccggaagaagctggagatggacctgaaggacctggaggcgcacatcgactcggccaacaagaaccgggacgaagccatcaaacagctgcggaagctgcaggcccagatgaaggactgcatgcgcgagctggatgacacccgcgcctctcgtgaggagatcctggcccaggccaaagagaacgagaagaagctgaagagcatggaggccgagatgatccagttgcaggaggaactggcagccgcggagcgtgccaagcgccaggcccagcaggagcgggatgagctggctgacgagatcgccaacagcagcggcaaaggagccctggcgttagaggagaagcggcgtctggaggcccgcatcgcccagctggaggaggagctggaggaggagcagggcaacacggagctgatcaacgaccggctgaagaaggccaacctgcagatcgaccagatcaacaccgacctgaacctggagcgcagccacgcccagaagaacgagaatgctcggcagcagctggaacgccagaacaaggagcttaaggtcaagctgcaggagatggagggcactgtcaagtccaagtacaaggcctccatcaccgccctcgaggccaagattgcacagctggaggagcagctggacaacgagaccaaggagcgccaggcagcctgcaaacaggtgcgtcggaccgagaagaagctgaaggatgtgctgctgcaggtggatgacgagcggaggaacgccgagcagtacaaggaccaggccgacaaggcatctacccgcctgaagcagctcaagcggcagctggaggaggccgaagaggaggcccagcgggccaacgcctcccgccggaaactgcagcgcgagctggaggacgccactgagacggccgatgccatgaaccgcgaagtcagctccctaaagaacaagctcagtccacagaaattgggcctcagccaaccccacgctcaacagtgccagccctgcccagagcccaagggatcgcctcgctgacagaccccagaccccggccacgccaccccctccttctaggtacctgtgcccccagtctcaagcatcactcccgttctccctcacatgcctccctgatgcctctggaggatcctcta

SEQ ID NO: 314109 - DNA, 4858 bp, Homo sapiens
cccgatattcggtcagtgggtgatagcaaaacctcgggtacgccaagaccgtgaagaatgacgaactcctcccgcttcggcaaattcattcgcatcaactttgatgtcaatggctacattgttggagccaacattgagacttatcttttggagaaatctcgtgctatccgccaagccaaggaagaacggaccttccacatcttctattatctcctgtctggggctggagagcacctgaagaccgatctcctgttggagccgtacaacaaataccgcttcctgtccaatggacacgtcaccatccccgggcagcaggacaaggacatgttccaggagaccatggaggccatgaggattatgggcatcccagaagaggagcaaatgggcctgctgcgggtcatctcaggggttcttcagctcggcaacatcgtcttcaagaaggagcggaacactgaccaggcgtccatgcccgacaacacagctgcccaaaaggtgtcccatctcttgggtatcaatgtgaccgatttcaccagaggaatcctcaccccgcgcatcaaggtgggacgggattacgtccagaaggcgcagactaaagagcaggctgactttgccatcgaggccttggccaaggcgacctatgagcggatgttccgctggctggtgctgcgcatcaacaaggctctggacaagaccaagaggcagggcgcctccttcatcgggatcctggacattgccggcttcgagatctttgatctgaactcgtttgagcagctgtgcatcaattacaccaatgagaagctgcagcagctcttcaaccacaccatgttcatcctggagcaggaggagtaccagcgcgagggcatcgagtggaacttcatcgactttggcctcgacctgcagccctgcatcgacctcattgagaagccagcaggccccccgggcattctggccctgctggacgaggagtgctggttccccaaagccaccgacaagagcttcgtggagaaggtgatgcaggagcagggcacccaccccaagttccagaagcccaagcagctgaaggacaaagctgatttctgcattatccactatgccggcaaggtggattacaaagctgacgagtggctgatgaagaacatggatcccctgaatgacaacatcgccacactgctccaccagtcctctgacaagtttgtctcggagctgtggaaggatgtggaccgcatcatcggcctggaccaggtggccggcatgtcggagaccgcactgcccggggccttcaagacgcggaagggcatgttccgcactgtggggcagctttacaaggagcagctggccaagctgatggctacgctgaggaacacgaaccccaactttgtccgctgcatcatccccaaccacgagaagaaggccggcaagctggacccgcatctcgtgctggaccagctgcgctgcaacggtgttctcgagggcatccgtatctgccgccagggcttccccaacagggtggtcttccaggagtttcggcagagatatgagatcctgactccaaactccattcccaagggtttcatggacgggaagcaggcgtgcgtgctcatgataaaagccctggagctcgacagcaatctgtaccgcattggccagagcaaagtcttcttccgtgccggtgtgctggcccacctggaggaggagcgagacctgaagatcaccgacgtcatcatagggttccaggcctgctgcaggggctacctggccaggaaagcatttgccaagcggcagcagcagcttaccgccatgaaggtcctccagcggaactgcgctgcctacctgaagctgcggaactggcagtggtggcggctcttcaccaaggtcaagccgctgctgcaggtgagccggcaggaggaggagatgatggccaaggaggaggagctggtgaaggtcagagagaagcagctggctgcggagaacaggctcacggagatggagacgctgcagtctcagctcatggcagagaaattgcagctgcaggagcagctccaggcagaaaccgagctgtgtgccgaggctgaggagctccgggcccgcctgaccgccaagaagcaggaattagaagagatctgccatgacctagaggccagggtggaggaggaggaggagcgctgccagcacctgcaggcggagaagaagaagatgcagcagaacatccaggagcttgaggagcagctggaggaggaggagagcgcccggcagaagctgcagctggagaaggtgaccaccgaggcgaagctgaaaaagctggaggaggagcagatcatcctggaggaccagaactgcaagctggccaaggaaaagaaactgctggaagacagaatagctgagttcaccaccaacctcacagaagaggaggagaaatctaagagcctcgccaagctcaagaacaagcatgaggcaatgatcactgacttggaagagcgcctccgcagggaggagaagcagcgacaggagctggagaagacccgccggaagctggagggagactccacagacctcagcgaccagatcgccgagctccaggcccagatcgcggagctcaagatgcagctggccaagaaagaggaggagctccaggccgccctggccagagtggaagaggaagctgcccagaagaacatggccctcaagaagatccgggagctggaatctcagatctctgaactccaggaagacctggagtctgagcgtgcttccaggaataaagctgagaagcagaaacgggaccttggggaagagctagaggcgctgaaaacagagttggaggacacgctggattccacagctgcccagcaggagctcaggtcaaaacgtgagcaggaggtgaacatcctgaagaagaccctggaggaggaggccaagacccacgaggcccagatccaggagatgaggcagaagcactcacaggccgtggaggagctggcggagcagctggagcagacgaagcgggtgaaagcaaacctcgagaaggcaaagcagactctggagaacgagcggggggagctggccaacgaggtgaaggtgctgctgcagggcaaaggggactcggagcacaagcgcaagaaagtggaggcgcagctgcaggagctgcaggtcaagttcaacgagggagagcgcgtgcgcacagagctggccgacaaggtcaccaagctgcaggtggagctggacaacgtgaccgggcttctcagccagtccgacagcaagtccagcaagctcaccaaggacttctccgcgctggagtcccagctgcaggacactcaggagctgctgcaggaggagaaccggcagaagctgagcctgagcaccaagctcaagcaggtggaggacgagaagaattccttccgggagcagctggaggaggaggaggaggccaagcacaacctggagaagcagatcgccaccctccatgcccaggtggccgacatgaaaaagaagatggaggacagtgtggggtgcctggaaactgctgaggaggtgaagaggaagctccagaaggacctggagggcctgagccagcggcacgaggagaaggtggccgcctacgacaagctggagaagaccaagacgcggctgcagcaggagctggacgacctgctggtggacctggaccaccagcgccagagcgcgtgcaacctggagaagaagcagaagaagtttgaccagctcctggcggaggagaagaccatctctgccaagtatgcagaggagcgcgaccgggctgaggcggaggcccgagagaaggagaccaaggctctgtcgctggcccgggccctggaggaagccatggagcagaaggcggagctggagcggctcaacaagcagttccgcacggagatggaggaccttatgagctccaaggatgatgtgggcaagagtgtccacgagctggagaagtccaagcgggccctagagcagcaggtggaggagatgaagacgcagctggaagagctggaggacgagctgcaggccaccgaagatgccaagctgcggttggaggtcaacctgcaggccatgaaggcccagttcgagcgggacctgcagggccgggacgagcagagcgaggagaagaagaagcagctggtcagacaggtgcgggagatggaggcagagctggaggacgagaggaagcagcgctcgatggcagtggccgcccggaagaagctggagatggacctgaaggacctggaggcgcacatcgactcggccaacaagaaccgggacgaagccatcaaacagctgcggaagctgcaggcccagatgaaggactgcatgcgcgagctggatgacacccgcgcctctcgtgaggagatcctggcccaggccaaagagaacgagaagaagctgaagagcatggaggccgagatgatccagttgcaggaggaactggcagccgcggagcgtgccaagcgccaggcccagcaggagcgggatgagctggctgacgagatcgccaacagcagcggcaaaggagccctggcgttagaggagaagcggcgtctggaggcccgcatcgcccagctggaggaggagctggaggaggagcagggcaacacggagctgatcaacgaccggctgaagaaggccaacctgcagatcgaccagatcaacaccgacctgaacctggagcgcagccacgcccagaagaacgagaatgctcggcagcagctggaacgccagggagctctggtagcctggcctttcctggacagactgaagagctgagcagggcactgccagcctgtccctcattacccaaggcaagggcagacagcccccagaagcagcagcagcagaatctctcgtg

SEQ ID NO: 314110 - DNA, 4390 bp, Homo sapiens
cccgatattcggtcagtgggtgatagcaaaacctcgggtacgccaagaccgtgaagaatgacgaactcctcccgcttcggcaaattcattcgcatcaactttgatgtcaatggctacattgttggagccaacattgagacttatcttttggagaaatctcgtgctatccgccaagccaaggaagaacggaccttccacatcttctattatctcctgtctggggctggagagcacctgaagaccgatctcctgttggagccgtacaacaaataccgcttcctgtccaatggacacgtcaccatccccgggcagcaggacaaggacatgttccaggagaccatggaggccatgaggattatgggcatcccagaagaggagcaaatgggcctgctgcgggtcatctcaggggttcttcagctcggcaacatcgtcttcaagaaggagcggaacactgaccaggcgtccatgcccgacaacacagctgcccaaaaggtgtcccatctcttgggtatcaatgtgaccgatttcaccagaggaatcctcaccccgcgcatcaaggtgggacgggattacgtccagaaggcgcagactaaagagcaggctgactttgccatcgaggccttggccaaggcgacctatgagcggatgttccgctggctggtgctgcgcatcaacaaggctctggacaagaccaagaggcagggcgcctccttcatcgggatcctggacattgccggcttcgagatctttgatctgaactcgtttgagcagctgtgcatcaattacaccaatgagaagctgcagcagctcttcaaccacaccatgttcatcctggagcaggaggagtaccagcgcgagggcatcgagtggaacttcatcgactttggcctcgacctgcagccctgcatcgacctcattgagaagccagcaggccccccgggcattctggccctgctggacgaggagtgctggttccccaaagccaccgacaagagcttcgtggagaaggtgatgcaggagcagggcacccaccccaagttccagaagcccaagcagctgaaggacaaagctgatttctgcattatccactatgccggcaaggtggattacaaagctgacgagtggctgatgaagaacatggatcccctgaatgacaacatcgccacactgctccaccagtcctctgacaagtttgtctcggagctgtggaaggatgtggaccgcatcatcggcctggaccaggtggccggcatgtcggagaccgcactgcccggggccttcaagacgcggaagggcatgttccgcactgtggggcagctttacaaggagcagctggccaagctgatggctacgctgaggaacacgaaccccaactttgtccgctgcatcatccccaaccacgagaagaaggccggcaagctggacccgcatctcgtgctggaccagctgcgctgcaacggtgttctcgagggcatccgtatctgccgccagggcttccccaacagggtggtcttccaggagtttcggcagagatatgagatcctgactccaaactccattcccaagggtttcatggacgggaagcaggcgtgcgtgctcatgataaaagccctggagctcgacagcaatctgtaccgcattggccagagcaaagtcttcttccgtgccggtgtgctggcccacctggaggaggagcgagacctgaagatcaccgacgtcatcatagggttccaggcctgctgcaggggctacctggccaggaaagcatttgccaagcggcagcagcagcttaccgccatgaaggtcctccagcggaactgcgctgcctacctgaagctgcggaactggcagtggtggcggctcttcaccaaggtcaagccgctgctgcaggtgagccggcaggaggaggagatgatggccaaggaggaggagctggtgaaggtcagagagaagcagctggctgcggagaacaggctcacggagatggagacgctgcagtctcagctcatggcagagaaattgcagctgcaggagcagctccaggcagaaaccgagctgtgtgccgaggctgaggagctccgggcccgcctgaccgccaagaagcaggaattagaagagatctgccatgacctagaggccagggtggaggaggaggaggagcgctgccagcacctgcaggcggagaagaagaagatgcagcagaacatccaggagcttgaggagcagctggaggaggaggagagcgcccggcagaagctgcagctggagaaggtgaccaccgaggcgaagctgaaaaagctggaggaggagcagatcatcctggaggaccagaactgcaagctggccaaggaaaagaaactgctggaagacagaatagctgagttcaccaccaacctcacagaagaggaggagaaatctaagagcctcgccaagctcaagaacaagcatgaggcaatgatcactgacttggaagagcgcctccgcagggaggagaagcagcgacaggagctggagaagacccgccggaagctggagggagactccacagacctcagcgaccagatcgccgagctccaggcccagatcgcggagctcaagatgcagctggccaagaaagaggaggagctccaggccgccctggccagagtggaagaggaagctgcccagaagaacatggccctcaagaagatccgggagctggaatctcagatctctgaactccaggaagacctggagtctgagcgtgcttccaggaataaagctgagaagcagaaacgggaccttggggaagagctagaggcgctgaaaacagagttggaggacacgctggattccacagctgcccagcaggagctcaggtcaaaacgtgagcaggaggtgaacatcctgaagaagaccctggaggaggaggccaagacccacgaggcccagatccaggagatgaggcagaagcactcacaggccgtggaggagctggcggagcagctggagcagacgaagcgggtgaaagcaaacctcgagaaggcaaagcagactctggagaacgagcggggggagctggccaacgaggtgaaggtgctgctgcagggcaaaggggactcggagcacaagcgcaagaaagtggaggcgcagctgcaggagctgcaggtcaagttcaacgagggagagcgcgtgcgcacagagctggccgacaaggtcaccaagctgcaggtggagctggacaacgtgaccgggcttctcagccagtccgacagcaagtccagcaagctcaccaaggacttctccgcgctggagtcccagctgcaggacactcaggagctgctgcaggaggagaaccggcagaagctgagcctgagcaccaagctcaagcaggtggaggacgagaagaattccttccgggagcagctggaggaggaggaggaggccaagcacaacctggagaagcagatcgccaccctccatgcccaggtggccgacatgaaaaagaagatggaggacagtgtggggtgcctggaaactgctgaggaggtgaagaggaagctccagaaggacctggagggcctgagccagcggcacgaggagaaggtggccgcctacgacaagctggagaagaccaagacgcggctgcagcaggagctggacgacctgctggtggacctggaccaccagcgccagagcgcgtgcaacctggagaagaagcagaagaagtttgaccagctcctggcggaggagaagaccatctctgccaagtatgcagaggagcgcgaccgggctgaggcggaggcccgagagaaggagaccaaggctctgtcgctggcccgggccctggaggaagccatggagcagaaggcggagctggagcggctcaacaagcagttccgcacggagatggaggaccttatgagctccaaggatgatgtgggcaagagtgtccacgagctggagaagtccaagcgggccctagagcagcaggtggaggagatgaagacgcagctggaagagctggaggacgagctgcaggccaccgaagatgccaagctgcggttggaggtcaacctgcaggccatgaaggcccagttcgagcgggacctgcagggccgggacgagcagagcgaggagaagaagaagcagctggtcagacaggtgcgggagatggaggcagagctggaggacgagaggaagcagcgctcgatggcagtggccgcccggaagaagctggagatggacctgaaggacctggaggcgcacatcgactcggccaacaagaaccgggacgaagccatcaaacagctgcggaagctgcaggcaccagatgataggacgtgcatgcgcgagtctcgtgattgaaacctgctcttctggtgatagcgtgtttcctgtatgcttttcc

SEQ ID NO: 314111 - DNA, 4177 bp, Homo sapiens
cccgatattcggtcagtgggtgatagcaaaacctcgggtacgccaagaccgtgaagaatgacgaactcctcccgcttcggcaaattcattcgcatcaactttgatgtcaatggctacattgttggagccaacattgagacttatcttttggagaaatctcgtgctatccgccaagccaaggaagaacggaccttccacatcttctattatctcctgtctggggctggagagcacctgaagaccgatctcctgttggagccgtacaacaaataccgcttcctgtccaatggacacgtcaccatccccgggcagcaggacaaggacatgttccaggagaccatggaggccatgaggattatgggcatcccagaagaggagcaaatgggcctgctgcgggtcatctcaggggttcttcagctcggcaacatcgtcttcaagaaggagcggaacactgaccaggcgtccatgcccgacaacacagctgcccaaaaggtgtcccatctcttgggtatcaatgtgaccgatttcaccagaggaatcctcaccccgcgcatcaaggtgggacgggattacgtccagaaggcgcagactaaagagcaggctgactttgccatcgaggccttggccaaggcgacctatgagcggatgttccgctggctggtgctgcgcatcaacaaggctctggacaagaccaagaggcagggcgcctccttcatcgggatcctggacattgccggcttcgagatctttgatctgaactcgtttgagcagctgtgcatcaattacaccaatgagaagctgcagcagctcttcaaccacaccatgttcatcctggagcaggaggagtaccagcgcgagggcatcgagtggaacttcatcgactttggcctcgacctgcagccctgcatcgacctcattgagaagccagcaggccccccgggcattctggccctgctggacgaggagtgctggttccccaaagccaccgacaagagcttcgtggagaaggtgatgcaggagcagggcacccaccccaagttccagaagcccaagcagctgaaggacaaagctgatttctgcattatccactatgccggcaaggtggattacaaagctgacgagtggctgatgaagaacatggatcccctgaatgacaacatcgccacactgctccaccagtcctctgacaagtttgtctcggagctgtggaaggatgtggaccgcatcatcggcctggaccaggtggccggcatgtcggagaccgcactgcccggggccttcaagacgcggaagggcatgttccgcactgtggggcagctttacaaggagcagctggccaagctgatggctacgctgaggaacacgaaccccaactttgtccgctgcatcatccccaaccacgagaagaaggccggcaagctggacccgcatctcgtgctggaccagctgcgctgcaacggtgttctcgagggcatccgtatctgccgccagggcttccccaacagggtggtcttccaggagtttcggcagagatatgagatcctgactccaaactccattcccaagggtttcatggacgggaagcaggcgtgcgtgctcatgataaaagccctggagctcgacagcaatctgtaccgcattggccagagcaaagtcttcttccgtgccggtgtgctggcccacctggaggaggagcgagacctgaagatcaccgacgtcatcatagggttccaggcctgctgcaggggctacctggccaggaaagcatttgccaagcggcagcagcagcttaccgccatgaaggtcctccagcggaactgcgctgcctacctgaagctgcggaactggcagtggtggcggctcttcaccaaggtcaagccgctgctgcaggtgagccggcaggaggaggagatgatggccaaggaggaggagctggtgaaggtcagagagaagcagctggctgcggagaacaggctcacggagatggagacgctgcagtctcagctcatggcagagaaattgcagctgcaggagcagctccaggcagaaaccgagctgtgtgccgaggctgaggagctccgggcccgcctgaccgccaagaagcaggaattagaagagatctgccatgacctagaggccagggtggaggaggaggaggagcgctgccagcacctgcaggcggagaagaagaagatgcagcagaacatccaggagcttgaggagcagctggaggaggaggagagcgcccggcagaagctgcagctggagaaggtgaccaccgaggcgaagctgaaaaagctggaggaggagcagatcatcctggaggaccagaactgcaagctggccaaggaaaagaaactgctggaagacagaatagctgagttcaccaccaacctcacagaagaggaggagaaatctaagagcctcgccaagctcaagaacaagcatgaggcaatgatcactgacttggaagagcgcctccgcagggaggagaagcagcgacaggagctggagaagacccgccggaagctggagggagactccacagacctcagcgaccagatcgccgagctccaggcccagatcgcggagctcaagatgcagctggccaagaaagaggaggagctccaggccgccctggccagagtggaagaggaagctgcccagaagaacatggccctcaagaagatccgggagctggaatctcagatctctgaactccaggaagacctggagtctgagcgtgcttccaggaataaagctgagaagcagaaacgggaccttggggaagagctagaggcgctgaaaacagagttggaggacacgctggattccacagctgcccagcaggagctcaggtcaaaacgtgagcaggaggtgaacatcctgaagaagaccctggaggaggaggccaagacccacgaggcccagatccaggagatgaggcagaagcactcacaggccgtggaggagctggcggagcagctggagcagacgaagcgggtgaaagcaaacctcgagaaggcaaagcagactctggagaacgagcggggggagctggccaacgaggtgaaggtgctgctgcagggcaaaggggactcggagcacaagcgcaagaaagtggaggcgcagctgcaggagctgcaggtcaagttcaacgagggagagcgcgtgcgcacagagctggccgacaaggtcaccaagctgcaggtggagctggacaacgtgaccgggcttctcagccagtccgacagcaagtccagcaagctcaccaaggacttctccgcgctggagtcccagctgcaggacactcaggagctgctgcaggaggagaaccggcagaagctgagcctgagcaccaagctcaagcaggtggaggacgagaagaattccttccgggagcagctggaggaggaggaggaggccaagcacaacctggagaagcagatcgccaccctccatgcccaggtggccgacatgaaaaagaagatggaggacagtgtggggtgcctggaaactgctgaggaggtgaagaggaagctccagaaggacctggagggcctgagccagcggcacgaggagaaggtggccgcctacgacaagctggagaagaccaagacgcggctgcagcaggagctggacgacctgctggtggacctggaccaccagcgccagagcgcgtgcaacctggagaagaagcagaagaagtttgaccagctcctggcggaggagaagaccatctctgccaagtatgcagaggagcgcgaccgggctgaggcggaggcccgagagaaggagaccaaggctctgtcgctggcccgggccctggaggaagccatggagcagaaggcggagctggagcggctcaacaagcagttccgcacggagatggaggaccttatgagctccaaggatgatgtgggcaagagtgtccacgagctggagaagtccaagcgggccctagagcagcaggtggaggagatgaagacgcagctggaagagctggaggacgagctgcaggccaccgaagatgccaagctgcggttggaggtcaacctgcaggccatgaaggcccagttcgagcgggacctgcagggccgggatgcatgctgacagcaatgggtactactaaacctgccttacgtggtcctaccaagcctacggtcaactacaagct

SEQ ID NO: 314112 - DNA, 1358 bp, Homo sapiens
gactagttctaggactagttctagatcgcgagctaagaactagtaacgccgagcagtacaaggaccaggccgacaaggcatctacccgcctgaagcagctcaagcggcagctggaggaggccgaagaggaggcccagcgggccaacgcctcccgccggaaactgcagcgcgagctggaggacgccactgagacggccgatgccatgaaccgcgaagtcagctccctaaagaacaagctcaggcgcggggacctgccgtttgtcgtgccccgccgaatggcccggaaaggcgccggggatggctccgacgaagaggtagatggcaaagcggatggggctgaggccaaacctgccgaataagcctcttctcctgcagcctgagatggatggacagacagacaccacagcctccccttcccagaccccgcagcacgcctctccccaccttcttgggactgctgtgaacatgcctcctcctgccctctcccatggctctgggcggtccagaaggagcaggccctgggcctccacctctgtgcagggcacagaaggctggggtggggggaggagtggattcctccccaccctgtcccaggcagcgccactgtccgctgtctccctcctgattctaaaatgtctcaagtgcaatgccccctcccctcctttaccgaggacagcctgcctctgccacagcaaggctgtcggggtcaagctggaaaggccagcagccttccagtggcttctcccaacactcttggggaccaaatatatttaatggttaagggacttgtcccaagtctgacagccagagcgttagaggggccagcggccctcccaggcgatcttgtgtctactctaggactgggcccgagggtggtttacctgcaccgttgactcagtatagtttaaaaatctgccacctgcacaggtatttttgaaagcaaaataaggttttcttttttcccctttcttgtaataaatgataaaattccgagtctttctcactgcctttgtttagaagagagtagctcgtcctcactggtctacactggttgccgaatttacttgtattcctaactgttttgtatatgctgcattgagacttacggcaagaaggcattttttttttttaaaggaaacaaactctcaaatcatgaagtgatataaaagctgcatatgcctacaaagctctgaattcaggtcccagttgctgtcacaaaggagtgagtgaaactcccaccctacccccttttttatataataaaagtgccttagcatgtgttgcagctgtcaccactacagtaagctggtttacagatgttttccactgagcatcacaataaagagaaccatgtgcta

SEQ ID NO: 314113 - DNA, 3589 bp, Homo sapiens
cccgatattcggtcagtgggtgatagcaaaacctcgggtacgccaagaccgtgaagaatgacgaactcctcccgcttcggcaaattcattcgcatcaactttgatgtcaatggctacattgttggagccaacattgagacttatcttttggagaaatctcgtgctatccgccaagccaaggaagaacggaccttccacatcttctattatctcctgtctggggctggagagcacctgaagaccgatctcctgttggagccgtacaacaaataccgcttcctgtccaatggacacgtcaccatccccgggcagcaggacaaggacatgttccaggagaccatggaggccatgaggattatgggcatcccagaagaggagcaaatgggcctgctgcgggtcatctcaggggttcttcagctcggcaacatcgtcttcaagaaggagcggaacactgaccaggcgtccatgcccgacaacacagctgcccaaaaggtgtcccatctcttgggtatcaatgtgaccgatttcaccagaggaatcctcaccccgcgcatcaaggtgggacgggattacgtccagaaggcgcagactaaagagcaggctgactttgccatcgaggccttggccaaggcgacctatgagcggatgttccgctggctggtgctgcgcatcaacaaggctctggacaagaccaagaggcagggcgcctccttcatcgggatcctggacattgccggcttcgagatctttgatctgaactcgtttgagcagctgtgcatcaattacaccaatgagaagctgcagcagctcttcaaccacaccatgttcatcctggagcaggaggagtaccagcgcgagggcatcgagtggaacttcatcgactttggcctcgacctgcagccctgcatcgacctcattgagaagccagcaggccccccgggcattctggccctgctggacgaggagtgctggttccccaaagccaccgacaagagcttcgtggagaaggtgatgcaggagcagggcacccaccccaagttccagaagcccaagcagctgaaggacaaagctgatttctgcattatccactatgccggcaaggtggattacaaagctgacgagtggctgatgaagaacatggatcccctgaatgacaacatcgccacactgctccaccagtcctctgacaagtttgtctcggagctgtggaaggatgtggaccgcatcatcggcctggaccaggtggccggcatgtcggagaccgcactgcccggggccttcaagacgcggaagggcatgttccgcactgtggggcagctttacaaggagcagctggccaagctgatggctacgctgaggaacacgaaccccaactttgtccgctgcatcatccccaaccacgagaagaaggccggcaagctggacccgcatctcgtgctggaccagctgcgctgcaacggtgttctcgagggcatccgtatctgccgccagggcttccccaacagggtggtcttccaggagtttcggcagagatatgagatcctgactccaaactccattcccaagggtttcatggacgggaagcaggcgtgcgtgctcatgataaaagccctggagctcgacagcaatctgtaccgcattggccagagcaaagtcttcttccgtgccggtgtgctggcccacctggaggaggagcgagacctgaagatcaccgacgtcatcatagggttccaggcctgctgcaggggctacctggccaggaaagcatttgccaagcggcagcagcagcttaccgccatgaaggtcctccagcggaactgcgctgcctacctgaagctgcggaactggcagtggtggcggctcttcaccaaggtcaagccgctgctgcaggtgagccggcaggaggaggagatgatggccaaggaggaggagctggtgaaggtcagagagaagcagctggctgcggagaacaggctcacggagatggagacgctgcagtctcagctcatggcagagaaattgcagctgcaggagcagctccaggcagaaaccgagctgtgtgccgaggctgaggagctccgggcccgcctgaccgccaagaagcaggaattagaagagatctgccatgacctagaggccagggtggaggaggaggaggagcgctgccagcacctgcaggcggagaagaagaagatgcagcagaacatccaggagcttgaggagcagctggaggaggaggagagcgcccggcagaagctgcagctggagaaggtgaccaccgaggcgaagctgaaaaagctggaggaggagcagatcatcctggaggaccagaactgcaagctggccaaggaaaagaaactgctggaagacagaatagctgagttcaccaccaacctcacagaagaggaggagaaatctaagagcctcgccaagctcaagaacaagcatgaggcaatgatcactgacttggaagagcgcctccgcagggaggagaagcagcgacaggagctggagaagacccgccggaagctggagggagactccacagacctcagcgaccagatcgccgagctccaggcccagatcgcggagctcaagatgcagctggccaagaaagaggaggagctccaggccgccctggccagagtggaagaggaagctgcccagaagaacatggccctcaagaagatccgggagctggaatctcagatctctgaactccaggaagacctggagtctgagcgtgcttccaggaataaagctgagaagcagaaacgggaccttggggaagagctagaggcgctgaaaacagagttggaggacacgctggattccacagctgcccagcaggagctcaggtcaaaacgtgagcaggaggtgaacatcctgaagaagaccctggaggaggaggccaagacccacgaggcccagatccaggagatgaggcagaagcactcacaggccgtggaggagctggcggagcagctggagcagacgaagcgggtgaaagcaaacctcgagaaggcaaagcagactctggagaacgagcggggggagctggccaacgaggtgaaggtgctgctgcagggcaaaggggactcggagcacaagcgcaagaaagtggaggcgcagctgcaggagctgcaggtcaagttcaacgagggagagcgcgtgcgcacagagctggccgacaaggtcaccaagctgcaggtggagctggacaacgtgaccgggcttctcagccagtccgacagcaagtccagcaagctcaccaaggacttctccgcgctggagtcccagctgcaggacactcaggagctgctgcaggaggagaaccggcagaagctgagcctgagcaccaagctcaagcaggtggaggacgagaagaattccttccgggagcagctggaggaggaggaggaggccaagcacaacctggagaagcagatcgccaccctccatgcccaggtggcgacttggacaagacgttggcggacgtgtgggtgccgggacctgctgggagggaagcaggaactcccacggcgggggcctgaccgggcgaggcagggggcgctgaaaggggagacag

SEQ ID NO: 314114 - DNA, 2987 bp, Homo sapiens
cccgatattcggtcagtgggtgatagcaaaacctcgggtacgccaagaccgtgaagaatgacgaactcctcccgcttcggcaaattcattcgcatcaactttgatgtcaatggctacattgttggagccaacattgagacttatcttttggagaaatctcgtgctatccgccaagccaaggaagaacggaccttccacatcttctattatctcctgtctggggctggagagcacctgaagaccgatctcctgttggagccgtacaacaaataccgcttcctgtccaatggacacgtcaccatccccgggcagcaggacaaggacatgttccaggagaccatggaggccatgaggattatgggcatcccagaagaggagcaaatgggcctgctgcgggtcatctcaggggttcttcagctcggcaacatcgtcttcaagaaggagcggaacactgaccaggcgtccatgcccgacaacacagctgcccaaaaggtgtcccatctcttgggtatcaatgtgaccgatttcaccagaggaatcctcaccccgcgcatcaaggtgggacgggattacgtccagaaggcgcagactaaagagcaggctgactttgccatcgaggccttggccaaggcgacctatgagcggatgttccgctggctggtgctgcgcatcaacaaggctctggacaagaccaagaggcagggcgcctccttcatcgggatcctggacattgccggcttcgagatctttgatctgaactcgtttgagcagctgtgcatcaattacaccaatgagaagctgcagcagctcttcaaccacaccatgttcatcctggagcaggaggagtaccagcgcgagggcatcgagtggaacttcatcgactttggcctcgacctgcagccctgcatcgacctcattgagaagccagcaggccccccgggcattctggccctgctggacgaggagtgctggttccccaaagccaccgacaagagcttcgtggagaaggtgatgcaggagcagggcacccaccccaagttccagaagcccaagcagctgaaggacaaagctgatttctgcattatccactatgccggcaaggtggattacaaagctgacgagtggctgatgaagaacatggatcccctgaatgacaacatcgccacactgctccaccagtcctctgacaagtttgtctcggagctgtggaaggatgtggaccgcatcatcggcctggaccaggtggccggcatgtcggagaccgcactgcccggggccttcaagacgcggaagggcatgttccgcactgtggggcagctttacaaggagcagctggccaagctgatggctacgctgaggaacacgaaccccaactttgtccgctgcatcatccccaaccacgagaagaaggccggcaagctggacccgcatctcgtgctggaccagctgcgctgcaacggtgttctcgagggcatccgtatctgccgccagggcttccccaacagggtggtcttccaggagtttcggcagagatatgagatcctgactccaaactccattcccaagggtttcatggacgggaagcaggcgtgcgtgctcatgataaaagccctggagctcgacagcaatctgtaccgcattggccagagcaaagtcttcttccgtgccggtgtgctggcccacctggaggaggagcgagacctgaagatcaccgacgtcatcatagggttccaggcctgctgcaggggctacctggccaggaaagcatttgccaagcggcagcagcagcttaccgccatgaaggtcctccagcggaactgcgctgcctacctgaagctgcggaactggcagtggtggcggctcttcaccaaggtcaagccgctgctgcaggtgagccggcaggaggaggagatgatggccaaggaggaggagctggtgaaggtcagagagaagcagctggctgcggagaacaggctcacggagatggagacgctgcagtctcagctcatggcagagaaattgcagctgcaggagcagctccaggcagaaaccgagctgtgtgccgaggctgaggagctccgggcccgcctgaccgccaagaagcaggaattagaagagatctgccatgacctagaggccagggtggaggaggaggaggagcgctgccagcacctgcaggcggagaagaagaagatgcagcagaacatccaggagcttgaggagcagctggaggaggaggagagcgcccggcagaagctgcagctggagaaggtgaccaccgaggcgaagctgaaaaagctggaggaggagcagatcatcctggaggaccagaactgcaagctggccaaggaaaagaaactgctggaagacagaatagctgagttcaccaccaacctcacagaagaggaggagaaatctaagagcctcgccaagctcaagaacaagcatgaggcaatgatcactgacttggaagagcgcctccgcagggaggagaagcagcgacaggagctggagaagacccgccggaagctggagggagactccacagacctcagcgaccagatcgccgagctccaggcccagatcgcggagctcaagatgcagctggccaagaaagaggaggagctccaggccgccctggccagagtggaagaggaagctgcccagaagaacatggccctcaagaagatccgggagctggaatctcagatctctgaactccaggaagacctggagtctgagcgtgcttccaggaataaagctgagaagcagaaacgggaccttggggaagagctagaggcgctgaaaacagagttggaggacacgctggattccacagctgcccagcaggagctcaggtcaaaacgtgagcaggaggtgaacatcctgatccctggatctccatcagatcccctcttctcagacagcgccaggccggggtggggccggggttggccgagccccacagctgcccccctcccctccct

SEQ ID NO: 314115 - DNA, 2139 bp, Homo sapiens
cccgatattcggtcagtgggtgatagcaaaacctcgggtacgccaagaccgtgaagaatgacgaactcctcccgcttcggcaaattcattcgcatcaactttgatgtcaatggctacattgttggagccaacattgagacttatcttttggagaaatctcgtgctatccgccaagccaaggaagaacggaccttccacatcttctattatctcctgtctggggctggagagcacctgaagaccgatctcctgttggagccgtacaacaaataccgcttcctgtccaatggacacgtcaccatccccgggcagcaggacaaggacatgttccaggagaccatggaggccatgaggattatgggcatcccagaagaggagcaaatgggcctgctgcgggtcatctcaggggttcttcagctcggcaacatcgtcttcaagaaggagcggaacactgaccaggcgtccatgcccgacaacacagctgcccaaaaggtgtcccatctcttgggtatcaatgtgaccgatttcaccagaggaatcctcaccccgcgcatcaaggtgggacgggattacgtccagaaggcgcagactaaagagcaggctgactttgccatcgaggccttggccaaggcgacctatgagcggatgttccgctggctggtgctgcgcatcaacaaggctctggacaagaccaagaggcagggcgcctccttcatcgggatcctggacattgccggcttcgagatctttgatctgaactcgtttgagcagctgtgcatcaattacaccaatgagaagctgcagcagctcttcaaccacaccatgttcatcctggagcaggaggagtaccagcgcgagggcatcgagtggaacttcatcgactttggcctcgacctgcagccctgcatcgacctcattgagaagccagcaggccccccgggcattctggccctgctggacgaggagtgctggttccccaaagccaccgacaagagcttcgtggagaaggtgatgcaggagcagggcacccaccccaagttccagaagcccaagcagctgaaggacaaagctgatttctgcattatccactatgccggcaaggtggattacaaagctgacgagtggctgatgaagaacatggatcccctgaatgacaacatcgccacactgctccaccagtcctctgacaagtttgtctcggagctgtggaaggatgtggaccgcatcatcggcctggaccaggtggccggcatgtcggagaccgcactgcccggggccttcaagacgcggaagggcatgttccgcactgtggggcagctttacaaggagcagctggccaagctgatggctacgctgaggaacacgaaccccaactttgtccgctgcatcatccccaaccacgagaagaaggccggcaagctggacccgcatctcgtgctggaccagctgcgctgcaacggtgttctcgagggcatccgtatctgccgccagggcttccccaacagggtggtcttccaggagtttcggcagagatatgagatcctgactccaaactccattcccaagggtttcatggacgggaagcaggcgtgcgtgctcatgataaaagccctggagctcgacagcaatctgtaccgcattggccagagcaaagtcttcttccgtgccggtgtgctggcccacctggaggaggagcgagacctgaagatcaccgacgtcatcatagggttccaggcctgctgcaggggctacctggccaggaaagcatttgccaagcggcagcagcagcttaccgccatgaaggtcctccagcggaactgcgctgcctacctgaagctgcggaactggcagtggtggcggctcttcaccaaggtgcgtgctagaagggcctcctgagtagctgggactacgggtgcacaccaccatacatacctgggctaattgtttgtattttttgtagaggtgtggtctcaccatgtcgcccaggttggtcacaaactcttgggctccagcaatcctcctacctcagcctcccaaagtgctgggaattacaggcatgagccactgtgcccggccctttttgatttttagtagagacaaggtcttcactattcttgcccaggctgaccttcctggcct

SEQ ID NO: 314116 - DNA, 1957 bp, Homo sapiens
cccgatattcggtcagtgggtgatagcaaaacctcgggtacgccaagaccgtgaagaatgacgaactcctcccgcttcggcaaattcattcgcatcaactttgatgtcaatggctacattgttggagccaacattgagacttatcttttggagaaatctcgtgctatccgccaagccaaggaagaacggaccttccacatcttctattatctcctgtctggggctggagagcacctgaagaccgatctcctgttggagccgtacaacaaataccgcttcctgtccaatggacacgtcaccatccccgggcagcaggacaaggacatgttccaggagaccatggaggccatgaggattatgggcatcccagaagaggagcaaatgggcctgctgcgggtcatctcaggggttcttcagctcggcaacatcgtcttcaagaaggagcggaacactgaccaggcgtccatgcccgacaacacagctgcccaaaaggtgtcccatctcttgggtatcaatgtgaccgatttcaccagaggaatcctcaccccgcgcatcaaggtgggacgggattacgtccagaaggcgcagactaaagagcaggctgactttgccatcgaggccttggccaaggcgacctatgagcggatgttccgctggctggtgctgcgcatcaacaaggctctggacaagaccaagaggcagggcgcctccttcatcgggatcctggacattgccggcttcgagatctttgatctgaactcgtttgagcagctgtgcatcaattacaccaatgagaagctgcagcagctcttcaaccacaccatgttcatcctggagcaggaggagtaccagcgcgagggcatcgagtggaacttcatcgactttggcctcgacctgcagccctgcatcgacctcattgagaagccagcaggccccccgggcattctggccctgctggacgaggagtgctggttccccaaagccaccgacaagagcttcgtggagaaggtgatgcaggagcagggcacccaccccaagttccagaagcccaagcagctgaaggacaaagctgatttctgcattatccactatgccggcaaggtggattacaaagctgacgagtggctgatgaagaacatggatcccctgaatgacaacatcgccacactgctccaccagtcctctgacaagtttgtctcggagctgtggaaggatgtggaccgcatcatcggcctggaccaggtggccggcatgtcggagaccgcactgcccggggccttcaagacgcggaagggcatgttccgcactgtggggcagctttacaaggagcagctggccaagctgatggctacgctgaggaacacgaaccccaactttgtccgctgcatcatccccaaccacgagaagaaggccggcaagctggacccgcatctcgtgctggaccagctgcgctgcaacggtgttctcgagggcatccgtatctgccgccagggcttccccaacagggtggtcttccaggagtttcggcagagatatgagatcctgactccaaactccattcccaagggtttcatggacgggaagcaggcgtgcgtgctcatgataaaagccctggagctcgacagcaatctgtaccgcattggccagagcaaagtcttcttccgtgccggtgtgctggcccacctggaggaggagcgagacctgaagatcaccgacgtcatcatagggttccaggcctgctgcaggggctacctggccaggaagtgagtcccgggagatactcctgccccgcatgccaggccttgccacgcccttctgttgccaaagggcacttagcaggccaccccgctgcagccagtcacatgcctgtcagggaggcccaggtggctcttcctacccctgttcctggatttctacctttgaggagtagaatcgggcagttcttttttttttcttt

SEQ ID NO: 314117 - DNA, 1171 bp, Homo sapiens
cccgatattcggtcagtgggtgatagcaaaacctcgggtacgccaagaccgtgaagaatgacgaactcctcccgcttcggcaaattcattcgcatcaactttgatgtcaatggctacattgttggagccaacattgagacttatcttttggagaaatctcgtgctatccgccaagccaaggaagaacggaccttccacatcttctattatctcctgtctggggctggagagcacctgaagaccgatctcctgttggagccgtacaacaaataccgcttcctgtccaatggacacgtcaccatccccgggcagcaggacaaggacatgttccaggagaccatggaggccatgaggattatgggcatcccagaagaggagcaaatgggcctgctgcgggtcatctcaggggttcttcagctcggcaacatcgtcttcaagaaggagcggaacactgaccaggcgtccatgcccgacaacacagctgcccaaaaggtgtcccatctcttgggtatcaatgtgaccgatttcaccagaggaatcctcaccccgcgcatcaaggtgggacgggattacgtccagaaggcgcagactaaagagcaggctgactttgccatcgaggccttggccaaggcgacctatgagcggatgttccgctggctggtgctgcgcatcaacaaggctctggacaagaccaagaggcagggcgcctccttcatcgggatcctggacattgccggcttcgagatctttgatctgaactcgtttgagcagctgtgcatcaattacaccaatgagaagctgcagcagctcttcaaccacaccatgttcatcctggagcaggaggagtaccagcgcgagggcatcgagtggaacttcatcgactttggcctcgacctgcagccctgcatcgacctcattgagaagccagcaggccccccgggcattctggccctgctggacgaggagtgctggttccccaaagccaccgacaagagcttcgtggagaaggtgatgcaggagcagggcacccaccccaagttccagaagcccaagcagctgaaggacaaagctgatttctgcattatccactatgccggcaaggtgaggagcactcacggggaggtgctggccagatcttcacaggagaggtggagtcgagccaattgttgga

SEQ ID NO: 314118 - DNA, 1046 bp, Homo sapiens
cccgatattcggtcagtgggtgatagcaaaacctcgggtacgccaagaccgtgaagaatgacgaactcctcccgcttcggcaaattcattcgcatcaactttgatgtcaatggctacattgttggagccaacattgagacttatcttttggagaaatctcgtgctatccgccaagccaaggaagaacggaccttccacatcttctattatctcctgtctggggctggagagcacctgaagaccgatctcctgttggagccgtacaacaaataccgcttcctgtccaatggacacgtcaccatccccgggcagcaggacaaggacatgttccaggagaccatggaggccatgaggattatgggcatcccagaagaggagcaaatgggcctgctgcgggtcatctcaggggttcttcagctcggcaacatcgtcttcaagaaggagcggaacactgaccaggcgtccatgcccgacaacacagctgcccaaaaggtgtcccatctcttgggtatcaatgtgaccgatttcaccagaggaatcctcaccccgcgcatcaaggtgggacgggattacgtccagaaggcgcagactaaagagcaggctgactttgccatcgaggccttggccaaggcgacctatgagcggatgttccgctggctggtgctgcgcatcaacaaggctctggacaagaccaagaggcagggcgcctccttcatcgggatcctggacattgccggcttcgagatctttgatctgaactcgtttgagcagctgtgcatcaattacaccaatgagaagctgcagcagctcttcaaccacaccatgttcatcctggagcaggaggagtaccagcgcgagggcatcgagtggaacttcatcgactttggcctcgacctgcagccctgcatcgacctcattgagaagccagcacgaattcccttagcaccagcacgaattcccttagcaccagcacgaattcccttagcaccagcacgaattcccttagcaccagcacgaattcccttagcaccagcacgaattccctt

SEQ ID NO: 314119 - DNA, 295 bp, Homo sapiens
cccgatattcggtcagtgggtgatagcaaaacctcgggtacgccaagaccgtgaagaatgacgaactcctcccgcttcggcaaattcattcgcatcaactttgatgtcaatggctacattgttggagccaacattgagacttatcttttggagaaatctcgtgctatccgccaagccaaggaagaacggaccttccacatcttctattatctcctgtctggggctggagagcacctgaagaccgatctcctgtgtggagcctgcgtagtcatgatcgagccgcgtagtcagatcg

SEQ ID NO: 314120 - DNA, 356 bp, Homo sapiens
tgctttcacatgggtcgtccagggccaggttcctagagctgagggagcttcctgcctgccgtttccagggccatggaagtaagttcaaactgaccaaggtttccaaagcctggcgggaaggccgcacttggatgataccggggcctggccttggttggagtcgcacactggagcccacccggaaacctctgttcctggcacgttggacatgctgacacggctctgccatcgtcccccttccaggcagggcaggctcggcagcccaggtcgctgcccggccttcactgcgtccctgggttccttgcagggcgagctggagcggcagctgctgcaggccaaccccatcctggaggcct

SEQ ID NO: 314121 - DNA, 323 bp, Homo sapiens
tattccaggcatgtggaatcgaggcaatgggtaaaatgaccaggcttctctttccttcctcagatatgagatcctgactccaaactccattcccaagggtttcatggacgggaagcaggcgtgcgtgctcatggtgagttgagctgctgtccctgcctctctggatgggcagccccttgtctggggagtgcccacgtggccagggcccaccttgctatatcagtggtcggtggatgcccaggctgtgtcccttctgatgctccgcgtctgactctgccgggcgccctttgcagtagcccctaggcctcagatagccagggatg

SEQ ID NO: 314122 - DNA, 128 bp, Homo sapiens
aggaataaagctgagaagcagaaacgggaccttggggaagagctagaggcgctgaaaacagagttggaggacacgctggattccacagctgcccagcaggagctcaggtgtgccctgggaccaagtcc

SEQ ID NO: 314123 - DNA, 1946 bp, Homo sapiens
  misc_feature (440)..(440): n is a, c, g, or t
agtcagtattgtatatgaattttctgccatgtggtagaaagagggtgcctgtctttgtactctgtgtgaacaggcacacctgtttacctgtcttggtttcaccggttttataggagttgcaacagaggatggcattttacacttacttttgtgcctttcctgttgtaattggtcctgtttgcctgagctgtttttgtgctactgttgtgtgtgaagatgtccgacacctaaacattttgcgggaagctttgcctgctttcctgagagtggtcctgtctagctcagctgtggctcccaagactccactttgcttctttctggtgggagcagccaggcacctggtttccctctcgaattcactttgagatgtgtgggctgtgctgtggccgcccctggcctggccgggcccgctgaccctctgcttctacctctgcccccangcgcggggacctgccgtttgtcgtgccccgccgaatggcccggaaaggcgccggggatggctccgacgaagaggtagatggcaaagcggatggggctgaggccaaacctgccgaataagcctcttctcctgcagcctgagatggatggacagacagacaccacagcctccccttcccagaccccgcagcacgcctctccccaccttcttgggactgctgtgaacatgcctcctcctgccctccgccccgtccccccatcccgtttccctccaggtgttgttgagggcatttggcttcctctgctgcatccccttccagctccctcccctgctcagaatctgataccaaagagacagggcccgggcccaggcagagagcgaccagcaggctcctcagccctctcttgccaaaaagcacaagatgttgaggcgagcagggcaggcccccggggaggggccagagttttctatgaatctatttttcttcagactgaggccttttggtagtcggagcccccgcagtcgtcagcctccctgacgtctgccaccagcgcccccactcctcctcctttctttgctgtttgcaatcacacgtggtgacctcacacacctctgccccttgggcctcccactcccatggctctgggcggtccagaaggagcaggccctgggcctccacctctgtgcagggcacagaaggctggggtggggggaggagtggattcctccccaccctgtcccaggcagcgccactgtccgctgtctccctcctgattctaaaatgtctcaagtgcaatgccccctcccctcctttaccgaggacagcctgcctctgccacagcaaggctgtcggggtcaagctggaaaggccagcagccttccagtggcttctcccaacactcttggggaccaaatatatttaatggttaagggacttgtcccaagtctgacagccagagcgttagaggggccagcggccctcccaggcgatcttgtgtctactctaggactgggcccgagggtggtttacctgcaccgttgactcagtatagtttaaaaatctgccacctgcacaggtatttttgaaagcaaaataaggttttcttttttcccctttcttgtaataaatgataaaattccgagtctttctcactgcctttgtttagaagagagtagctcgtcctcactggtctacactggttgccgaatttacttgtattcctaactgttttgtatatgctgcattgagacttacggcaagaaggcattttttttttttaaaggaaacaaactctcaaatcatgaagtgatataaaagctgcatatgcctacaaagctctgaattcaggtcccagttgctgtcacaaaggagtgagtgaaactcccaccctacccccttttttatataataaaagtgccttagcatgtgttgcagctgtcaccactacagtaagctggtttacagatgttttccactgagcatcacaataaagagaaccatgtgcta

SEQ ID NO: 314124 - DNA, 231 bp, Homo sapiens
gagagtaatttgattgtctgaagccttcttctctcaactcgtcaaagtcattctccatccagctttgttctgttgctggtgaggaactgcgttagaagaccctggaggaggaggccaagacccacgaggcccagatccaggagatgaggcagaagcactcacaggccgtggaggagctggcggagcagctggagcagacgaagcgggtgcggagcctccctgagaccgcag

SEQ ID NO: 314125 - DNA, 6644 bp, Homo sapiens
cccgatattcggtcagtgggtgatagcaaaacctcgggtacgccaagaccgtgaagaatgacgaactcctcccgcttcggcaaattcattcgcatcaactttgatgtcaatggctacattgttggagccaacattgagacttatcttttggagaaatctcgtgctatccgccaagccaaggaagaacggaccttccacatcttctattatctcctgtctggggctggagagcacctgaagaccgatctcctgttggagccgtacaacaaataccgcttcctgtccaatggacacgtcaccatccccgggcagcaggacaaggacatgttccaggagaccatggaggccatgaggattatgggcatcccagaagaggagcaaatgggcctgctgcgggtcatctcaggggttcttcagctcggcaacatcgtcttcaagaaggagcggaacactgaccaggcgtccatgcccgacaacacagctgcccaaaaggtgtcccatctcttgggtatcaatgtgaccgatttcaccagaggaatcctcaccccgcgcatcaaggtgggacgggattacgtccagaaggcgcagactaaagagcaggctgactttgccatcgaggccttggccaaggcgacctatgagcggatgttccgctggctggtgctgcgcatcaacaaggctctggacaagaccaagaggcagggcgcctccttcatcgggatcctggacattgccggcttcgagatctttgatctgaactcgtttgagcagctgtgcatcaattacaccaatgagaagctgcagcagctcttcaaccacaccatgttcatcctggagcaggaggagtaccagcgcgagggcatcgagtggaacttcatcgactttggcctcgacctgcagccctgcatcgacctcattgagaagccagcaggccccccgggcattctggccctgctggacgaggagtgctggttccccaaagccaccgacaagagcttcgtggagaaggtgatgcaggagcagggcacccaccccaagttccagaagcccaagcagctgaaggacaaagctgatttctgcattatccactatgccggcaaggtggattacaaagctgacgagtggctgatgaagaacatggatcccctgaatgacaacatcgccacactgctccaccagtcctctgacaagtttgtctcggagctgtggaaggatgtggaccgcatcatcggcctggaccaggtggccggcatgtcggagaccgcactgcccggggccttcaagacgcggaagggcatgttccgcactgtggggcagctttacaaggagcagctggccaagctgatggctacgctgaggaacacgaaccccaactttgtccgctgcatcatccccaaccacgagaagaaggccggcaagctggacccgcatctcgtgctggaccagctgcgctgcaacggtgttctcgagggcatccgtatctgccgccagggcttccccaacagggtggtcttccaggagtttcggcagagatatgagatcctgactccaaactccattcccaagggtttcatggacgggaagcaggcgtgcgtgctcatgataaaagccctggagctcgacagcaatctgtaccgcattggccagagcaaagtcttcttccgtgccggtgtgctggcccacctggaggaggagcgagacctgaagatcaccgacgtcatcatagggttccaggcctgctgcaggggctacctggccaggaaagcatttgccaagcggcagcagcagcttaccgccatgaaggtcctccagcggaactgcgctgcctacctgaagctgcggaactggcagtggtggcggctcttcaccaaggtcaagccgctgctgcaggtgagccggcaggaggaggagatgatggccaaggaggaggagctggtgaaggtcagagagaagcagctggctgcggagaacaggctcacggagatggagacgctgcagtctcagctcatggcagagaaattgcagctgcaggagcagctccaggcagaaaccgagctgtgtgccgaggctgaggagctccgggcccgcctgaccgccaagaagcaggaattagaagagatctgccatgacctagaggccagggtggaggaggaggaggagcgctgccagcacctgcaggcggagaagaagaagatgcagcagaacatccaggagcttgaggagcagctggaggaggaggagagcgcccggcagaagctgcagctggagaaggtgaccaccgaggcgaagctgaaaaagctggaggaggagcagatcatcctggaggaccagaactgcaagctggccaaggaaaagaaactgctggaagacagaatagctgagttcaccaccaacctcacagaagaggaggagaaatctaagagcctcgccaagctcaagaacaagcatgaggcaatgatcactgacttggaagagcgcctccgcagggaggagaagcagcgacaggagctggagaagacccgccggaagctggagggagactccacagacctcagcgaccagatcgccgagctccaggcccagatcgcggagctcaagatgcagctggccaagaaagaggaggagctccaggccgccctggccagagtggaagaggaagctgcccagaagaacatggccctcaagaagatccgggagctggaatctcagatctctgaactccaggaagacctggagtctgagcgtgcttccaggaataaagctgagaagcagaaacgggaccttggggaagagctagaggcgctgaaaacagagttggaggacacgctggattccacagctgcccagcaggagctcaggtcaaaacgtgagcaggaggtgaacatcctgaagaagaccctggaggaggaggccaagacccacgaggcccagatccaggagatgaggcagaagcactcacaggccgtggaggagctggcggagcagctggagcagacgaagcgggtgaaagcaaacctcgagaaggcaaagcagactctggagaacgagcggggggagctggccaacgaggtgaaggtgctgctgcagggcaaaggggactcggagcacaagcgcaagaaagtggaggcgcagctgcaggagctgcaggtcaagttcaacgagggagagcgcgtgcgcacagagctggccgacaaggtcaccaagctgcaggtggagctggacaacgtgaccgggcttctcagccagtccgacagcaagtccagcaagctcaccaaggacttctccgcgctggagtcccagctgcaggacactcaggagctgctgcaggaggagaaccggcagaagctgagcctgagcaccaagctcaagcaggtggaggacgagaagaattccttccgggagcagctggaggaggaggaggaggccaagcacaacctggagaagcagatcgccaccctccatgcccaggtggccgacatgaaaaagaagatggaggacagtgtggggtgcctggaaactgctgaggaggtgaagaggaagctccagaaggacctggagggcctgagccagcggcacgaggagaaggtggccgcctacgacaagctggagaagaccaagacgcggctgcagcaggagctggacgacctgctggtggacctggaccaccagcgccagagcgcgtgcaacctggagaagaagcagaagaagtttgaccagctcctggcggaggagaagaccatctctgccaagtatgcagaggagcgcgaccgggctgaggcggaggcccgagagaaggagaccaaggctctgtcgctggcccgggccctggaggaagccatggagcagaaggcggagctggagcggctcaacaagcagttccgcacggagatggaggaccttatgagctccaaggatgatgtgggcaagagtgtccacgagctggagaagtccaagcgggccctagagcagcaggtggaggagatgaagacgcagctggaagagctggaggacgagctgcaggccaccgaagatgccaagctgcggttggaggtcaacctgcaggccatgaaggcccagttcgagcgggacctgcagggccgggacgagcagagcgaggagaagaagaagcagctggtcagacaggtgcgggagatggaggcagagctggaggacgagaggaagcagcgctcgatggcagtggccgcccggaagaagctggagatggacctgaaggacctggaggcgcacatcgactcggccaacaagaaccgggacgaagccatcaaacagctgcggaagctgcaggcccagatgaaggactgcatgcgcgagctggatgacacccgcgcctctcgtgaggagatcctggcccaggccaaagagaacgagaagaagctgaagagcatggaggccgagatgatccagttgcaggaggaactggcagccgcggagcgtgccaagcgccaggcccagcaggagcgggatgagctggctgacgagatcgccaacagcagcggcaaaggagccctggcgttagaggagaagcggcgtctggaggcccgcatcgcccagctggaggaggagctggaggaggagcagggcaacacggagctgatcaacgaccggctgaagaaggccaacctgcagatcgaccagatcaacaccgacctgaacctggagcgcagccacgcccagaagaacgagaatgctcggcagcagctggaacgccagaacaaggagcttaaggtcaagctgcaggagatggagggcactgtcaagtccaagtacaaggcctccatcaccgccctcgaggccaagattgcacagctggaggagcagctggacaacgagaccaaggagcgccaggcagcctgcaaacaggtgcgtcggaccgagaagaagctgaaggatgtgctgctgcaggtggatgacgagcggaggaacgccgagcagtacaaggaccaggccgacaaggcatctacccgcctgaagcagctcaagcggcagctggaggaggccgaagaggaggcccagcgggccaacgcctcccgccggaaactgcagcgcgagctggaggacgccactgagacggccgatgccatgaaccgcgaagtcagctccctaaagaacaagctcaggcgcggggacctgccgtttgtcgtgccccgccgaatggcccggaaaggcgccggggatggctccgacgaagaggtagatggcaaagcggatggggctgaggccaaacctgccgaataagcctcttctcctgcagcctgagatggatggacagacagacaccacagcctccccttcccagaccccgcagcacgcctctccccaccttcttgggactgctgtgaacatgcctcctcctgccctccgccccgtccccccatcccgtttccctccaggtgttgttgagggcatttggcttcctctgctgcatccccttccagctccctcccctgctcagaatctgataccaaagagacagggcccgggcccaggcagagagcgaccagcaggctcctcagccctctcttgccaaaaagcacaagatgttgaggcgagcagggcaggcccccggggaggggccagagttttctatgaatctatttttcttcagactgaggccttttggtagtcggagcccccgcagtcgtcagcctccctgacgtctgccaccagcgcccccactcctcctcctttctttgctgtttgcaatcacacgtggtgacctcacacacctctgccccttgggcctcccactcccatggctctgggcggtccagaaggagcaggccctgggcctccacctctgtgcagggcacagaaggctggggtggggggaggagtggattcctccccaccctgtcccaggcagcgccactgtccgctgtctccctcctgattctaaaatgtctcaagtgcaatgccccctcccctcctttaccgaggacagcctgcctctgccacagcaaggctgtcggggtcaagctggaaaggccagcagccttccagtggcttctcccaacactcttggggaccaaatatatttaatggttaagggacttgtcccaagtctgacagccagagcgttagaggggccagcggccctcccaggcgatcttgtgtctactctaggactgggcccgagggtggtttacctgcaccgttgactcagtatagtttaaaaatctgccacctgcacaggtatttttgaaagcaaaataaggttttcttttttcccctttcttgtaataaatgataaaattccgagtctttctcactgcctttgtttagaagagagtagctcgtcctcactggtctacactggttgccgaatttacttgtattcctaactgttttgtatatgctgcattgagacttacggcaagaaggcattttttttttttaaaggaaacaaactctcaaatcatgaagtgatataaaagctgcatatgcctacaaagctctgaattcaggtcccagttgctgtcacaaaggagtgagtgaaactcccaccctacccccttttttatataataaaagtgccttagcatgtgttgcagctgtcaccactacagtaagctggtttacagatgttttccactgagcatcacaataaagagaaccatgtgcta

SEQ ID NO: 314126 - DNA, 7522 bp, Homo sapiens
cccgatattcggtcagtgggtgatagcaaaacctcgggtacgccaagaccgtgaagaatgacgaactcctcccgcttcggcaaattcattcgcatcaactttgatgtcaatggctacattgttggagccaacattgagacttatcttttggagaaatctcgtgctatccgccaagccaaggaagaacggaccttccacatcttctattatctcctgtctggggctggagagcacctgaagaccgatctcctgttggagccgtacaacaaataccgcttcctgtccaatggacacgtcaccatccccgggcagcaggacaaggacatgttccaggagaccatggaggccatgaggattatgggcatcccagaagaggagcaaatgggcctgctgcgggtcatctcaggggttcttcagctcggcaacatcgtcttcaagaaggagcggaacactgaccaggcgtccatgcccgacaacacagctgcccaaaaggtgtcccatctcttgggtatcaatgtgaccgatttcaccagaggaatcctcaccccgcgcatcaaggtgggacgggattacgtccagaaggcgcagactaaagagcaggctgactttgccatcgaggccttggccaaggcgacctatgagcggatgttccgctggctggtgctgcgcatcaacaaggctctggacaagaccaagaggcagggcgcctccttcatcgggatcctggacattgccggcttcgagatctttgatctgaactcgtttgagcagctgtgcatcaattacaccaatgagaagctgcagcagctcttcaaccacaccatgttcatcctggagcaggaggagtaccagcgcgagggcatcgagtggaacttcatcgactttggcctcgacctgcagccctgcatcgacctcattgagaagccagcaggccccccgggcattctggccctgctggacgaggagtgctggttccccaaagccaccgacaagagcttcgtggagaaggtgatgcaggagcagggcacccaccccaagttccagaagcccaagcagctgaaggacaaagctgatttctgcattatccactatgccggcaaggtggattacaaagctgacgagtggctgatgaagaacatggatcccctgaatgacaacatcgccacactgctccaccagtcctctgacaagtttgtctcggagctgtggaaggatgtggaccgcatcatcggcctggaccaggtggccggcatgtcggagaccgcactgcccggggccttcaagacgcggaagggcatgttccgcactgtggggcagctttacaaggagcagctggccaagctgatggctacgctgaggaacacgaaccccaactttgtccgctgcatcatccccaaccacgagaagaaggccggcaagctggacccgcatctcgtgctggaccagctgcgctgcaacggtgttctcgagggcatccgtatctgccgccagggcttccccaacagggtggtcttccaggagtttcggcagagatatgagatcctgactccaaactccattcccaagggtttcatggacgggaagcaggcgtgcgtgctcatgataaaagccctggagctcgacagcaatctgtaccgcattggccagagcaaagtcttcttccgtgccggtgtgctggcccacctggaggaggagcgagacctgaagatcaccgacgtcatcatagggttccaggcctgctgcaggggctacctggccaggaaagcatttgccaagcggcagcagcagcttaccgccatgaaggtcctccagcggaactgcgctgcctacctgaagctgcggaactggcagtggtggcggctcttcaccaaggtcaagccgctgctgcaggtgagccggcaggaggaggagatgatggccaaggaggaggagctggtgaaggtcagagagaagcagctggctgcggagaacaggctcacggagatggagacgctgcagtctcagctcatggcagagaaattgcagctgcaggagcagctccaggcagaaaccgagctgtgtgccgaggctgaggagctccgggcccgcctgaccgccaagaagcaggaattagaagagatctgccatgacctagaggccagggtggaggaggaggaggagcgctgccagcacctgcaggcggagaagaagaagatgcagcagaacatccaggagcttgaggagcagctggaggaggaggagagcgcccggcagaagctgcagctggagaaggtgaccaccgaggcgaagctgaaaaagctggaggaggagcagatcatcctggaggaccagaactgcaagctggccaaggaaaagaaactgctggaagacagaatagctgagttcaccaccaacctcacagaagaggaggagaaatctaagagcctcgccaagctcaagaacaagcatgaggcaatgatcactgacttggaagagcgcctccgcagggaggagaagcagcgacaggagctggagaagacccgccggaagctggagggagactccacagacctcagcgaccagatcgccgagctccaggcccagatcgcggagctcaagatgcagctggccaagaaagaggaggagctccaggccgccctggccagagtggaagaggaagctgcccagaagaacatggccctcaagaagatccgggagctggaatctcagatctctgaactccaggaagacctggagtctgagcgtgcttccaggaataaagctgagaagcagaaacgggaccttggggaagagctagaggcgctgaaaacagagttggaggacacgctggattccacagctgcccagcaggagctcaggtcaaaacgtgagcaggaggtgaacatcctgaagaagaccctggaggaggaggccaagacccacgaggcccagatccaggagatgaggcagaagcactcacaggccgtggaggagctggcggagcagctggagcagacgaagcgggtgaaagcaaacctcgagaaggcaaagcagactctggagaacgagcggggggagctggccaacgaggtgaaggtgctgctgcagggcaaaggggactcggagcacaagcgcaagaaagtggaggcgcagctgcaggagctgcaggtcaagttcaacgagggagagcgcgtgcgcacagagctggccgacaaggtcaccaagctgcaggtggagctggacaacgtgaccgggcttctcagccagtccgacagcaagtccagcaagctcaccaaggacttctccgcgctggagtcccagctgcaggacactcaggagctgctgcaggaggagaaccggcagaagctgagcctgagcaccaagctcaagcaggtggaggacgagaagaattccttccgggagcagctggaggaggaggaggaggccaagcacaacctggagaagcagatcgccaccctccatgcccaggtggccgacatgaaaaagaagatggaggacagtgtggggtgcctggaaactgctgaggaggtgaagaggaagctccagaaggacctggagggcctgagccagcggcacgaggagaaggtggccgcctacgacaagctggagaagaccaagacgcggctgcagcaggagctggacgacctgctggtggacctggaccaccagcgccagagcgcgtgcaacctggagaagaagcagaagaagtttgaccagctcctggcggaggagaagaccatctctgccaagtatgcagaggagcgcgaccgggctgaggcggaggcccgagagaaggagaccaaggctctgtcgctggcccgggccctggaggaagccatggagcagaaggcggagctggagcggctcaacaagcagttccgcacggagatggaggaccttatgagctccaaggatgatgtgggcaagagtgtccacgagctggagaagtccaagcgggccctagagcagcaggtggaggagatgaagacgcagctggaagagctggaggacgagctgcaggccaccgaagatgccaagctgcggttggaggtcaacctgcaggccatgaaggcccagttcgagcgggacctgcagggccgggacgagcagagcgaggagaagaagaagcagctggtcagacaggtgcgggagatggaggcagagctggaggacgagaggaagcagcgctcgatggcagtggccgcccggaagaagctggagatggacctgaaggacctggaggcgcacatcgactcggccaacaagaaccgggacgaagccatcaaacagctgcggaagctgcaggcccagatgaaggactgcatgcgcgagctggatgacacccgcgcctctcgtgaggagatcctggcccaggccaaagagaacgagaagaagctgaagagcatggaggccgagatgatccagttgcaggaggaactggcagccgcggagcgtgccaagcgccaggcccagcaggagcgggatgagctggctgacgagatcgccaacagcagcggcaaaggagccctggcgttagaggagaagcggcgtctggaggcccgcatcgcccagctggaggaggagctggaggaggagcagggcaacacggagctgatcaacgaccggctgaagaaggccaacctgcagatcgaccagatcaacaccgacctgaacctggagcgcagccacgcccagaagaacgagaatgctcggcagcagctggaacgccagaacaaggagcttaaggtcaagctgcaggagatggagggcactgtcaagtccaagtacaaggcctccatcaccgccctcgaggccaagattgcacagctggaggagcagctggacaacgagaccaaggagcgccaggcagcctgcaaacaggtgcgtcggaccgagaagaagctgaaggatgtgctgctgcaggtggatgacgagcggaggaacgccgagcagtacaaggaccaggccgacaaggcatctacccgcctgaagcagctcaagcggcagctggaggaggccgaagaggaggcccagcgggccaacgcctcccgccggaaactgcagcgcgagctggaggacgccactgagacggccgatgccatgaaccgcgaagtcagctccctaaagaacaagctcaggcgcggggacctgccgtttgtcgtgccccgccgaatggcccggaaaggcgccggggatggctccgacgaagaggtagatggcaaagcggatggggctgaggccaaacctgccgaataagcctcttctcctgcagcctgagatggatggacagacagacaccacagcctccccttcccagaccccgcagcacgcctctccccaccttcttgggactgctgtgaacatgcctcctcctgccctccgccccgtccccccatcccgtttccctccaggtgttgttgagggcatttggcttcctctgctgcatccccttccagctccctcccctgctcagaatctgataccaaagagacagggcccgggcccaggcagagagcgaccagcaggctcctcagccctctcttgccaaaaagcacaagatgttgaggcgagcagggcaggcccccggggaggggccagagttttctatgaatctatttttcttcagactgaggccttttggtagtcggagcccccgcagtcgtcagcctccctgacgtctgccaccagcgcccccactcctcctcctttctttgctgtttgcaatcacacgtggtgacctcacacacctctgccccttgggcctcccactcccatggctctgggcggtccagaaggagcaggccctgggcctccacctctgtgcagggcacagaaggctggggtggggggaggagtggattcctccccaccctgtcccaggcagcgccactgtccgctgtctccctcctgattctaaaatgtctcaagtgcaatgccccctcccctcctttaccgaggacagcctgcctctgccacagcaaggctgtcggggtcaagctggaaaggccagcagccttccagtggcttctcccaacactcttggggaccaaatatatttaatggttaagggacttgtcccaagtctgacagccagagcgttagaggggccagcggccctcccaggcgatcttgtgtctactctaggactgggcccgagggtggtttacctgcaccgttgactcagtatagtttaaaaatctgccacctgcacaggtatttttgaaagcaaaataaggttttcttttttcccctttcttgtaataaatgataaaattccgagtctttctcactgcctttgtttagaagagagtagctcgtcctcactggtctacactggttgccgaatttacttgtattcctaactgttttgtatatgctgcattgagacttacggcaagaaggcattttttttttttaaaggaaacaaactctcaaatcatgaagtgatataaaagctgcatatgcctacaaagctctgaattcaggtcccagttgctgtcacaaaggagtgagtgaaactcccaccctacccccttttttatataataaaagtgccttagcatgtgttgcagctgtcaccactacagtaagctggtttacagatgttttccactgagcatcacaataaagagaaccatgtgctaaaaaaaaaaaaaaaaaaaaaaaaaaaaactcgaaaaaatttccgccccgggaaagcacacaagaagcctcagccatttggcgcgagatctcgccggcacaggtcaaaaacccggcggcgacagcgttccacacatggggatagaatagaaatccgccggcagctacagtcagtcgagacaaaacggggtctccgggacaattgtggcaagcggccgaggtttacgcaggggcaagaaagattttgaccccaccgaggggcacacgtatatatcacccctgctccagatagtcagtgggaggagcccgcccccaaagcgcaaccatagaggaggcgtatataaaatcgtgttggcgaccattagtggggtcacaacaaaagaggcggataccccataaattgctgcgaggacacaaaacacaagggcgcacaattaaagtccaaagtaacgatagggatcataccactgacacgcccctgaagaaacaagtacacacccaacatttagcgaagaccacagaggaagtatacatgataaacaacaaaagcaggtggggagccaaacgcagaccaaggtgtgtggcaaacaaacaacacttcctcgtgtgggacgccacaacaggaaccacctgtgacgcattcaagagcagtaagtagagacagttggaagtgtagtagtgggtactctccggaacgagggaaggcacacacccaccggagagtggtacgatgatagtagcacacaaccggagagcgagcagccaccgcgctgtgtgagtacgcccccaacgagtacggtcgccaacaacagcgcgcgagcaacgacacaagtgagagagacgcccacgcgaggacaaatcagcagtgctgtgagtgaga

SEQ ID NO: 314127 - DNA, 6872 bp, Homo sapiens
cccgatattcggtcagtgggtgatagcaaaacctcgggtacgccaagaccgtgaagaatgacgaactcctcccgcttcggcaaattcattcgcatcaactttgatgtcaatggctacattgttggagccaacattgagacttatcttttggagaaatctcgtgctatccgccaagccaaggaagaacggaccttccacatcttctattatctcctgtctggggctggagagcacctgaagaccgatctcctgttggagccgtacaacaaataccgcttcctgtccaatggacacgtcaccatccccgggcagcaggacaaggacatgttccaggagaccatggaggccatgaggattatgggcatcccagaagaggagcaaatgggcctgctgcgggtcatctcaggggttcttcagctcggcaacatcgtcttcaagaaggagcggaacactgaccaggcgtccatgcccgacaacacagctgcccaaaaggtgtcccatctcttgggtatcaatgtgaccgatttcaccagaggaatcctcaccccgcgcatcaaggtgggacgggattacgtccagaaggcgcagactaaagagcaggctgactttgccatcgaggccttggccaaggcgacctatgagcggatgttccgctggctggtgctgcgcatcaacaaggctctggacaagaccaagaggcagggcgcctccttcatcgggatcctggacattgccggcttcgagatctttgatctgaactcgtttgagcagctgtgcatcaattacaccaatgagaagctgcagcagctcttcaaccacaccatgttcatcctggagcaggaggagtaccagcgcgagggcatcgagtggaacttcatcgactttggcctcgacctgcagccctgcatcgacctcattgagaagccagcaggccccccgggcattctggccctgctggacgaggagtgctggttccccaaagccaccgacaagagcttcgtggagaaggtgatgcaggagcagggcacccaccccaagttccagaagcccaagcagctgaaggacaaagctgatttctgcattatccactatgccggcaaggtggattacaaagctgacgagtggctgatgaagaacatggatcccctgaatgacaacatcgccacactgctccaccagtcctctgacaagtttgtctcggagctgtggaaggatgtggaccgcatcatcggcctggaccaggtggccggcatgtcggagaccgcactgcccggggccttcaagacgcggaagggcatgttccgcactgtggggcagctttacaaggagcagctggccaagctgatggctacgctgaggaacacgaaccccaactttgtccgctgcatcatccccaaccacgagaagaaggccggcaagctggacccgcatctcgtgctggaccagctgcgctgcaacggtgttctcgagggcatccgtatctgccgccagggcttccccaacagggtggtcttccaggagtttcggcagagatatgagatcctgactccaaactccattcccaagggtttcatggacgggaagcaggcgtgcgtgctcatgataaaagccctggagctcgacagcaatctgtaccgcattggccagagcaaagtcttcttccgtgccggtgtgctggcccacctggaggaggagcgagacctgaagatcaccgacgtcatcatagggttccaggcctgctgcaggggctacctggccaggaaagcatttgccaagcggcagcagcagcttaccgccatgaaggtcctccagcggaactgcgctgcctacctgaagctgcggaactggcagtggtggcggctcttcaccaaggtcaagccgctgctgcaggtgagccggcaggaggaggagatgatggccaaggaggaggagctggtgaaggtcagagagaagcagctggctgcggagaacaggctcacggagatggagacgctgcagtctcagctcatggcagagaaattgcagctgcaggagcagctccaggcagaaaccgagctgtgtgccgaggctgaggagctccgggcccgcctgaccgccaagaagcaggaattagaagagatctgccatgacctagaggccagggtggaggaggaggaggagcgctgccagcacctgcaggcggagaagaagaagatgcagcagaacatccaggagcttgaggagcagctggaggaggaggagagcgcccggcagaagctgcagctggagaaggtgaccaccgaggcgaagctgaaaaagctggaggaggagcagatcatcctggaggaccagaactgcaagctggccaaggaaaagaaactgctggaagacagaatagctgagttcaccaccaacctcacagaagaggaggagaaatctaagagcctcgccaagctcaagaacaagcatgaggcaatgatcactgacttggaagagcgcctccgcagggaggagaagcagcgacaggagctggagaagacccgccggaagctggagggagactccacagacctcagcgaccagatcgccgagctccaggcccagatcgcggagctcaagatgcagctggccaagaaagaggaggagctccaggccgccctggccagagtggaagaggaagctgcccagaagaacatggccctcaagaagatccgggagctggaatctcagatctctgaactccaggaagacctggagtctgagcgtgcttccaggaataaagctgagaagcagaaacgggaccttggggaagagctagaggcgctgaaaacagagttggaggacacgctggattccacagctgcccagcaggagctcaggtcaaaacgtgagcaggaggtgaacatcctgaagaagaccctggaggaggaggccaagacccacgaggcccagatccaggagatgaggcagaagcactcacaggccgtggaggagctggcggagcagctggagcagacgaagcgggtgaaagcaaacctcgagaaggcaaagcagactctggagaacgagcggggggagctggccaacgaggtgaaggtgctgctgcagggcaaaggggactcggagcacaagcgcaagaaagtggaggcgcagctgcaggagctgcaggtcaagttcaacgagggagagcgcgtgcgcacagagctggccgacaaggtcaccaagctgcaggtgaggcctccgccaggaccctggtgcgggcagtgggccctagcagcagttgtggcccaggtccccaggtgcatgtgtgctctctgtctctctctcttctcaaactggctcgtcagaccctcatggttcagcttgtgactcaggtccagctttacctaaaggagatgaggtggggcaggagcagtgggggtgggtccatggtcctttgtgtctccccgcccggtgcaggtggagctggacaacgtgaccgggcttctcagccagtccgacagcaagtccagcaagctcaccaaggacttctccgcgctggagtcccagctgcaggacactcaggagctgctgcaggaggagaaccggcagaagctgagcctgagcaccaagctcaagcaggtggaggacgagaagaattccttccgggagcagctggaggaggaggaggaggccaagcacaacctggagaagcagatcgccaccctccatgcccaggtggccgacatgaaaaagaagatggaggacagtgtggggtgcctggaaactgctgaggaggtgaagaggaagctccagaaggacctggagggcctgagccagcggcacgaggagaaggtggccgcctacgacaagctggagaagaccaagacgcggctgcagcaggagctggacgacctgctggtggacctggaccaccagcgccagagcgcgtgcaacctggagaagaagcagaagaagtttgaccagctcctggcggaggagaagaccatctctgccaagtatgcagaggagcgcgaccgggctgaggcggaggcccgagagaaggagaccaaggctctgtcgctggcccgggccctggaggaagccatggagcagaaggcggagctggagcggctcaacaagcagttccgcacggagatggaggaccttatgagctccaaggatgatgtgggcaagagtgtccacgagctggagaagtccaagcgggccctagagcagcaggtggaggagatgaagacgcagctggaagagctggaggacgagctgcaggccaccgaagatgccaagctgcggttggaggtcaacctgcaggccatgaaggcccagttcgagcgggacctgcagggccgggacgagcagagcgaggagaagaagaagcagctggtcagacaggtgcgggagatggaggcagagctggaggacgagaggaagcagcgctcgatggcagtggccgcccggaagaagctggagatggacctgaaggacctggaggcgcacatcgactcggccaacaagaaccgggacgaagccatcaaacagctgcggaagctgcaggcccagatgaaggactgcatgcgcgagctggatgacacccgcgcctctcgtgaggagatcctggcccaggccaaagagaacgagaagaagctgaagagcatggaggccgagatgatccagttgcaggaggaactggcagccgcggagcgtgccaagcgccaggcccagcaggagcgggatgagctggctgacgagatcgccaacagcagcggcaaaggagccctggcgttagaggagaagcggcgtctggaggcccgcatcgcccagctggaggaggagctggaggaggagcagggcaacacggagctgatcaacgaccggctgaagaaggccaacctgcagatcgaccagatcaacaccgacctgaacctggagcgcagccacgcccagaagaacgagaatgctcggcagcagctggaacgccagaacaaggagcttaaggtcaagctgcaggagatggagggcactgtcaagtccaagtacaaggcctccatcaccgccctcgaggccaagattgcacagctggaggagcagctggacaacgagaccaaggagcgccaggcagcctgcaaacaggtgcgtcggaccgagaagaagctgaaggatgtgctgctgcaggtggatgacgagcggaggaacgccgagcagtacaaggaccaggccgacaaggcatctacccgcctgaagcagctcaagcggcagctggaggaggccgaagaggaggcccagcgggccaacgcctcccgccggaaactgcagcgcgagctggaggacgccactgagacggccgatgccatgaaccgcgaagtcagctccctaaagaacaagctcaggcgcggggacctgccgtttgtcgtgccccgccgaatggcccggaaaggcgccggggatggctccgacgaagaggtagatggcaaagcggatggggctgaggccaaacctgccgaataagcctcttctcctgcagcctgagatggatggacagacagacaccacagcctccccttcccagaccccgcagcacgcctctccccaccttcttgggactgctgtgaacatgcctcctcctgccctccgccccgtccccccatcccgtttccctccaggtgttgttgagggcatttggcttcctctgctgcatccccttccagctccctcccctgctcagaatctgataccaaagagacagggcccgggcccaggcagagagcgaccagcaggctcctcagccctctcttgccaaaaagcacaagatgttgaggcgagcagggcaggcccccggggaggggccagagttttctatgaatctatttttcttcagactgaggccttttggtagtcggagcccccgcagtcgtcagcctccctgacgtctgccaccagcgcccccactcctcctcctttctttgctgtttgcaatcacacgtggtgacctcacacacctctgccccttgggcctcccactcccatggctctgggcggtccagaaggagcaggccctgggcctccacctctgtgcagggcacagaaggctggggtggggggaggagtggattcctccccaccctgtcccaggcagcgccactgtccgctgtctccctcctgattctaaaatgtctcaagtgcaatgccccctcccctcctttaccgaggacagcctgcctctgccacagcaaggctgtcggggtcaagctggaaaggccagcagccttccagtggcttctcccaacactcttggggaccaaatatatttaatggttaagggacttgtcccaagtctgacagccagagcgttagaggggccagcggccctcccaggcgatcttgtgtctactctaggactgggcccgagggtggtttacctgcaccgttgactcagtatagtttaaaaatctgccacctgcacaggtatttttgaaagcaaaataaggttttcttttttcccctttcttgtaataaatgataaaattccgagtctttctcactgcctttgtttagaagagagtagctcgtcctcactggtctacactggttgccgaatttacttgtattcctaactgttttgtatatgctgcattgagacttacggcaagaaggcattttttttttttaaaggaaacaaactctcaaatcatgaagtgatataaaagctgcatatgcctacaaagctctgaattcaggtcccagttgctgtcacaaaggagtgagtgaaactcccaccctacccccttttttatataataaaagtgccttagcatgtgttgcagctgtcaccactacagtaagctggtttacagatgttttccactgagcatcacaataaagagaaccatgtgcta

SEQ ID NO: 314128 - DNA, 6647 bp, Homo sapiens
cccgatattcggtcagtgggtgatagcaaaacctcgggtacgccaagaccgtgaagaatgacgaactcctcccgcttcggcaaattcattcgcatcaactttgatgtcaatggctacattgttggagccaacattgagacttatcttttggagaaatctcgtgctatccgccaagccaaggaagaacggaccttccacatcttctattatctcctgtctggggctggagagcacctgaagaccgatctcctgttggagccgtacaacaaataccgcttcctgtccaatggacacgtcaccatccccgggcagcaggacaaggacatgttccaggagaccatggaggccatgaggattatgggcatcccagaagaggagcaaatgggcctgctgcgggtcatctcaggggttcttcagctcggcaacatcgtcttcaagaaggagcggaacactgaccaggcgtccatgcccgacaacacagctgcccaaaaggtgtcccatctcttgggtatcaatgtgaccgatttcaccagaggaatcctcaccccgcgcatcaaggtgggacgggattacgtccagaaggcgcagactaaagagcaggctgactttgccatcgaggccttggccaaggcgacctatgagcggatgttccgctggctggtgctgcgcatcaacaaggctctggacaagaccaagaggcagggcgcctccttcatcgggatcctggacattgccggcttcgagatctttgatctgaactcgtttgagcagctgtgcatcaattacaccaatgagaagctgcagcagctcttcaaccacaccatgttcatcctggagcaggaggagtaccagcgcgagggcatcgagtggaacttcatcgactttggcctcgacctgcagccctgcatcgacctcattgagaagccagcaggccccccgggcattctggccctgctggacgaggagtgctggttccccaaagccaccgacaagagcttcgtggagaaggtgatgcaggagcagggcacccaccccaagttccagaagcccaagcagctgaaggacaaagctgatttctgcattatccactatgccggcaaggtggattacaaagctgacgagtggctgatgaagaacatggatcccctgaatgacaacatcgccacactgctccaccagtcctctgacaagtttgtctcggagctgtggaaggatgtggaccgcatcatcggcctggaccaggtggccggcatgtcggagaccgcactgcccggggccttcaagacgcggaagggcatgttccgcactgtggggcagctttacaaggagcagctggccaagctgatggctacgctgaggaacacgaaccccaactttgtccgctgcatcatccccaaccacgagaagaaggccggcaagctggacccgcatctcgtgctggaccagctgcgctgcaacggtgttctcgagggcatccgtatctgccgccagggcttccccaacagggtggtcttccaggagtttcggcagagatatgagatcctgactccaaactccattcccaagggtttcatggacgggaagcaggcgtgcgtgctcatgataaaagccctggagctcgacagcaatctgtaccgcattggccagagcaaagtcttcttccgtgccggtgtgctggcccacctggaggaggagcgagacctgaagatcaccgacgtcatcatagggttccaggcctgctgcaggggctacctggccaggaaagcatttgccaagcggcagcagcagcttaccgccatgaaggtcctccagcggaactgcgctgcctacctgaagctgcggaactggcagtggtggcggctcttcaccaaggtcaagccgctgctgcaggtgagccggcaggaggaggagatgatggccaaggaggaggagctggtgaaggtcagagagaagcagctggctgcggagaacaggctcacggagatggagacgctgcagtctcagctcatggcagagaaattgcagctgcaggagcagctccaggcagaaaccgagctgtgtgccgaggctgaggagctccgggcccgcctgaccgccaagaagcaggaattagaagagatctgccatgacctagaggccagggtggaggaggaggaggagcgctgccagcacctgcaggcggagaagaagaagatgcagcagaacatccaggagcttgaggagcagctggaggaggaggagagcgcccggcagaagctgcagctggagaaggtgaccaccgaggcgaagctgaaaaagctggaggaggagcagatcatcctggaggaccagaactgcaagctggccaaggaaaagaaactgctggaagacagaatagctgagttcaccaccaacctcacagaagaggaggagaaatctaagagcctcgccaagctcaagaacaagcatgaggcaatgatcactgacttggaagagcgcctccgcagggaggagaagcagcgacaggagctggagaagacccgccggaagctggagggagactccacagacctcagcgaccagatcgccgagctccaggcccagatcgcggagctcaagatgcagctggccaagaaagaggaggagctccaggccgccctggccagagtggaagaggaagctgcccagaagaacatggccctcaagaagatccgggagctggaatctcagatctctgaactccaggaagacctggagtctgagcgtgcttccaggaataaagctgagaagcagaaacgggaccttggggaagagctagaggcgctgaaaacagagttggaggacacgctggattccacagctgcccagcaggagctcaggtcaaaacgtgagcaggaggtgaacatcctgaagaagaccctggaggaggaggccaagacccacgaggcccagatccaggagatgaggcagaagcactcacaggccgtggaggagctggcggagcagctggagcagacgaagcgggtgaaagcaaacctcgagaaggcaaagcagactctggagaacgagcggggggagctggccaacgaggtgaaggtgctgctgcagggcaaaggggactcggagcacaagcgcaagaaagtggaggcgcagctgcaggagctgcaggtcaagttcaacgagggagagcgcgtgcgcacagagctggccgacaaggtcaccaagctgcaggtggagctggacaacgtgaccgggcttctcagccagtccgacagcaagtccagcaagctcaccaaggacttctccgcgctggagtcccagctgcaggacactcaggagctgctgcaggaggagaaccggcagaagctgagcctgagcaccaagctcaagcaggtggaggacgagaagaattccttccgggagcagctggaggaggaggaggaggccaagcacaacctggagaagcagatcgccaccctccatgcccaggtggccgacatgaaaaagaagatggaggacagtgtggggtgcctggaaactgctgaggaggtgaagaggaagctccagaaggacctggagggcctgagccagcggcacgaggagaaggtggccgcctacgacaagctggagaagaccaagacgcggctgcagcaggagctggacgacctgctggtggacctggaccaccagcgccagagcgcgtgcaacctggagaagaagcagaagaagtttgaccagctcctggcggaggagaagaccatctctgccaagtatgcagaggagcgcgaccgggctgaggcggaggcccgagagaaggagaccaaggctctgtcgctggcccgggccctggaggaagccatggagcagaaggcggagctggagcggctcaacaagcagttccgcacggagatggaggaccttatgagctccaaggatgatgtgggcaagagtgtccacgagctggagaagtccaagcgggccctagagcagcaggtggaggagatgaagacgcagctggaagagctggaggacgagctgcaggccaccgaagatgccaagctgcggttggaggtcaacctgcaggccatgaaggcccagttcgagcgggacctgcagggccgggacgagcagagcgaggagaagaagaagcagctggtcagacaggtgcgggagatggaggcagagctggaggacgagaggaagcagcgctcgatggcagtggccgcccggaagaagctggagatggacctgaaggacctggaggcgcacatcgactcggccaacaagaaccgggacgaagccatcaaacagctgcggaagctgcaggcccagatgaaggactgcatgcgcgagctggatgacacccgcgcctctcgtgaggagatcctggcccaggccaaagagaacgagaagaagctgaagagcatggaggccgagatgatccagttgcaggaggaactggcagccgcggagcgtgccaagcgccaggcccagcaggagcgggatgagctggctgacgagatcgccaacagcagcggcaaaggagccctggcgttagaggagaagcggcgtctggaggcccgcatcgcccagctggaggaggagctggaggaggagcagggcaacacggagctgatcaacgaccggctgaagaaggccaacctgcagatcgaccagatcaacaccgacctgaacctggagcgcagccacgcccagaagaacgagaatgctcggcagcagctggaacgccagaacaaggagcttaaggtcaagctgcaggagatggagggcactgtcaagtccaagtacaaggcctccatcaccgccctcgaggccaagattgcacagctggaggagcagctggacaacgagaccaaggagcgccaggcagcctgcaaacaggtgcgtcggaccgagaagaagctgaaggatgtgctgctgcaggtggatgacgagcggaggaacgccgagcagtacaaggaccaggccgacaaggcatctacccgcctgaagcagctcaagcggcagctggaggaggccgaagaggaggcccagcgggccaacgcctcccgccggaaactgcagcgcgagctggaggacgccactgagacggccgatgccatgaaccgcgaagtcagctccctaaagaacaagctcaggcgcggggacctgccgtttgtcgtgccccgccgaatggcccggaaaggcgccggggatggctccgacgaagaggtagatggcaaagcggatggggctgaggccaaacctgccgaataagcctcttctcctgcagcctgagatggatggacagacagacaccacagcctccccttcccagaccccgcagcacgcctctccccaccttcttgggactgctgtgaacatgcctcctcctgccctccgccccgtccccccatcccgtttccctccaggtgttgttgagggcatttggcttcctctgctgcatccccttccagctccctcccctgctcagaatctgataccaaagagacagggcccgggcccaggcagagagcgaccagcaggctcctcagccctctcttgccaaaaagcacaagatgttgaggcgagcagggcaggcccccggggaggggccagagttttctatgaatctatttttcttcagactgaggccttttggtagtcggagcccccgcagtcgtcagcctccctgacgtctgccaccagcgcccccactcctcctcctttctttgctgtttgcaatcacacgtggtgacctcacacacctctgccccttgggcctcccactcccatggctctgggcggtccagaaggagcaggccctgggcctccacctctgtgcagggcacagaaggctggggtggggggaggagtggattcctccccaccctgtcccaggcagcgccactgtccgctgtctccctcctgattctaaaatgtctcaagtgcaatgccccctcccctcctttaccgaggacagcctgcctctgccacagcaaggctgtcggggtcaagctggaaaggccagcagccttccagtggcttctcccaacactcttggggaccaaatatatttaatggttaagggacttgtcccaagtctgacagccagagcgttagaggggccagcggccctcccaggcgatcttgtgtctactctaggactgggcccgagggtggtttacctgcaccgttgactcagtatagtttaaaaatctgccacctgcacaggtatttttgaaagcaaaataaggttttcttttttcccctttcttgtaataaatgataaaattccgagtctttctcactgcctttgtttagaagagagtagctcgtcctcactggtctacactggttgccgaatttacttgtattcctaactgttttgtatatgctgcattgagacttacggcaagaaggcattttttttttttaaaggaaacaaactctcaaatcatgaagtgatataaaagctgcatatgcctacaaagctctgaattcaggtcccagttgctgtcacaaaggagtgagtgaaactcccaccctacccccttttttatataataaaagtgccttagcatgtgttgcagctgtcaccactacagtaagctggttagcacatggttctctttattgtgatgctcagtggaactcgtgctgtaaac

SEQ ID NO: 314129 - DNA, 4223 bp, Homo sapiens
cacgaggcccagatccaggagatgaggcagaagcactcacaggccgtggaggagcgcctccgcagggaggagaagcagcgacaggagctggagaagacccgccggaagctggagggagactccacagacctcagcgaccagatcgccgagctccaggcccagatcgcggagctcaagatgcagctggccaagaaagaggaggagctccaggccgccctggccagagtggaagaggaagctgcccagaagaacatggccctcaagaagatccgggagctggaatctcagatctctgaactccaggaagacctggagtctgagcgtgcttccaggaataaagctgagaagcagaaacgggaccttggggaagagctagaggcgctgaaaacagagttggaggacacgctggattccacagctgcccagcaggagctcaggtcaaaacgtgagcaggaggtgaacatcctgaagaagaccctggaggaggaggccaagacccacgaggcccagatccaggagatgaggcagaagcactcacaggccgtggaggagctggcggagcagctggagcagacgaagcgggtgaaagcaaacctcgagaaggcaaagcagactctggagaacgagcggggggagctggccaacgaggtgaaggtgctgctgcagggcaaaggggactcggagcacaagcgcaagaaagtggaggcgcagctgcaggagctgcaggtcaagttcaacgagggagagcgcgtgcgcacagagctggccgacaaggtcaccaagctgcaggtggagctggacaacgtgaccgggcttctcagccagtccgacagcaagtccagcaagctcaccaaggacttctccgcgctggagtcccagctgcaggacactcaggagctgctgcaggaggagaaccggcagaagctgagcctgagcaccaagctcaagcaggtggaggacgagaagaattccttccgggagcagctggaggaggaggaggaggccaagcacaacctggagaagcagatcgccaccctccatgcccaggtggccgacatgaaaaagaagatggaggacagtgtggggtgcctggaaactgctgaggaggtgaagaggaagctccagaaggacctggagggcctgagccagcggcacgaggagaaggtggccgcctacgacaagctggagaagaccaagacgcggctgcagcaggagctggacgacctgctggtggacctggaccaccagcgccagagcgcgtgcaacctggagaagaagcagaagaagtttgaccagctcctggcggaggagaagaccatctctgccaagtatgcagaggagcgcgaccgggctgaggcggaggcccgagagaaggagaccaaggctctgtcgctggcccgggccctggaggaagccatggagcagaaggcggagctggagcggctcaacaagcagttccgcacggagatggaggaccttatgagctccaaggatgatgtgggcaagagtgtccacgagctggagaagtccaagcgggccctagagcagcaggtggaggagatgaagacgcagctggaagagctggaggacgagctgcaggccaccgaagatgccaagctgcggttggaggtcaacctgcaggccatgaaggcccagttcgagcgggacctgcagggccgggacgagcagagcgaggagaagaagaagcagctggtcagacaggtgcgggagatggaggcagagctggaggacgagaggaagcagcgctcgatggcagtggccgcccggaagaagctggagatggacctgaaggacctggaggcgcacatcgactcggccaacaagaaccgggacgaagccatcaaacagctgcggaagctgcaggcccagatgaaggactgcatgcgcgagctggatgacacccgcgcctctcgtgaggagatcctggcccaggccaaagagaacgagaagaagctgaagagcatggaggccgagatgatccagttgcaggaggaactggcagccgcggagcgtgccaagcgccaggcccagcaggagcgggatgagctggctgacgagatcgccaacagcagcggcaaaggagccctggcgttagaggagaagcggcgtctggaggcccgcatcgcccagctggaggaggagctggaggaggagcagggcaacacggagctgatcaacgaccggctgaagaaggccaacctgcagatcgaccagatcaacaccgacctgaacctggagcgcagccacgcccagaagaacgagaatgctcggcagcagctggaacgccagaacaaggagcttaaggtcaagctgcaggagatggagggcactgtcaagtccaagtacaaggcctccatcaccgccctcgaggccaagattgcacagctggaggagcagctggacaacgagaccaaggagcgccaggcagcctgcaaacaggtgcgtcggaccgagaagaagctgaaggatgtgctgctgcaggtggatgacgagcggaggaacgccgagcagtacaaggaccaggccgacaaggcatctacccgcctgaagcagctcaagcggcagctggaggaggccgaagaggaggcccagcgggccaacgcctcccgccggaaactgcagcgcgagctggaggacgccactgagacggccgatgccatgaaccgcgaagtcagctccctaaagaacaagctcaggcgcggggacctgccgtttgtcgtgccccgccgaatggcccggaaaggcgccggggatggctccgacgaagaggtagatggcaaagcggatggggctgaggccaaacctgccgaataagcctcttctcctgcagcctgagatggatggacagacagacaccacagcctccccttcccagaccccgcagcacgcctctccccaccttcttgggactgctgtgaacatgcctcctcctgccctccgccccgtccccccatcccgtttccctccaggtgttgttgagggcatttggcttcctctgctgcatccccttccagctccctcccctgctcagaatctgataccaaagagacagggcccgggcccaggcagagagcgaccagcaggctcctcagccctctcttgccaaaaagcacaagatgttgaggcgagcagggcaggcccccggggaggggccagagttttctatgaatctatttttcttcagactgaggccttttggtagtcggagcccccgcagtcgtcagcctccctgacgtctgccaccagcgcccccactcctcctcctttctttgctgtttgcaatcacacgtggtgacctcacacacctctgccccttgggcctcccactcccatggctctgggcggtccagaaggagcaggccctgggcctccacctctgtgcagggcacagaaggctggggtggggggaggagtggattcctccccaccctgtcccaggcagcgccactgtccgctgtctccctcctgattctaaaatgtctcaagtgcaatgccccctcccctcctttaccgaggacagcctgcctctgccacagcaaggctgtcggggtcaagctggaaaggccagcagccttccagtggcttctcccaacactcttggggaccaaatatatttaatggttaagggacttgtcccaagtctgacagccagagcgttagaggggccagcggccctcccaggcgatcttgtgtctactctaggactgggcccgagggtggtttacctgcaccgttgactcagtatagtttaaaaatctgccacctgcacaggtatttttgaaagcaaaataaggttttcttttttcccctttcttgtaataaatgataaaattccgagtctttctcactgcctttgtttagaagagagtagctcgtcctcactggtctacactggttgccgaatttacttgtattcctaactgttttgtatatgctgcattgagacttacggcaagaaggcattttttttttttaaaggaaacaaactctcaaatcatgaagtgatataaaagctgcatatgcctacaaagctctgaattcaggtcccagttgctgtcacaaaggagtgagtgaaactcccaccctacccccttttttatataataaaagtgccttagcatgtgttgcagctgtcaccactacagtaagctggtttacagatgttttccactgagcatcacaataaagagaaccatgtgcta

SEQ ID NO: 314130 - DNA, 2989 bp, Homo sapiens
tggcctgcaggttgacctccaaccgcagcttggcatcttcggtggcctgcagctcgtcctccagctcttccagctgcgtcttcatctctgccaagtatgcagaggagcgcgaccgggctgaggcggaggcccgagagaaggagaccaaggctctgtcgctggcccgggccctggaggaagccatggagcagaaggcggagctggagcggctcaacaagcagttccgcacggagatggaggaccttatgagctccaaggatgatgtgggcaagagtgtccacgagctggagaagtccaagcgggccctagagcagcaggtggaggagatgaagacgcagctggaagagctggaggacgagctgcaggccaccgaagatgccaagctgcggttggaggtcaacctgcaggccatgaaggcccagttcgagcgggacctgcagggccgggacgagcagagcgaggagaagaagaagcagctggtcagacaggtgcgggagatggaggcagagctggaggacgagaggaagcagcgctcgatggcagtggccgcccggaagaagctggagatggacctgaaggacctggaggcgcacatcgactcggccaacaagaaccgggacgaagccatcaaacagctgcggaagctgcaggcccagatgaaggactgcatgcgcgagctggatgacacccgcgcctctcgtgaggagatcctggcccaggccaaagagaacgagaagaagctgaagagcatggaggccgagatgatccagttgcaggaggaactggcagccgcggagcgtgccaagcgccaggcccagcaggagcgggatgagctggctgacgagatcgccaacagcagcggcaaaggagccctggcgttagaggagaagcggcgtctggaggcccgcatcgcccagctggaggaggagctggaggaggagcagggcaacacggagctgatcaacgaccggctgaagaaggccaacctgcagatcgaccagatcaacaccgacctgaacctggagcgcagccacgcccagaagaacgagaatgctcggcagcagctggaacgccagaacaaggagcttaaggtcaagctgcaggagatggagggcactgtcaagtccaagtacaaggcctccatcaccgccctcgaggccaagattgcacagctggaggagcagctggacaacgagaccaaggagcgccaggcagcctgcaaacaggtgcgtcggaccgagaagaagctgaaggatgtgctgctgcaggtggatgacgagcggaggaacgccgagcagtacaaggaccaggccgacaaggcatctacccgcctgaagcagctcaagcggcagctggaggaggccgaagaggaggcccagcgggccaacgcctcccgccggaaactgcagcgcgagctggaggacgccactgagacggccgatgccatgaaccgcgaagtcagctccctaaagaacaagctcaggcgcggggacctgccgtttgtcgtgccccgccgaatggcccggaaaggcgccggggatggctccgacgaagaggtagatggcaaagcggatggggctgaggccaaacctgccgaataagcctcttctcctgcagcctgagatggatggacagacagacaccacagcctccccttcccagaccccgcagcacgcctctccccaccttcttgggactgctgtgaacatgcctcctcctgccctccgccccgtccccccatcccgtttccctccaggtgttgttgagggcatttggcttcctctgctgcatccccttccagctccctcccctgctcagaatctgataccaaagagacagggcccgggcccaggcagagagcgaccagcaggctcctcagccctctcttgccaaaaagcacaagatgttgaggcgagcagggcaggcccccggggaggggccagagttttctatgaatctatttttcttcagactgaggccttttggtagtcggagcccccgcagtcgtcagcctccctgacgtctgccaccagcgcccccactcctcctcctttctttgctgtttgcaatcacacgtggtgacctcacacacctctgccccttgggcctcccactcccatggctctgggcggtccagaaggagcaggccctgggcctccacctctgtgcagggcacagaaggctggggtggggggaggagtggattcctccccaccctgtcccaggcagcgccactgtccgctgtctccctcctgattctaaaatgtctcaagtgcaatgccccctcccctcctttaccgaggacagcctgcctctgccacagcaaggctgtcggggtcaagctggaaaggccagcagccttccagtggcttctcccaacactcttggggaccaaatatatttaatggttaagggacttgtcccaagtctgacagccagagcgttagaggggccagcggccctcccaggcgatcttgtgtctactctaggactgggcccgagggtggtttacctgcaccgttgactcagtatagtttaaaaatctgccacctgcacaggtatttttgaaagcaaaataaggttttcttttttcccctttcttgtaataaatgataaaattccgagtctttctcactgcctttgtttagaagagagtagctcgtcctcactggtctacactggttgccgaatttacttgtattcctaactgttttgtatatgctgcattgagacttacggcaagaaggcattttttttttttaaaggaaacaaactctcaaatcatgaagtgatataaaagctgcatatgcctacaaagctctgaattcaggtcccagttgctgtcacaaaggagtgagtgaaactcccaccctacccccttttttatataataaaagtgccttagcatgtgttgcagctgtcaccactacagtaagctggtttacagatgttttccactgagcatcacaataaagagaaccatgtgcta

SEQ ID NO: 314131 - DNA, 6384 bp, Homo sapiens
  misc_feature (6319)..(6319): n is a, c, g, or t
  misc_feature (6322)..(6323): n is a, c, g, or t
  misc_feature (6332)..(6332): n is a, c, g, or t
  misc_feature (6345)..(6345): n is a, c, g, or t
  misc_feature (6347)..(6347): n is a, c, g, or t
  misc_feature (6356)..(6356): n is a, c, g, or t
  misc_feature (6362)..(6363): n is a, c, g, or t
  misc_feature (6365)..(6365): n is a, c, g, or t
  misc_feature (6371)..(6371): n is a, c, g, or t
cccgatattcggtcagtgggtgatagcaaaacctcgggtacgccaagaccgtgaagaatgacgaactcctcccgcttcggcaaattcattcgcatcaactttgatgtcaatggctacattgttggagccaacattgagacttatcttttggagaaatctcgtgctatccgccaagccaaggaagaacggaccttccacatcttctattatctcctgtctggggctggagagcacctgaagaccgatctcctgttggagccgtacaacaaataccgcttcctgtccaatggacacgtcaccatccccgggcagcaggacaaggacatgttccaggagaccatggaggccatgaggattatgggcatcccagaagaggagcaaatgggcctgctgcgggtcatctcaggggttcttcagctcggcaacatcgtcttcaagaaggagcggaacactgaccaggcgtccatgcccgacaacacagctgcccaaaaggtgtcccatctcttgggtatcaatgtgaccgatttcaccagaggaatcctcaccccgcgcatcaaggtgggacgggattacgtccagaaggcgcagactaaagagcaggctgactttgccatcgaggccttggccaaggcgacctatgagcggatgttccgctggctggtgctgcgcatcaacaaggctctggacaagaccaagaggcagggcgcctccttcatcgggatcctggacattgccggcttcgagatctttgatctgaactcgtttgagcagctgtgcatcaattacaccaatgagaagctgcagcagctcttcaaccacaccatgttcatcctggagcaggaggagtaccagcgcgagggcatcgagtggaacttcatcgactttggcctcgacctgcagccctgcatcgacctcattgagaagccagcaggccccccgggcattctggccctgctggacgaggagtgctggttccccaaagccaccgacaagagcttcgtggagaaggtgatgcaggagcagggcacccaccccaagttccagaagcccaagcagctgaaggacaaagctgatttctgcattatccactatgccggcaaggtggattacaaagctgacgagtggctgatgaagaacatggatcccctgaatgacaacatcgccacactgctccaccagtcctctgacaagtttgtctcggagctgtggaaggatgtggaccgcatcatcggcctggaccaggtggccggcatgtcggagaccgcactgcccggggccttcaagacgcggaagggcatgttccgcactgtggggcagctttacaaggagcagctggccaagctgatggctacgctgaggaacacgaaccccaactttgtccgctgcatcatccccaaccacgagaagaaggccggcaagctggacccgcatctcgtgctggaccagctgcgctgcaacggtgttctcgagggcatccgtatctgccgccagggcttccccaacagggtggtcttccaggagtttcggcagagatatgagatcctgactccaaactccattcccaagggtttcatggacgggaagcaggcgtgcgtgctcatgataaaagccctggagctcgacagcaatctgtaccgcattggccagagcaaagtcttcttccgtgccggtgtgctggcccacctggaggaggagcgagacctgaagatcaccgacgtcatcatagggttccaggcctgctgcaggggctacctggccaggaaagcatttgccaagcggcagcagcagcttaccgccatgaaggtcctccagcggaactgcgctgcctacctgaagctgcggaactggcagtggtggcggctcttcaccaaggtcaagccgctgctgcaggtgagccggcaggaggaggagatgatggccaaggaggaggagctggtgaaggtcagagagaagcagctggctgcggagaacaggctcacggagatggagacgctgcagtctcagctcatggcagagaaattgcagctgcaggagcagctccaggcagaaaccgagctgtgtgccgaggctgaggagctccgggcccgcctgaccgccaagaagcaggaattagaagagatctgccatgacctagaggccagggtggaggaggaggaggagcgctgccagcacctgcaggcggagaagaagaagatgcagcagaacatccaggagcttgaggagcagctggaggaggaggagagcgcccggcagaagctgcagctggagaaggtgaccaccgaggcgaagctgaaaaagctggaggaggagcagatcatcctggaggaccagaactgcaagctggccaaggaaaagaaactgctggaagacagaatagctgagttcaccaccaacctcacagaagaggaggagaaatctaagagcctcgccaagctcaagaacaagcatgaggcaatgatcactgacttggaagagcgcctccgcagggaggagaagcagcgacaggagctggagaagacccgccggaagctggagggagactccacagacctcagcgaccagatcgccgagctccaggcccagatcgcggagctcaagatgcagctggccaagaaagaggaggagctccaggccgccctggccagagtggaagaggaagctgcccagaagaacatggccctcaagaagatccgggagctggaatctcagatctctgaactccaggaagacctggagtctgagcgtgcttccaggaataaagctgagaagcagaaacgggaccttggggaagagctagaggcgctgaaaacagagttggaggacacgctggattccacagctgcccagcaggagctcaggtcaaaacgtgagcaggaggtgaacatcctgaagaagaccctggaggaggaggccaagacccacgaggcccagatccaggagatgaggcagaagcactcacaggccgtggaggagctggcggagcagctggagcagacgaagcgggtgaaagcaaacctcgagaaggcaaagcagactctggagaacgagcggggggagctggccaacgaggtgaaggtgctgctgcagggcaaaggggactcggagcacaagcgcaagaaagtggaggcgcagctgcaggagctgcaggtcaagttcaacgagggagagcgcgtgcgcacagagctggccgacaaggtcaccaagctgcaggtggagctggacaacgtgaccgggcttctcagccagtccgacagcaagtccagcaagctcaccaaggacttctccgcgctggagtcccagctgcaggacactcaggagctgctgcaggaggagaaccggcagaagctgagcctgagcaccaagctcaagcaggtggaggacgagaagaattccttccgggagcagctggaggaggaggaggaggccaagcacaacctggagaagcagatcgccaccctccatgcccaggtggccgacatgaaaaagaagatggaggacagtgtggggtgcctggaaactgctgaggaggtgaagaggaagctccagaaggacctggagggcctgagccagcggcacgaggagaaggtggccgcctacgacaagctggagaagaccaagacgcggctgcagcaggagctggacgacctgctggtggacctggaccaccagcgccagagcgcgtgcaacctggagaagaagcagaagaagtttgaccagctcctggcggaggagaagaccatctctgccaagtatgcagaggagcgcgaccgggctgaggcggaggcccgagagaaggagaccaaggctctgtcgctggcccgggccctggaggaagccatggagcagaaggcggagctggagcggctcaacaagcagttccgcacggagatggaggaccttatgagctccaaggatgatgtgggcaagagtgtccacgagctggagaagtccaagcgggccctagagcagcaggtggaggagatgaagacgcagctggaagagctggaggacgagctgcaggccaccgaagatgccaagctgcggttggaggtcaacctgcaggccatgaaggcccagttcgagcgggacctgcagggccgggacgagcagagcgaggagaagaagaagcagctggtcagacaggtgcgggagatggaggcagagctggaggacgagaggaagcagcgctcgatggcagtggccgcccggaagaagctggagatggacctgaaggacctggaggcgcacatcgactcggccaacaagaaccgggacgaagccatcaaacagctgcggaagctgcaggcccagatgaaggactgcatgcgcgagctggatgacacccgcgcctctcgtgaggagatcctggcccaggccaaagagaacgagaagaagctgaagagcatggaggccgagatgatccagttgcaggaggaactggcagccgcggagcgtgccaagcgccaggcccagcaggagcgggatgagctggctgacgagatcgccaacagcagcggcaaaggagccctggcgttagaggagaagcggcgtctggaggcccgcatcgcccagctggaggaggagctggaggaggagcagggcaacacggagctgatcaacgaccggctgaagaaggccaacctgcagatcgaccagatcaacaccgacctgaacctggagcgcagccacgcccagaagaacgagaatgctcggcagcagctggaacgccagaacaaggagcttaaggtcaagctgcaggagatggagggcactgtcaagtccaagtacaaggcctccatcaccgccctcgaggccaagattgcacagctggaggagcagctggacaacgagaccaaggagcgccaggcagcctgcaaacaggtgcgtcggaccgagaagaagctgaaggatgtgctgctgcaggtggatgacgagcggaggaacgccgagcagtacaaggaccaggccgacaaggcatctacccgcctgaagcagctcaagcggcagctggaggaggccgaagaggaggcccagcgggccaacgcctcccgccggaaactgcagcgcgagctggaggacgccactgagacggccgatgccatgaaccgcgaagtcagctccctaaagaacaagctcaggcgcggggacctgccgtttgtcgtgccccgccgaatggcccggaaaggcgccggggatggctccgacgaagaggtagatggcaaagcggatggggctgaggccaaacctgccgaataagcctcttctcctgcagcctgagatggatggacagacagacaccacagcctccccttcccagaccccgcagcacgcctctccccaccttcttgggactgctgtgaacatgcctcctcctgccctccgccccgtccccccatcccgtttccctccaggtgttgttgagggcatttggcttcctctgctgcatccccttccagctccctcccctgctcagaatctgataccaaagagacagggcccgggcccaggcagagagcgaccagcaggctcctcagccctctcttgccaaaaagcacaagatgttgaggcgagcagggcaggcccccggggaggggccagagttttctatgaatctatttttcttcagactgaggccttttggtagtcggagcccccgcagtcgtcagcctccctgacgtctgccaccagcgcccccactcctcctcctttctttgctgtttgcaatcacacgtggtgacctcacacacctctgccccttgggcctcccactcccatggctctgggcggtccagaaggagcaggccctgggcctccacctctgtgcagggcacagaaggctggggtggggggaggagtggattcctccccaccctgtcccaggcagcgccactgtccgctgtctccctcctgattctaaaatgtctcaagtgcaatgccccctcccctcctttaccgaggacagcctgcctctgccacagcaaggctgtcggggtcaagctggaaaggccagcagccttccagtggcttctcccaacactcttggggaccaaatatatttaatggttaagggacttgtcccaagtctgacagccagagcgttagaggggccagcggccctcccaggcgatcttgtgtctactctaggactgggcccgagggtggtttacctgcaccgttgactcagtatagtttaaaaatctgccacctgcacaggtatttttgaaagcaaaataaggttttcttttttcccctttcttgtaataaatgataaaattccaaaaaaaaaaaaaaaaaaaaaaaaaaaactgtgtgtgggggngcnncgggcccgnagaaaaagctttntnaacacccantcggtnngngggcgnggcgggggcccca

SEQ ID NO: 314132 - DNA, 6313 bp, Homo sapiens
  misc_feature (6284)..(6284): n is a, c, g, or t
  misc_feature (6310)..(6310): n is a, c, g, or t
cccgatattcggtcagtgggtgatagcaaaacctcgggtacgccaagaccgtgaagaatgacgaactcctcccgcttcggcaaattcattcgcatcaactttgatgtcaatggctacattgttggagccaacattgagacttatcttttggagaaatctcgtgctatccgccaagccaaggaagaacggaccttccacatcttctattatctcctgtctggggctggagagcacctgaagaccgatctcctgttggagccgtacaacaaataccgcttcctgtccaatggacacgtcaccatccccgggcagcaggacaaggacatgttccaggagaccatggaggccatgaggattatgggcatcccagaagaggagcaaatgggcctgctgcgggtcatctcaggggttcttcagctcggcaacatcgtcttcaagaaggagcggaacactgaccaggcgtccatgcccgacaacacagctgcccaaaaggtgtcccatctcttgggtatcaatgtgaccgatttcaccagaggaatcctcaccccgcgcatcaaggtgggacgggattacgtccagaaggcgcagactaaagagcaggctgactttgccatcgaggccttggccaaggcgacctatgagcggatgttccgctggctggtgctgcgcatcaacaaggctctggacaagaccaagaggcagggcgcctccttcatcgggatcctggacattgccggcttcgagatctttgatctgaactcgtttgagcagctgtgcatcaattacaccaatgagaagctgcagcagctcttcaaccacaccatgttcatcctggagcaggaggagtaccagcgcgagggcatcgagtggaacttcatcgactttggcctcgacctgcagccctgcatcgacctcattgagaagccagcaggccccccgggcattctggccctgctggacgaggagtgctggttccccaaagccaccgacaagagcttcgtggagaaggtgatgcaggagcagggcacccaccccaagttccagaagcccaagcagctgaaggacaaagctgatttctgcattatccactatgccggcaaggtggattacaaagctgacgagtggctgatgaagaacatggatcccctgaatgacaacatcgccacactgctccaccagtcctctgacaagtttgtctcggagctgtggaaggatgtggaccgcatcatcggcctggaccaggtggccggcatgtcggagaccgcactgcccggggccttcaagacgcggaagggcatgttccgcactgtggggcagctttacaaggagcagctggccaagctgatggctacgctgaggaacacgaaccccaactttgtccgctgcatcatccccaaccacgagaagaaggccggcaagctggacccgcatctcgtgctggaccagctgcgctgcaacggtgttctcgagggcatccgtatctgccgccagggcttccccaacagggtggtcttccaggagtttcggcagagatatgagatcctgactccaaactccattcccaagggtttcatggacgggaagcaggcgtgcgtgctcatgataaaagccctggagctcgacagcaatctgtaccgcattggccagagcaaagtcttcttccgtgccggtgtgctggcccacctggaggaggagcgagacctgaagatcaccgacgtcatcatagggttccaggcctgctgcaggggctacctggccaggaaagcatttgccaagcggcagcagcagcttaccgccatgaaggtcctccagcggaactgcgctgcctacctgaagctgcggaactggcagtggtggcggctcttcaccaaggtcaagccgctgctgcaggtgagccggcaggaggaggagatgatggccaaggaggaggagctggtgaaggtcagagagaagcagctggctgcggagaacaggctcacggagatggagacgctgcagtctcagctcatggcagagaaattgcagctgcaggagcagctccaggcagaaaccgagctgtgtgccgaggctgaggagctccgggcccgcctgaccgccaagaagcaggaattagaagagatctgccatgacctagaggccagggtggaggaggaggaggagcgctgccagcacctgcaggcggagaagaagaagatgcagcagaacatccaggagcttgaggagcagctggaggaggaggagagcgcccggcagaagctgcagctggagaaggtgaccaccgaggcgaagctgaaaaagctggaggaggagcagatcatcctggaggaccagaactgcaagctggccaaggaaaagaaactgctggaagacagaatagctgagttcaccaccaacctcacagaagaggaggagaaatctaagagcctcgccaagctcaagaacaagcatgaggcaatgatcactgacttggaagagcgcctccgcagggaggagaagcagcgacaggagctggagaagacccgccggaagctggagggagactccacagacctcagcgaccagatcgccgagctccaggcccagatcgcggagctcaagatgcagctggccaagaaagaggaggagctccaggccgccctggccagagtggaagaggaagctgcccagaagaacatggccctcaagaagatccgggagctggaatctcagatctctgaactccaggaagacctggagtctgagcgtgcttccaggaataaagctgagaagcagaaacgggaccttggggaagagctagaggcgctgaaaacagagttggaggacacgctggattccacagctgcccagcaggagctcaggtcaaaacgtgagcaggaggtgaacatcctgaagaagaccctggaggaggaggccaagacccacgaggcccagatccaggagatgaggcagaagcactcacaggccgtggaggagctggcggagcagctggagcagacgaagcgggtgaaagcaaacctcgagaaggcaaagcagactctggagaacgagcggggggagctggccaacgaggtgaaggtgctgctgcagggcaaaggggactcggagcacaagcgcaagaaagtggaggcgcagctgcaggagctgcaggtcaagttcaacgagggagagcgcgtgcgcacagagctggccgacaaggtcaccaagctgcaggtggagctggacaacgtgaccgggcttctcagccagtccgacagcaagtccagcaagctcaccaaggacttctccgcgctggagtcccagctgcaggacactcaggagctgctgcaggaggagaaccggcagaagctgagcctgagcaccaagctcaagcaggtggaggacgagaagaattccttccgggagcagctggaggaggaggaggaggccaagcacaacctggagaagcagatcgccaccctccatgcccaggtggccgacatgaaaaagaagatggaggacagtgtggggtgcctggaaactgctgaggaggtgaagaggaagctccagaaggacctggagggcctgagccagcggcacgaggagaaggtggccgcctacgacaagctggagaagaccaagacgcggctgcagcaggagctggacgacctgctggtggacctggaccaccagcgccagagcgcgtgcaacctggagaagaagcagaagaagtttgaccagctcctggcggaggagaagaccatctctgccaagtatgcagaggagcgcgaccgggctgaggcggaggcccgagagaaggagaccaaggctctgtcgctggcccgggccctggaggaagccatggagcagaaggcggagctggagcggctcaacaagcagttccgcacggagatggaggaccttatgagctccaaggatgatgtgggcaagagtgtccacgagctggagaagtccaagcgggccctagagcagcaggtggaggagatgaagacgcagctggaagagctggaggacgagctgcaggccaccgaagatgccaagctgcggttggaggtcaacctgcaggccatgaaggcccagttcgagcgggacctgcagggccgggacgagcagagcgaggagaagaagaagcagctggtcagacaggtgcgggagatggaggcagagctggaggacgagaggaagcagcgctcgatggcagtggccgcccggaagaagctggagatggacctgaaggacctggaggcgcacatcgactcggccaacaagaaccgggacgaagccatcaaacagctgcggaagctgcaggcccagatgaaggactgcatgcgcgagctggatgacacccgcgcctctcgtgaggagatcctggcccaggccaaagagaacgagaagaagctgaagagcatggaggccgagatgatccagttgcaggaggaactggcagccgcggagcgtgccaagcgccaggcccagcaggagcgggatgagctggctgacgagatcgccaacagcagcggcaaaggagccctggcgttagaggagaagcggcgtctggaggcccgcatcgcccagctggaggaggagctggaggaggagcagggcaacacggagctgatcaacgaccggctgaagaaggccaacctgcagatcgaccagatcaacaccgacctgaacctggagcgcagccacgcccagaagaacgagaatgctcggcagcagctggaacgccagaacaaggagcttaaggtcaagctgcaggagatggagggcactgtcaagtccaagtacaaggcctccatcaccgccctcgaggccaagattgcacagctggaggagcagctggacaacgagaccaaggagcgccaggcagcctgcaaacaggtgcgtcggaccgagaagaagctgaaggatgtgctgctgcaggtggatgacgagcggaggaacgccgagcagtacaaggaccaggccgacaaggcatctacccgcctgaagcagctcaagcggcagctggaggaggccgaagaggaggcccagcgggccaacgcctcccgccggaaactgcagcgcgagctggaggacgccactgagacggccgatgccatgaaccgcgaagtcagctccctaaagaacaagctcaggcgcggggacctgccgtttgtcgtgccccgccgaatggcccggaaaggcgccggggatggctccgacgaagaggtagatggcaaagcggatggggctgaggccaaacctgccgaataagcctcttctcctgcagcctgagatggatggacagacagacaccacagcctccccttcccagaccccgcagcacgcctctccccaccttcttgggactgctgtgaacatgcctcctcctgccctccgccccgtccccccatcccgtttccctccaggtgttgttgagggcatttggcttcctctgctgcatccccttccagctccctcccctgctcagaatctgataccaaagagacagggcccgggcccaggcagagagcgaccagcaggctcctcagccctctcttgccaaaaagcacaagatgttgaggcgagcagggcaggcccccggggaggggccagagttttctatgaatctatttttcttcagactgaggccttttggtagtcggagcccccgcagtcgtcagcctccctgacgtctgccaccagcgcccccactcctcctcctttctttgctgtttgcaatcacacgtggtgacctcacacacctctgccccttgggcctcccactcccatggctctgggcggtccagaaggagcaggccctgggcctccacctctgtgcagggcacagaaggctggggtggggggaggagtggattcctccccaccctgtcccaggcagcgccactgtccgctgtctccctcctgattctaaaatgtctcaagtgcaatgccccctcccctcctttaccgaggacagcctgcctctgccacagcaaggctgtcggggtcaagctggaaaggccagcagccttccagtggcttctcccaacactcttggggaccaaatatatttaatggttaagggacttgtcccaagtctgacagccagagcgttagaggggccagcggccctcccaggcgatcttgtgtctactctaggactgggcccgagggtggtttacctgcaccgttgactcagtatagtttaaaaatctgccacctgcacaggtatttttgaaagcaaaataaggttttcttttttcccctttcttgtaataaatgataaaattccccttatnttgctttcaaaaatacctgtgcagtngac

SEQ ID NO: 314133 - DNA, 5253 bp, Homo sapiens
cccgatattcggtcagtgggtgatagcaaaacctcgggtacgccaagaccgtgaagaatgacgaactcctcccgcttcggcaaattcattcgcatcaactttgatgtcaatggctacattgttggagccaacattgagacttatcttttggagaaatctcgtgctatccgccaagccaaggaagaacggaccttccacatcttctattatctcctgtctggggctggagagcacctgaagaccgatctcctgttggagccgtacaacaaataccgcttcctgtccaatggacacgtcaccatccccgggcagcaggacaaggacatgttccaggagaccatggaggccatgaggattatgggcatcccagaagaggagcaaatgggcctgctgcgggtcatctcaggggttcttcagctcggcaacatcgtcttcaagaaggagcggaacactgaccaggcgtccatgcccgacaacacagctgcccaaaaggtgtcccatctcttgggtatcaatgtgaccgatttcaccagaggaatcctcaccccgcgcatcaaggtgggacgggattacgtccagaaggcgcagactaaagagcaggctgactttgccatcgaggccttggccaaggcgacctatgagcggatgttccgctggctggtgctgcgcatcaacaaggctctggacaagaccaagaggcagggcgcctccttcatcgggatcctggacattgccggcttcgagatctttgatctgaactcgtttgagcagctgtgcatcaattacaccaatgagaagctgcagcagctcttcaaccacaccatgttcatcctggagcaggaggagtaccagcgcgagggcatcgagtggaacttcatcgactttggcctcgacctgcagccctgcatcgacctcattgagaagccagcaggccccccgggcattctggccctgctggacgaggagtgctggttccccaaagccaccgacaagagcttcgtggagaaggtgatgcaggagcagggcacccaccccaagttccagaagcccaagcagctgaaggacaaagctgatttctgcattatccactatgccggcaaggtggattacaaagctgacgagtggctgatgaagaacatggatcccctgaatgacaacatcgccacactgctccaccagtcctctgacaagtttgtctcggagctgtggaaggatgtggaccgcatcatcggcctggaccaggtggccggcatgtcggagaccgcactgcccggggccttcaagacgcggaagggcatgttccgcactgtggggcagctttacaaggagcagctggccaagctgatggctacgctgaggaacacgaaccccaactttgtccgctgcatcatccccaaccacgagaagaaggccggcaagctggacccgcatctcgtgctggaccagctgcgctgcaacggtgttctcgagggcatccgtatctgccgccagggcttccccaacagggtggtcttccaggagtttcggcagagatatgagatcctgactccaaactccattcccaagggtttcatggacgggaagcaggcgtgcgtgctcatgataaaagccctggagctcgacagcaatctgtaccgcattggccagagcaaagtcttcttccgtgccggtgtgctggcccacctggaggaggagcgagacctgaagatcaccgacgtcatcatagggttccaggcctgctgcaggggctacctggccaggaaagcatttgccaagcggcagcagcagcttaccgccatgaaggtcctccagcggaactgcgctgcctacctgaagctgcggaactggcagtggtggcggctcttcaccaaggtcaagccgctgctgcaggtgagccggcaggaggaggagatgatggccaaggaggaggagctggtgaaggtcagagagaagcagctggctgcggagaacaggctcacggagatggagacgctgcagtctcagctcatggcagagaaattgcagctgcaggagcagctccaggcagaaaccgagctgtgtgccgaggctgaggagctccgggcccgcctgaccgccaagaagcaggaattagaagagatctgccatgacctagaggccagggtggaggaggaggaggagcgctgccagcacctgcaggcggagaagaagaagatgcagcagaacatccaggagcttgaggagcagctggaggaggaggagagcgcccggcagaagctgcagctggagaaggtgaccaccgaggcgaagctgaaaaagctggaggaggagcagatcatcctggaggaccagaactgcaagctggccaaggaaaagaaactgctggaagacagaatagctgagttcaccaccaacctcacagaagaggaggagaaatctaagagcctcgccaagctcaagaacaagcatgaggcaatgatcactgacttggaagagcgcctccgcagggaggagaagcagcgacaggagctggagaagacccgccggaagctggagggagactccacagacctcagcgaccagatcgccgagctccaggcccagatcgcggagctcaagatgcagctggccaagaaagaggaggagctccaggccgccctggccagagtggaagaggaagctgcccagaagaacatggccctcaagaagatccgggagctggaatctcagatctctgaactccaggaagacctggagtctgagcgtgcttccaggaataaagctgagaagcagaaacgggaccttggggaagagctagaggcgctgaaaacagagttggaggacacgctggattccacagctgcccagcaggagctcaggtcaaaacgtgagcaggaggtgaacatcctgaagaagaccctggaggaggaggccaagacccacgaggcccagatccaggagatgaggcagaagcactcacaggccgtggaggagctggcggagcagctggagcagacgaagcgggtgaaagcaaacctcgagaaggcaaagcagactctggagaacgagcggggggagctggccaacgaggtgaaggtgctgctgcagggcaaaggggactcggagcacaagcgcaagaaagtggaggcgcagctgcaggagctgcaggtcaagttcaacgagggagagcgcgtgcgcacagagctggccgacaaggtcaccaagctgcaggtggagctggacaacgtgaccgggcttctcagccagtccgacagcaagtccagcaagctcaccaaggacttctccgcgctggagtcccagctgcaggacactcaggagctgctgcaggaggagaaccggcagaagctgagcctgagcaccaagctcaagcaggtggaggacgagaagaattccttccgggagcagctggaggaggaggaggaggccaagcacaacctggagaagcagatcgccaccctccatgcccaggtggccgacatgaaaaagaagatggaggacagtgtggggtgcctggaaactgctgaggaggtgaagaggaagctccagaaggacctggagggcctgagccagcggcacgaggagaaggtggccgcctacgacaagctggagaagaccaagacgcggctgcagcaggagctggacgacctgctggtggacctggaccaccagcgccagagcgcgtgcaacctggagaagaagcagaagaagtttgaccagctcctggcggaggagaagaccatctctgccaagtatgcagaggagcgcgaccgggctgaggcggaggcccgagagaaggagaccaaggctctgtcgctggcccgggccctggaggaagccatggagcagaaggcggagctggagcggctcaacaagcagttccgcacggagatggaggaccttatgagctccaaggatgatgtgggcaagagtgtccacgagctggagaagtccaagcgggccctagagcagcaggtggaggagatgaagaccgccccgtccccccatcccgtttccctccaggtgttgttgagggcatttggcttcctctgctgcatccccttccagctccctcccctgctcagaatctgataccaaagagacagggcccgggcccaggcagagagcgaccagcaggctcctcagccctctcttgccaaaaagcacaagatgttgaggcgagcagggcaggcccccggggaggggccagagttttctatgaatctatttttcttcagactgaggccttttggtagtcggagcccccgcagtcgtcagcctccctgacgtctgccaccagcgcccccactcctcctcctttctttgctgtttgcaatcacacgtggtgacctcacacacctctgccccttgggcctcccactcccatggctctgggcggtccagaaggagcaggccctgggcctccacctctgtgcagggcacagaaggctggggtggggggaggagtggattcctccccaccctgtcccaggcagcgccactgtccgctgtctccctcctgattctaaaatgtctcaagtgcaatgccccctcccctcctttaccgaggacagcctgcctctgccacagcaaggctgtcggggtcaagctggaaaggccagcagccttccagtggcttctcccaacactcttggggaccaaatatatttaatggttaagggacttgtcccaagtctgacagccagagcgttagaggggccagcggccctcccaggcgatcttgtgtctactctaggactgggcccgagggtggtttacctgcaccgttgactcagtatagtttaaaaatctgccacctgcacaggtatttttgaaagcaaaataaggttttcttttttcccctttcttgtaataaatgataaaattccgagtctttctcactgcctttgtttagaagagagtagctcgtcctcactggtctacactggttgccgaatttacttgtattcctaactgttttgtatatgctgcattgagacttacggcaagaaggcattttttttttttaaaggaaacaaactctcaaatcatgaagtgatataaaagctgcatatgcctacaaagctctgaattcaggtcccagttgctgtcacaaaggagtgagtgaaactcccaccctacccccttttttatataataaaagtgccttagcatgtgttgcagctgtcaccactacagtaagctggtttacagatgttttccactgagcatcacaataaagagaaccatgtgcta

SEQ ID NO: 314134 - DNA, 2057 bp, Homo sapiens
ccacgcgtccggacttgtcccaagtctgacagccagagcgttagaggggccagcctgcagatcgaccagatcaacaccgacctgaacctggagcgcagccacgcccagaagaacgagaatgctcggcagcagctggaacgccagaacaaggagcttaaggtcaagctgcaggagatggagggcactgtcaagtccaagtacaaggcctccatcaccgccctcgaggccaagattgcacagctggaggagcagctggacaacgagaccaaggagcgccaggcagcctgcaaacaggtgcgtcggaccgagaagaagctgaaggatgtgctgctgcaggtggatgacgagcggaggaacgccgagcagtacaaggaccaggccgacaaggcatctacccgcctgaagcagctcaagcggcagctggaggaggccgaagaggaggcccagcgggccaacgcctcccgccggaaactgcagcgcgagctggaggacgccactgagacggccgatgccatgaaccgcgaagtcagctccctaaagaacaagctcaggcgcggggacctgccgtttgtcgtgccccgccgaatggcccggaaaggcgccggggatggctccgacgaagaggtagatggcaaagcggatggggctgaggccaaacctgccgaataagcctcttctcctgcagcctgagatggatggacagacagacaccacagcctccccttcccagaccccgcagcacgcctctccccaccttcttgggactgctgtgaacatgcctcctcctgccctccgccccgtccccccatcccgtttccctccaggtgttgttgagggcatttggcttcctctgctgcatccccttccagctccctcccctgctcagaatctgataccaaagagacagggcccgggcccaggcagagagcgaccagcaggctcctcagccctctcttgccaaaaagcacaagatgttgaggcgagcagggcaggcccccggggaggggccagagttttctatgaatctatttttcttcagactgaggccttttggtagtcggagcccccgcagtcgtcagcctccctgacgtctgccaccagcgcccccactcctcctcctttctttgctgtttgcaatcacacgtggtgacctcacacacctctgccccttgggcctcccactcccatggctctgggcggtccagaaggagcaggccctgggcctccacctctgtgcagggcacagaaggctggggtggggggaggagtggattcctccccaccctgtcccaggcagcgccactgtccgctgtctccctcctgattctaaaatgtctcaagtgcaatgccccctcccctcctttaccgaggacagcctgcctctgccacagcaaggctgtcggggtcaagctggaaaggccagcagccttccagtggcttctcccaacactcttggggaccaaatatatttaatggttaagggacttgtcccaagtctgacagccagagcgttagaggggccagcggccctcccaggcgatcttgtgtctactctaggactgggcccgagggtggtttacctgcaccgttgactcagtatagtttaaaaatctgccacctgcacaggtatttttgaaagcaaaataaggttttcttttttcccctttcttgtaataaatgataaaattccgagtctttctcactgcctttgtttagaagagagtagctcgtcctcactggtctacactggttgccgaatttacttgtattcctaactgttttgtatatgctgcattgagacttacggcaagaaggcattttttttttttaaaggaaacaaactctcaaatcatgaagtgatataaaagctgcatatgcctacaaagctctgaattcaggtcccagttgctgtcacaaaggagtgagtgaaactcccaccctacccccttttttatataataaaagtgccttagcatgtgttgcagctgtcaccactacagtaagctggtttacagatgttttccactgagcatcacaataaagagaaccatgtgcta

SEQ ID NO: 314135 - DNA, 1817 bp, Homo sapiens
tgggtattagaggatccctagaggcacaaggagcgccaggcagcctgcaaacaggtgcgtcggaccgagaagaagctgaaggatgtgctgctgcaggtggatgacgagcggaggaacgccgagcagtacaaggaccaggccgacaaggcatctacccgcctgaagcagctcaagcggcagctggaggaggccgaagaggaggcccagcgggccaacgcctcccgccggaaactgcagcgcgagctggaggacgccactgagacggccgatgccatgaaccgcgaagtcagctccctaaagaacaagctcaggcgcggggacctgccgtttgtcgtgccccgccgaatggcccggaaaggcgccggggatggctccgacgaagaggtagatggcaaagcggatggggctgaggccaaacctgccgaataagcctcttctcctgcagcctgagatggatggacagacagacaccacagcctccccttcccagaccccgcagcacgcctctccccaccttcttgggactgctgtgaacatgcctcctcctgccctccgccccgtccccccatcccgtttccctccaggtgttgttgagggcatttggcttcctctgctgcatccccttccagctccctcccctgctcagaatctgataccaaagagacagggcccgggcccaggcagagagcgaccagcaggctcctcagccctctcttgccaaaaagcacaagatgttgaggcgagcagggcaggcccccggggaggggccagagttttctatgaatctatttttcttcagactgaggccttttggtagtcggagcccccgcagtcgtcagcctccctgacgtctgccaccagcgcccccactcctcctcctttctttgctgtttgcaatcacacgtggtgacctcacacacctctgccccttgggcctcccactcccatggctctgggcggtccagaaggagcaggccctgggcctccacctctgtgcagggcacagaaggctggggtggggggaggagtggattcctccccaccctgtcccaggcagcgccactgtccgctgtctccctcctgattctaaaatgtctcaagtgcaatgccccctcccctcctttaccgaggacagcctgcctctgccacagcaaggctgtcggggtcaagctggaaaggccagcagccttccagtggcttctcccaacactcttggggaccaaatatatttaatggttaagggacttgtcccaagtctgacagccagagcgttagaggggccagcggccctcccaggcgatcttgtgtctactctaggactgggcccgagggtggtttacctgcaccgttgactcagtatagtttaaaaatctgccacctgcacaggtatttttgaaagcaaaataaggttttcttttttcccctttcttgtaataaatgataaaattccgagtctttctcactgcctttgtttagaagagagtagctcgtcctcactggtctacactggttgccgaatttacttgtattcctaactgttttgtatatgctgcattgagacttacggcaagaaggcattttttttttttaaaggaaacaaactctcaaatcatgaagtgatataaaagctgcatatgcctacaaagctctgaattcaggtcccagttgctgtcacaaaggagtgagtgaaactcccaccctacccccttttttatataataaaagtgccttagcatgtgttgcagctgtcaccactacagtaagctggtttacagatgttttccactgagcatcacaataaagagaaccatgtgcta

SEQ ID NO: 314136 - DNA, 5379 bp, Homo sapiens
cccgatattcggtcagtgggtgatagcaaaacctcgggtacgccaagaccgtgaagaatgacgaactcctcccgcttcggcaaattcattcgcatcaactttgatgtcaatggctacattgttggagccaacattgagacttatcttttggagaaatctcgtgctatccgccaagccaaggaagaacggaccttccacatcttctattatctcctgtctggggctggagagcacctgaagaccgatctcctgttggagccgtacaacaaataccgcttcctgtccaatggacacgtcaccatccccgggcagcaggacaaggacatgttccaggagaccatggaggccatgaggattatgggcatcccagaagaggagcaaatgggcctgctgcgggtcatctcaggggttcttcagctcggcaacatcgtcttcaagaaggagcggaacactgaccaggcgtccatgcccgacaacacagctgcccaaaaggtgtcccatctcttgggtatcaatgtgaccgatttcaccagaggaatcctcaccccgcgcatcaaggtgggacgggattacgtccagaaggcgcagactaaagagcaggctgactttgccatcgaggccttggccaaggcgacctatgagcggatgttccgctggctggtgctgcgcatcaacaaggctctggacaagaccaagaggcagggcgcctccttcatcgggatcctggacattgccggcttcgagatctttgatctgaactcgtttgagcagctgtgcatcaattacaccaatgagaagctgcagcagctcttcaaccacaccatgttcatcctggagcaggaggagtaccagcgcgagggcatcgagtggaacttcatcgactttggcctcgacctgcagccctgcatcgacctcattgagaagccagcaggccccccgggcattctggccctgctggacgaggagtgctggttccccaaagccaccgacaagagcttcgtggagaaggtgatgcaggagcagggcacccaccccaagttccagaagcccaagcagctgaaggacaaagctgatttctgcattatccactatgccggcaaggtggattacaaagctgacgagtggctgatgaagaacatggatcccctgaatgacaacatcgccacactgctccaccagtcctctgacaagtttgtctcggagctgtggaaggatgtggaccgcatcatcggcctggaccaggtggccggcatgtcggagaccgcactgcccggggccttcaagacgcggaagggcatgttccgcactgtggggcagctttacaaggagcagctggccaagctgatggctacgctgaggaacacgaaccccaactttgtccgctgcatcatccccaaccacgagaagaaggccggcaagctggacccgcatctcgtgctggaccagctgcgctgcaacggtgttctcgagggcatccgtatctgccgccagggcttccccaacagggtggtcttccaggagtttcggcagagatatgagatcctgactccaaactccattcccaagggtttcatggacgggaagcaggcgtgcgtgctcatgataaaagccctggagctcgacagcaatctgtaccgcattggccagagcaaagtcttcttccgtgccggtgtgctggcccacctggaggaggagcgagacctgaagatcaccgacgtcatcatagggttccaggcctgctgcaggggctacctggccaggaaagcatttgccaagcggcagcagcagcttaccgccatgaaggtcctccagcggaactgcgctgcctacctgaagctgcggaactggcagtggtggcggctcttcaccaaggtcaagccgctgctgcaggtgagccggcaggaggaggagatgatggccaaggaggaggagctggtgaaggtcagagagaagcagctggctgcggagaacaggctcacggagatggagacgctgcagtctcagctcatggcagagaaattgcagctgcaggagcagctccaggcagaaaccgagctgtgtgccgaggctgaggagctccgggcccgcctgaccgccaagaagcaggaattagaagagatctgccatgacctagaggccagggtggaggaggaggaggagcgctgccagcacctgcaggcggagaagaagaagatgcagcagaacatccaggagcttgaggagcagctggaggaggaggagagcgcccggcagaagctgcagctggagaaggtgaccaccgaggcgaagctgaaaaagctggaggaggagcagatcatcctggaggaccagaactgcaagctggccaaggaaaagaaactgctggaagacagaatagctgagttcaccaccaacctcacagaagaggaggagaaatctaagagcctcgccaagctcaagaacaagcatgaggcaatgatcactgacttggaagagcgcctccgcagggaggagaagcagcgacaggagctggagaagacccgccggaagctggagggagactccacagacctcagcgaccagatcgccgagctccaggcccagatcgcggagctcaagatgcagctggccaagaaagaggaggagctccaggccgccctggccagagtggaagaggaagctgcccagaagaacatggccctcaagaagatccgggagctggaatctcagatctctgaactccaggaagacctggagtctgagcgtgcttccaggaataaagctgagaagcagaaacgggaccttggggaagagctagaggcgctgaaaacagagttggaggacacgctggattccacagctgcccagcaggagctcaggtcaaaacgtgagcaggaggtgaacatcctgaagaagaccctggaggaggaggccaagacccacgaggcccagatccaggagatgaggcagaagcactcacaggccgtggaggagctggcggagcagctggagcagacgaagcgggtgaaagcaaacctcgagaaggcaaagcagactctggagaacgagcggggggagctggccaacgaggtgaaggtgctgctgcagggcaaaggggactcggagcacaagcgcaagaaagtggaggcgcagctgcaggagctgcaggtcaagttcaacgagggagagcgcgtgcgcacagagctggccgacaaggtcaccaagctgcaggtggagctggacaacgtgaccgggcttctcagccagtccgacagcaagtccagcaagctcaccaaggacttctccgcgctggagtcccagctgcaggacactcaggagctgctgcaggaggagaaccggcagaagctgagcctgagcaccaagctcaagcaggtggaggacgagaagaattccttccgggagcagctggaggaggaggaggaggccaagcacaacctggagaagcagatcgccaccctccatgcccaggtggccgacatgaaaaagaagatggaggacagtgtggggtgcctggaaactgctgaggaggtgaagaggaagctccagaaggacctggagggcctgagccagcggcacgaggagaaggtggccgcctacgacaagctggagaagaccaagacgcggctgcagcaggagctggacgacctgctggtggacctggaccaccagcgccagagcgcgtgcaacctggagaagaagcagaagaagtttgaccagctcctggcggaggagaagaccatctctgccaagtatgcagaggagcgcgaccgggctgaggcggaggcccgagagaaggagaccaaggctctgtcgctggcccgggccctggaggaagccatggagcagaaggcggagctggagcggctcaacaagcagttccgcacggagatggaggaccttatgagctccaaggatgatgtgggcaagagtgtccacgagctggagaagtccaagcgggccctagagcagcaggtggaggagatgaagacgcagctggaagagctggaggacgagctgcaggccaccgaagatgccaagctgcggttggaggtcaacctgcaggccatgaaggcccagttcgagcgggacctgcagggccgggacgagcagagcgaggagaagaagaagcagctggtcagacaggtgcgggagatggaggcagagctggaggacgagaggaagcagcgctcgatggcagtggccgcccggaagaagctggagatggacctgaaggacctggaggcgcacatcgactcggccaacaagaaccgggacgaagccatcaaacagctgcggaagctgcaggcccagatgaaggactgcatgcgcgagctggatgacacccgcgcctctcgtgaggagatcctggcccaggccaaagagaacgagaagaagctgaagagcatggaggccgagatgatccagttgcaggaggaactggcagccgcggagcgtgccaagcgccaggcccagcaggagcgggatgagctggctgacgagatcgccaacagcagcggcaaaggagccctggcgttagaggagaagcggcgtctggaggcccgcatcgcccagctggaggaggagctggaggaggagcagggcaacacggagctgatcaacgaccggctgaagaaggccaacctgcagatcgaccagatcaacaccgacctgaacctggagcgcagccacgcccagaagaacgagaatgctcggcagcagctggaacgccagaacaaggagcttaaggtcaagctgcaggagatggagggcactgtcaagtccaagtacaaggcctccatcaccgccctcgaggccaagattgcacagctggaggagcagctggacaacgagaccaaggagcgccaggcagcctgcaaacaggtgcgtcggaccgagaagaagctgaaggatgtgctgctgcaggtggatgacgagcggaggaacgccgagcagtacaaggaccaggccgacaaggcatctacccgcctgaagcagctcaagcggcagctggaggaggccgaagaggaggcccagcgggccaacgcctcccgccggaaactgcagcgcgagctggaggacgccactgagacggccgatgccatgaaccgcgaagtcagctccctaaagaacaagctcaggcgcggggacctgccgtttgtcgtgccccgccgaatggcccggaaaggcgccggggatggctccgacgaagaggtagatggcaaagcggatggggctgaggccaaacctgccgaataagcctcttctcctgcagcctgagatggatggacagacagacaccacagcctccccttcccagaccccgcagttttccgccgatgacaccgtgcgtctgtggtgtgtgtacctttgctccacggt

SEQ ID NO: 314137 - DNA, 4982 bp, Homo sapiens
cccgatattcggtcagtgggtgatagcaaaacctcgggtacgccaagaccgtgaagaatgacgaactcctcccgcttcggcaaattcattcgcatcaactttgatgtcaatggctacattgttggagccaacattgagacttatcttttggagaaatctcgtgctatccgccaagccaaggaagaacggaccttccacatcttctattatctcctgtctggggctggagagcacctgaagaccgatctcctgttggagccgtacaacaaataccgcttcctgtccaatggacacgtcaccatccccgggcagcaggacaaggacatgttccaggagaccatggaggccatgaggattatgggcatcccagaagaggagcaaatgggcctgctgcgggtcatctcaggggttcttcagctcggcaacatcgtcttcaagaaggagcggaacactgaccaggcgtccatgcccgacaacacagctgcccaaaaggtgtcccatctcttgggtatcaatgtgaccgatttcaccagaggaatcctcaccccgcgcatcaaggtgggacgggattacgtccagaaggcgcagactaaagagcaggctgactttgccatcgaggccttggccaaggcgacctatgagcggatgttccgctggctggtgctgcgcatcaacaaggctctggacaagaccaagaggcagggcgcctccttcatcgggatcctggacattgccggcttcgagatctttgatctgaactcgtttgagcagctgtgcatcaattacaccaatgagaagctgcagcagctcttcaaccacaccatgttcatcctggagcaggaggagtaccagcgcgagggcatcgagtggaacttcatcgactttggcctcgacctgcagccctgcatcgacctcattgagaagccagcaggccccccgggcattctggccctgctggacgaggagtgctggttccccaaagccaccgacaagagcttcgtggagaaggtgatgcaggagcagggcacccaccccaagttccagaagcccaagcagctgaaggacaaagctgatttctgcattatccactatgccggcaaggtggattacaaagctgacgagtggctgatgaagaacatggatcccctgaatgacaacatcgccacactgctccaccagtcctctgacaagtttgtctcggagctgtggaaggatgtggaccgcatcatcggcctggaccaggtggccggcatgtcggagaccgcactgcccggggccttcaagacgcggaagggcatgttccgcactgtggggcagctttacaaggagcagctggccaagctgatggctacgctgaggaacacgaaccccaactttgtccgctgcatcatccccaaccacgagaagaaggccggcaagctggacccgcatctcgtgctggaccagctgcgctgcaacggtgttctcgagggcatccgtatctgccgccagggcttccccaacagggtggtcttccaggagtttcggcagagatatgagatcctgactccaaactccattcccaagggtttcatggacgggaagcaggcgtgcgtgctcatgataaaagccctggagctcgacagcaatctgtaccgcattggccagagcaaagtcttcttccgtgccggtgtgctggcccacctggaggaggagcgagacctgaagatcaccgacgtcatcatagggttccaggcctgctgcaggggctacctggccaggaaagcatttgccaagcggcagcagcagcttaccgccatgaaggtcctccagcggaactgcgctgcctacctgaagctgcggaactggcagtggtggcggctcttcaccaaggtcaagccgctgctgcaggtgagccggcaggaggaggagatgatggccaaggaggaggagctggtgaaggtcagagagaagcagctggctgcggagaacaggctcacggagatggagacgctgcagtctcagctcatggcagagaaattgcagctgcaggagcagctccaggcagaaaccgagctgtgtgccgaggctgaggagctccgggcccgcctgaccgccaagaagcaggaattagaagagatctgccatgacctagaggccagggtggaggaggaggaggagcgctgccagcacctgcaggcggagaagaagaagatgcagcagaacatccaggagcttgaggagcagctggaggaggaggagagcgcccggcagaagctgcagctggagaaggtgaccaccgaggcgaagctgaaaaagctggaggaggagcagatcatcctggaggaccagaactgcaagctggccaaggaaaagaaactgctggaagacagaatagctgagttcaccaccaacctcacagaagaggaggagaaatctaagagcctcgccaagctcaagaacaagcatgaggcaatgatcactgacttggaagagcgcctccgcagggaggagaagcagcgacaggagctggagaagacccgccggaagctggagggagactccacagacctcagcgaccagatcgccgagctccaggcccagatcgcggagctcaagatgcagctggccaagaaagaggaggagctccaggccgccctggccagagtggaagaggaagctgcccagaagaacatggccctcaagaagatccgggagctggaatctcagatctctgaactccaggaagacctggagtctgagcgtgcttccaggaataaagctgagaagcagaaacgggaccttggggaagagctagaggcgctgaaaacagagttggaggacacgctggattccacagctgcccagcaggagctcaggtcaaaacgtgagcaggaggtgaacatcctgaagaagaccctggaggaggaggccaagacccacgaggcccagatccaggagatgaggcagaagcactcacaggccgtggaggagctggcggagcagctggagcagacgaagcgggtgaaagcaaacctcgagaaggcaaagcagactctggagaacgagcggggggagctggccaacgaggtgaaggtgctgctgcagggcaaaggggactcggagcacaagcgcaagaaagtggaggcgcagctgcaggagctgcaggtcaagttcaacgagggagagcgcgtgcgcacagagctggccgacaaggtcaccaagctgcaggtggagctggacaacgtgaccgggcttctcagccagtccgacagcaagtccagcaagctcaccaaggacttctccgcgctggagtcccagctgcaggacactcaggagctgctgcaggaggagaaccggcagaagctgagcctgagcaccaagctcaagcaggtggaggacgagaagaattccttccgggagcagctggaggaggaggaggaggccaagcacaacctggagaagcagatcgccaccctccatgcccaggtggccgacatgaaaaagaagatggaggacagtgtggggtgcctggaaactgctgaggaggtgaagaggaagctccagaaggacctggagggcctgagccagcggcacgaggagaaggtggccgcctacgacaagctggagaagaccaagacgcggctgcagcaggagctggacgacctgctggtggacctggaccaccagcgccagagcgcgtgcaacctggagaagaagcagaagaagtttgaccagctcctggcggaggagaagaccatctctgccaagtatgcagaggagcgcgaccgggctgaggcggaggcccgagagaaggagaccaaggctctgtcgctggcccgggccctggaggaagccatggagcagaaggcggagctggagcggctcaacaagcagttccgcacggagatggaggaccttatgagctccaaggatgatgtgggcaagagtgtccacgagctggagaagtccaagcgggccctagagcagcaggtggaggagatgaagacgcagctggaagagctggaggacgagctgcaggccaccgaagatgccaagctgcggttggaggtcaacctgcaggccatgaaggcccagttcgagcgggacctgcagggccgggacgagcagagcgaggagaagaagaagcagctggtcagacaggtgcgggagatggaggcagagctggaggacgagaggaagcagcgctcgatggcagtggccgcccggaagaagctggagatggacctgaaggacctggaggcgcacatcgactcggccaacaagaaccgggacgaagccatcaaacagctgcggaagctgcaggcccagatgaaggactgcatgcgcgagctggatgacacccgcgcctctcgtgaggagatcctggcccaggccaaagagaacgagaagaagctgaagagcatggaggccgagatgatccagttgcaggaggaactggcagccgcggagcgtgccaagcgccaggcccagcaggagcgggatgagctggctgacgagatcgccaacagcagcggcaaaggagccctggcgttagaggagaagcggcgtctggaggcccgcatcgcccagctggaggaggagctggaggaggagcagggcaacacggagctgatcaacgaccggctgaagaaggccaacctgcagatcgaccagatcaacaccgacctgaacctggagcgcagccacgcccagaagaacgagaatgctcggcagcagctggaacgccagaacaaggagcttaaggtcaagctgcaggagatggagggcactgtcaagtccaagtacaaggcctccatcaccgccctcgaggccaagattgcacagctggaggagcagctggacaacgagaccaaggagcgccaggcagcctgcaaacaggtgcgtcggaccgagaagaagctgaaggatgtgctgctgcaggtggatgacgagcggaggaacgccgagcagtacaaggaccaggtgtgggcgctggtggg

SEQ ID NO: 314138 - DNA, 3643 bp, Homo sapiens
cccgatattcggtcagtgggtgatagcaaaacctcgggtacgccaagaccgtgaagaatgacgaactcctcccgcttcggcaaattcattcgcatcaactttgatgtcaatggctacattgttggagccaacattgagacttatcttttggagaaatctcgtgctatccgccaagccaaggaagaacggaccttccacatcttctattatctcctgtctggggctggagagcacctgaagaccgatctcctgttggagccgtacaacaaataccgcttcctgtccaatggacacgtcaccatccccgggcagcaggacaaggacatgttccaggagaccatggaggccatgaggattatgggcatcccagaagaggagcaaatgggcctgctgcgggtcatctcaggggttcttcagctcggcaacatcgtcttcaagaaggagcggaacactgaccaggcgtccatgcccgacaacacagctgcccaaaaggtgtcccatctcttgggtatcaatgtgaccgatttcaccagaggaatcctcaccccgcgcatcaaggtgggacgggattacgtccagaaggcgcagactaaagagcaggctgactttgccatcgaggccttggccaaggcgacctatgagcggatgttccgctggctggtgctgcgcatcaacaaggctctggacaagaccaagaggcagggcgcctccttcatcgggatcctggacattgccggcttcgagatctttgatctgaactcgtttgagcagctgtgcatcaattacaccaatgagaagctgcagcagctcttcaaccacaccatgttcatcctggagcaggaggagtaccagcgcgagggcatcgagtggaacttcatcgactttggcctcgacctgcagccctgcatcgacctcattgagaagccagcaggccccccgggcattctggccctgctggacgaggagtgctggttccccaaagccaccgacaagagcttcgtggagaaggtgatgcaggagcagggcacccaccccaagttccagaagcccaagcagctgaaggacaaagctgatttctgcattatccactatgccggcaaggtggattacaaagctgacgagtggctgatgaagaacatggatcccctgaatgacaacatcgccacactgctccaccagtcctctgacaagtttgtctcggagctgtggaaggatgtggaccgcatcatcggcctggaccaggtggccggcatgtcggagaccgcactgcccggggccttcaagacgcggaagggcatgttccgcactgtggggcagctttacaaggagcagctggccaagctgatggctacgctgaggaacacgaaccccaactttgtccgctgcatcatccccaaccacgagaagaaggccggcaagctggacccgcatctcgtgctggaccagctgcgctgcaacggtgttctcgagggcatccgtatctgccgccagggcttccccaacagggtggtcttccaggagtttcggcagagatatgagatcctgactccaaactccattcccaagggtttcatggacgggaagcaggcgtgcgtgctcatgataaaagccctggagctcgacagcaatctgtaccgcattggccagagcaaagtcttcttccgtgccggtgtgctggcccacctggaggaggagcgagacctgaagatcaccgacgtcatcatagggttccaggcctgctgcaggggctacctggccaggaaagcatttgccaagcggcagcagcagcttaccgccatgaaggtcctccagcggaactgcgctgcctacctgaagctgcggaactggcagtggtggcggctcttcaccaaggtcaagccgctgctgcaggtgagccggcaggaggaggagatgatggccaaggaggaggagctggtgaaggtcagagagaagcagctggctgcggagaacaggctcacggagatggagacgctgcagtctcagctcatggcagagaaattgcagctgcaggagcagctccaggcagaaaccgagctgtgtgccgaggctgaggagctccgggcccgcctgaccgccaagaagcaggaattagaagagatctgccatgacctagaggccagggtggaggaggaggaggagcgctgccagcacctgcaggcggagaagaagaagatgcagcagaacatccaggagcttgaggagcagctggaggaggaggagagcgcccggcagaagctgcagctggagaaggtgaccaccgaggcgaagctgaaaaagctggaggaggagcagatcatcctggaggaccagaactgcaagctggccaaggaaaagaaactgctggaagacagaatagctgagttcaccaccaacctcacagaagaggaggagaaatctaagagcctcgccaagctcaagaacaagcatgaggcaatgatcactgacttggaagagcgcctccgcagggaggagaagcagcgacaggagctggagaagacccgccggaagctggagggagactccacagacctcagcgaccagatcgccgagctccaggcccagatcgcggagctcaagatgcagctggccaagaaagaggaggagctccaggccgccctggccagagtggaagaggaagctgcccagaagaacatggccctcaagaagatccgggagctggaatctcagatctctgaactccaggaagacctggagtctgagcgtgcttccaggaataaagctgagaagcagaaacgggaccttggggaagagctagaggcgctgaaaacagagttggaggacacgctggattccacagctgcccagcaggagctcaggtcaaaacgtgagcaggaggtgaacatcctgaagaagaccctggaggaggaggccaagacccacgaggcccagatccaggagatgaggcagaagcactcacagcctgcctctgccacagcaaggctgtcggggtcaagctggaaaggccagcagccttccagtggcttctcccaacactcttggggaccaaatatatttaatggttaagggacttgtcccaagtctgacagccagagcgttagaggggccagcggccctcccaggcgatcttgtgtctactctaggactgggcccgagggtggtttacctgcaccgttgactcagtatagtttaaaaatctgccacctgcacaggtatttttgaaagcaaaataaggttttcttttttcccctttcttgtaataaatgataaaattccgagtctttctcactgcctttgtttagaagagagtagctcgtcctcactggtctacactggttgccgaatttacttgtattcctaactgttttgtatatgctgcattgagacttacggcaagaaggcattttttttttttaaaggaaacaaactctcaaatcatgaagtgatataaaagctgcatatgcctacaaagctctgaattcaggtcccagttgctgtcacaaaggagtgagtgaaactcccaccctacccccttttttatataataaaagtgccttagcatgtgttgcagctgtcaccactacagtaagctggtttacagatgttttccactgagcatcacaataaagagaaccatgtgcta

SEQ ID NO: 314139 - DNA, 4248 bp, Homo sapiens
cccgatattcggtcagtgggtgatagcaaaacctcgggtacgccaagaccgtgaagaatgacgaactcctcccgcttcggcaaattcattcgcatcaactttgatgtcaatggctacattgttggagccaacattgagacttatcttttggagaaatctcgtgctatccgccaagccaaggaagaacggaccttccacatcttctattatctcctgtctggggctggagagcacctgaagaccgatctcctgttggagccgtacaacaaataccgcttcctgtccaatggacacgtcaccatccccgggcagcaggacaaggacatgttccaggagaccatggaggccatgaggattatgggcatcccagaagaggagcaaatgggcctgctgcgggtcatctcaggggttcttcagctcggcaacatcgtcttcaagaaggagcggaacactgaccaggcgtccatgcccgacaacacagctgcccaaaaggtgtcccatctcttgggtatcaatgtgaccgatttcaccagaggaatcctcaccccgcgcatcaaggtgggacgggattacgtccagaaggcgcagactaaagagcaggctgactttgccatcgaggccttggccaaggcgacctatgagcggatgttccgctggctggtgctgcgcatcaacaaggctctggacaagaccaagaggcagggcgcctccttcatcgggatcctggacattgccggcttcgagatctttgatctgaactcgtttgagcagctgtgcatcaattacaccaatgagaagctgcagcagctcttcaaccacaccatgttcatcctggagcaggaggagtaccagcgcgagggcatcgagtggaacttcatcgactttggcctcgacctgcagccctgcatcgacctcattgagaagccagcaggccccccgggcattctggccctgctggacgaggagtgctggttccccaaagccaccgacaagagcttcgtggagaaggtgatgcaggagcagggcacccaccccaagttccagaagcccaagcagctgaaggacaaagctgatttctgcattatccactatgccggcaaggtggattacaaagctgacgagtggctgatgaagaacatggatcccctgaatgacaacatcgccacactgctccaccagtcctctgacaagtttgtctcggagctgtggaaggatgtggaccgcatcatcggcctggaccaggtggccggcatgtcggagaccgcactgcccggggccttcaagacgcggaagggcatgttccgcactgtggggcagctttacaaggagcagctggccaagctgatggctacgctgaggaacacgaaccccaactttgtccgctgcatcatccccaaccacgagaagaaggccggcaagctggacccgcatctcgtgctggaccagctgcgctgcaacggtgttctcgagggcatccgtatctgccgccagggcttccccaacagggtggtcttccaggagtttcggcagagatatgagatcctgactccaaactccattcccaagggtttcatggacgggaagcaggcgtgcgtgctcatgataaaagccctggagctcgacagcaatctgtaccgcattggccagagcaaagtcttcttccgtgccggtgtgctggcccacctggaggaggagcgagacctgaagatcaccgacgtcatcatagggttccaggcctgctgcaggggctacctggccaggaaagcatttgccaagcggcagcagcagcttaccgccatgaaggtcctccagcggaactgcgctgcctacctgaagctgcggaactggcagtggtggcggctcttcaccaaggtcaagccgctgctgcaggtgagccggcaggaggaggagatgatggccaaggaggaggagctggtgaaggtcagagagaagcagctggctgcggagaacaggctcacggagatggagacgctgcagtctcagctcatggcagagaaattgcagctgcaggagcagctccaggcagaaaccgagctgtgtgccgaggctgaggagctccgggcccgcctgaccgccaagaagcaggaattagaagagatctgccatgacctagaggccagggtggaggaggaggaggagcgctgccagcacctgcaggcggagaagaagaagatgcagcagaacatccaggagcttgaggagcagctggaggaggaggagagcgcccggcagaagctgcagctggagaaggtgaccaccgaggcgaagctgaaaaagctggaggaggagcagatcatcctggaggaccagaactgcaagctggccaaggaaaagaaactgctggaagacagaatagctgagttcaccaccaacctcacagaagaggaggagaaatctaagagcctcgccaagctcaagaacaagcatgaggcaatgatcactgacttggaagagcgcctccgcagggaggagaagcagcgacaggagctggagaagacccgccggaagctggagggagactccacagacctcagcgaccagatcgccgagctccaggcccagatcgcggagctcaagatgcagctggccaagaaagaggaggagctccaggccgccctggccagagtggaagaggaagctgcccagaagaacatggccctcaagaagatccgggagctggaatctcagatctctgaactccaggaagacctggagtctgagcgtgcttccaggaataaagctgagaagcagaaacgggaccttggggaagagctagaggcgctgaaaacagagttggaggacacgctggattccacagctgcccagcaggagctcaggtcaaaacgtgagcaggaggtgaacatcctgaagaagaccctggaggaggaggccaagacccacgaggcccagatccaggagatgaggcagaagcactcacaggccgtggaggagctggcggagcagctggagcagacgaagcgggtgaaagcaaacctcgagaaggcaaagcagactctggagaacgagcggggggagctggccaacgaggtgaaggtgctgctgcagggcaaaggggactcggagcacaagcgcaagaaagtggaggcgcagctgcaggagctgcaggtcaagttcaacgagggagagcgcgtgcgcacagagctggccgacaaggtcaccaagctgcaggtggagctggacaacgtgaccgggcttctcagccagtccgacagcaagtccagcaagctcaccaaggacttctccgcgctggagtcccagctgcaggacactcaggagctgctgcaggaggagaaccggcagaagctgagcctgagcaccaagctcaagcaggtggaggacgagaagaattccttccgggagcagctggaggaggaggaggaggccaagcacaacctggagaagcagatcgccaccctccatgcccaggtggccgacatgaaaaagaagatggaggacagtgtggggtgcctggaaactgctgaggaggtgaagaggaagctccagaaggacctggagggcctgagccagcggcacgaggagaaggtggccgcctacgacaagctggagaagaccaagacgcggctgcagcaggagctggacgacctgctggtggacctggaccaccagcgccagagcgcgtgcaacctggagaagaagcagaagaagtttgaccagctcctggcggaggagaagaccatctctgccaagtatgcagaggagcgcgaccgggctgaggcggaggcccgagagaaggagaccaaggctctgtcgctggcccgggccctggaggaagccatggagcagaaggcggagctggagcggctcaacaagcagttccgcacggagatggaggaccttatgagctccaaggatgatgtgggcaagagtgtccacgagctggagaagtccaagcgggccctagagcagcaggtggaggagatgaagacgcagctggaagagctggaggacgagctgcaggccaccgaagatgccaagctgcggttggaggtcaacctgcaggccatgaaggcccagttcgagcgggacctgcagggccgggatgaaagcaaacctcgagaaggcaaagcagactctggagaacgagcggggggagctggccaacgaggtgaaggtgctgctgcagggcaaaggggactcggagcacagcacaataaagtggaggccgggatcctctagatcacctgc

SEQ ID NO: 314140 - DNA, 1232 bp, Homo sapiens
cccgatattcggtcagtgggtgatagcaaaacctcgggtacgccaagaccgtgaagaatgacgaactcctcccgcttcggcaaattcattcgcatcaactttgatgtcaatggctacattgttggagccaacattgagacttatcttttggagaaatctcgtgctatccgccaagccaaggaagaacggaccttccacatcttctattatctcctgtctggggctggagagcacctgaagaccgatctcctgttggagccgtacaacaaataccgcttcctgtccaatggacacgtcaccatccccgggcagcaggacaaggacatgttccaggagaccatggaggccatgaggattatgggcatcccagaagaggagcaaatgggcctgctgcgggtcatctcaggggttcttcagctcggcaacatcgtcttcaagaaggatggattcctccccaccctgtcccaggcagcgccactgtccgctgtctccctcctgattctaaaatgtctcaagtgcaatgccccctcccctcctttaccgaggacagcctgcctctgccacagcaaggctgtcggggtcaagctggaaaggccagcagccttccagtggcttctcccaacactcttggggaccaaatatatttaatggttaagggacttgtcccaagtctgacagccagagcgttagaggggccagcggccctcccaggcgatcttgtgtctactctaggactgggcccgagggtggtttacctgcaccgttgactcagtatagtttaaaaatctgccacctgcacaggtatttttgaaagcaaaataaggttttcttttttcccctttcttgtaataaatgataaaattccgagtctttctcactgcctttgtttagaagagagtagctcgtcctcactggtctacactggttgccgaatttacttgtattcctaactgttttgtatatgctgcattgagacttacggcaagaaggcattttttttttttaaaggaaacaaactctcaaatcatgaagtgatataaaagctgcatatgcctacaaagctctgaattcaggtcccagttgctgtcacaaaggagtgagtgaaactcccaccctacccccttttttatataataaaagtgccttagcatgtgttgcagctgtcaccactacagtaagctggtttacagatgttttccactgagcatcacaataaagagaaccatgtgcta

SEQ ID NO: 314141 - DNA, 3640 bp, Homo sapiens
cccgatattcggtcagtgggtgatagcaaaacctcgggtacgccaagaccgtgaagaatgacgaactcctcccgcttcggcaaattcattcgcatcaactttgatgtcaatggctacattgttggagccaacattgagacttatcttttggagaaatctcgtgctatccgccaagccaaggaagaacggaccttccacatcttctattatctcctgtctggggctggagagcacctgaagaccgatctcctgttggagccgtacaacaaataccgcttcctgtccaatggacacgtcaccatccccgggcagcaggacaaggacatgttccaggagaccatggaggccatgaggattatgggcatcccagaagaggagcaaatgggcctgctgcgggtcatctcaggggttcttcagctcggcaacatcgtcttcaagaaggagcggaacactgaccaggcgtccatgcccgacaacacagctgcccaaaaggtgtcccatctcttgggtatcaatgtgaccgatttcaccagaggaatcctcaccccgcgcatcaaggtgggacgggattacgtccagaaggcgcagactaaagagcaggctgactttgccatcgaggccttggccaaggcgacctatgagcggatgttccgctggctggtgctgcgcatcaacaaggctctggacaagaccaagaggcagggcgcctccttcatcgggatcctggacattgccggcttcgagatctttgatctgaactcgtttgagcagctgtgcatcaattacaccaatgagaagctgcagcagctcttcaaccacaccatgttcatcctggagcaggaggagtaccagcgcgagggcatcgagtggaacttcatcgactttggcctcgacctgcagccctgcatcgacctcattgagaagccagcaggccccccgggcattctggccctgctggacgaggagtgctggttccccaaagccaccgacaagagcttcgtggagaaggtgatgcaggagcagggcacccaccccaagttccagaagcccaagcagctgaaggacaaagctgatttctgcattatccactatgccggcaaggtggattacaaagctgacgagtggctgatgaagaacatggatcccctgaatgacaacatcgccacactgctccaccagtcctctgacaagtttgtctcggagctgtggaaggatgtggaccgcatcatcggcctggaccaggtggccggcatgtcggagaccgcactgcccggggccttcaagacgcggaagggcatgttccgcactgtggggcagctttacaaggagcagctggccaagctgatggctacgctgaggaacacgaaccccaactttgtccgctgcatcatccccaaccacgagaagaaggccggcaagctggacccgcatctcgtgctggaccagctgcgctgcaacggtgttctcgagggcatccgtatctgccgccagggcttccccaacagggtggtcttccaggagtttcggcagagatatgagatcctgactccaaactccattcccaagggtttcatggacgggaagcaggcgtgcgtgctcatgataaaagccctggagctcgacagcaatctgtaccgcattggccagagcaaagtcttcttccgtgccggtgtgctggcccacctggaggaggagcgagacctgaagatcaccgacgtcatcatagggttccaggcctgctgcaggggctacctggccaggaaagcatttgccaagcggcagcagcagcttaccgccatgaaggtcctccagcggaactgcgctgcctacctgaagctgcggaactggcagtggtggcggctcttcaccaaggtcaagccgctgctgcaggtgagccggcaggaggaggagatgatggccaaggaggaggagctggtgaaggtcagagagaagcagctggctgcggagaacaggctcacggagatggagacgctgcagtctcagctcatggcagagaaattgcagctgcaggagcagctccaggcagaaaccgagctgtgtgccgaggctgaggagctccgggcccgcctgaccgccaagaagcaggaattagaagagatctgccatgacctagaggccagggtggaggaggaggaggagcgctgccagcacctgcaggcggagaagaagaagatgcagcagaacatccaggagcttgaggagcagctggaggaggaggagagcgcccggcagaagctgcagctggagaaggtgaccaccgaggcgaagctgaaaaagctggaggaggagcagatcatcctggaggaccagaactgcaagctggccaaggaaaagaaactgctggaagacagaatagctgagttcaccaccaacctcacagaagaggaggagaaatctaagagcctcgccaagctcaagaacaagcatgaggcaatgatcactgacttggaagagcgcctccgcagggaggagaagcagcgacaggagctggagaagacccgccggaagctggagggagactccacagacctcagcgaccagatcgccgagctccaggcccagatcgcggagctcaagatgcagctggccaagaaagaggaggagctccaggccgccctggccagagtggaagaggaagctgcccagaagaacatggccctcaagaagatccgggagctggaatctcagatctctgaactccaggaagacctggagtctgagcgtgcttccaggaataaagctgagaagcagaaacgggaccttggggaagagctagaggcgctgaaaacagagttggaggacacgctggattccacagctgcccagcaggagctcaggtcaaaacgtgagcaggaggtgaacatcctgaagaagaccctggaggaggaggccaagacccacgaggcccagatccaggagatgaggcagaagcactcacaggccgtggaggagctggcggagcagctggagcagacgaagcgggtgaaagcaaacctcgagaaggcaaagcagactctggagaacgagcggggggagctggccaacgaggtgaaggtgctgctgcagggcaaaggggactcggagcacaagcgcaagaaagtggaggcgcagctgcaggagctgcaggtcaagttcaacgagggagagcgcgtgcgcacagagctggccgacaaggtcaccaagctgcaggtggagctggacaacgtgaccgggcttctcagccagtccgacagcaagtccagcaagctcaccaaggacttctccgcgctggagtcccagctgcaggacactcaggagctgctgcaggaggagaaccggcagaagctgagcctgagcaccaagctcaagcaggtggaggacgagaagaattccttccgggagcagctggaggaggaggaggaggccaagcacaacctggagaagcagatcgccaccctccatgcccaggtttggaggcctgggggaccggccggactctgcaggctggggagctgctggccgggcactggcctgggcactgcaggacagccctgcccgctgggccggcccattgctgctctccccctgggaagccaaccgtgctctcccacatcagtgctctcaaggaaaggaatccagg

SEQ ID NO: 314142 - DNA, 2361 bp, Homo sapiens
cccgatattcggtcagtgggtgatagcaaaacctcgggtacgccaagaccgtgaagaatgacgaactcctcccgcttcggcaaattcattcgcatcaactttgatgtcaatggctacattgttggagccaacattgagacttatcttttggagaaatctcgtgctatccgccaagccaaggaagaacggaccttccacatcttctattatctcctgtctggggctggagagcacctgaagaccgatctcctgttggagccgtacaacaaataccgcttcctgtccaatggacacgtcaccatccccgggcagcaggacaaggacatgttccaggagaccatggaggccatgaggattatgggcatcccagaagaggagcaaatgggcctgctgcgggtcatctcaggggttcttcagctcggcaacatcgtcttcaagaaggagcggaacactgaccaggcgtccatgcccgacaacacagctgcccaaaaggtgtcccatctcttgggtatcaatgtgaccgatttcaccagaggaatcctcaccccgcgcatcaaggtgggacgggattacgtccagaaggcgcagactaaagagcaggctgactttgccatcgaggccttggccaaggcgacctatgagcggatgttccgctggctggtgctgcgcatcaacaaggctctggacaagaccaagaggcagggcgcctccttcatcgggatcctggacattgccggcttcgagatctttgatctgaactcgtttgagcagctgtgcatcaattacaccaatgagaagctgcagcagctcttcaaccacaccatgttcatcctggagcaggaggagtaccagcgcgagggcatcgagtggaacttcatcgactttggcctcgacctgcagccctgcatcgacctcattgagaagccagcaggccccccgggcattctggccctgctggacgaggagtgctggttccccaaagccaccgacaagagcttcgtggagaaggtgatgcaggagcagggcacccaccccaagttccagaagcccaagcagctgaaggacaaagctgatttctgcattatccactatgccggcaaggtggattacaaagctgacgagtggctgatgaagaacatggatcccctgaatgacaacatcgccacactgctccaccagtcctctgacaagtttgtctcggagctgtggaaggatgtggaccgcatcatcggcctggaccaggtggccggcatgtcggagaccgcactgcccggggccttcaagacgcggaagggcatgttccgcactgtggggcagctttacaaggagcagctggccaagctgatggctacgctgaggaacacgaaccccaactttgtccgctgcatcatccccaaccacgagaagaaggccggcaagctggacccgcatctcgtgctggaccagctgcgctgcaacggtgttctcgagggcatccgtatctgccgccagggcttccccaacagggtggtcttccaggagtttcggcagagatatgagatcctgactccaaactccattcccaagggtttcatggacgggaagcaggcgtgcgtgctcatgataaaagccctggagctcgacagcaatctgtaccgcattggccagagcaaagtcttcttccgtgccggtgtgctggcccacctggaggaggagcgagacctgaagatcaccgacgtcatcatagggttccaggcctgctgcaggggctacctggccaggaaagcatttgccaagcggcagcagcagcttaccgccatgaaggtcctccagcggaactgcgctgcctacctgaagctgcggaactggcagtggtggcggctcttcaccaaggtcaagccgctgctgcaggtgagccggcaggaggaggagatgatggccaaggaggaggagctggtgaaggtcagagagaagcagctggctgcggagaacaggctcacggagatggagacgctgcagtctcagctcatggcagagaaattgcagctgcaggagcagctccaggcagaaaccgagctgtgtgccgaggctgaggagctccgggcccgcctgaccgccaagaagcaggaattagaagagatctgccatgacctagaggccagggtggaggaggaggaggagcgctgccagcacctgcaggcaaacttctgcaagcacaaaggaaaacgaattaggcctagcaagagcatgaacgcatttatcaccccttccgctaacaatacatacaacacagctggcacccccttgtggacaaatccattatgactttcccaaaatctcactgaaagcctactttcttaaacgccttcacttagtttcttt

SEQ ID NO: 314143 - DNA, 1838 bp, Homo sapiens
cccgatattcggtcagtgggtgatagcaaaacctcgggtacgccaagaccgtgaagaatgacgaactcctcccgcttcggcaaattcattcgcatcaactttgatgtcaatggctacattgttggagccaacattgagacttatcttttggagaaatctcgtgctatccgccaagccaaggaagaacggaccttccacatcttctattatctcctgtctggggctggagagcacctgaagaccgatctcctgttggagccgtacaacaaataccgcttcctgtccaatggacacgtcaccatccccgggcagcaggacaaggacatgttccaggagaccatggaggccatgaggattatgggcatcccagaagaggagcaaatgggcctgctgcgggtcatctcaggggttcttcagctcggcaacatcgtcttcaagaaggagcggaacactgaccaggcgtccatgcccgacaacacagctgcccaaaaggtgtcccatctcttgggtatcaatgtgaccgatttcaccagaggaatcctcaccccgcgcatcaaggtgggacgggattacgtccagaaggcgcagactaaagagcaggctgactttgccatcgaggccttggccaaggcgacctatgagcggatgttccgctggctggtgctgcgcatcaacaaggctctggacaagaccaagaggcagggcgcctccttcatcgggatcctggacattgccggcttcgagatctttgatctgaactcgtttgagcagctgtgcatcaattacaccaatgagaagctgcagcagctcttcaaccacaccatgttcatcctggagcaggaggagtaccagcgcgagggcatcgagtggaacttcatcgactttggcctcgacctgcagccctgcatcgacctcattgagaagccagcaggccccccgggcattctggccctgctggacgaggagtgctggttccccaaagccaccgacaagagcttcgtggagaaggtgatgcaggagcagggcacccaccccaagttccagaagcccaagcagctgaaggacaaagctgatttctgcattatccactatgccggcaaggtggattacaaagctgacgagtggctgatgaagaacatggatcccctgaatgacaacatcgccacactgctccaccagtcctctgacaagtttgtctcggagctgtggaaggatgtggaccgcatcatcggcctggaccaggtggccggcatgtcggagaccgcactgcccggggccttcaagacgcggaagggcatgttccgcactgtggggcagctttacaaggagcagctggccaagctgatggctacgctgaggaacacgaaccccaactttgtccgctgcatcatccccaaccacgagaagaaggccggcaagctggacccgcatctcgtgctggaccagctgcgctgcaacggtgttctcgagggcatccgtatctgccgccagggcttccccaacagggtggtcttccaggagtttcggcagagatatgagatcctgactccaaactccattcccaagggtttcatggacgggaagcaggcgtgcgtgctcatgataaaagccctggagctcgacagcaatctgtaccgcattggccagagcaaagtcttcttccgtgccggtgtgctggcccacctgcagcagcggcttgaccttggtgaagagccgccaccactgccagttccgcagcttcaggtaggcagcgcagttccgctggaggaccttcatggcggtaagctgctgctgccgctgggcaaatgctttcctggccaggtagccccggcagcagg

SEQ ID NO: 314144 - DNA, 1182 bp, Homo sapiens
  misc_feature (1119)..(1119): n is a, c, g, or t
cccgatattcggtcagtgggtgatagcaaaacctcgggtacgccaagaccgtgaagaatgacgaactcctcccgcttcggcaaattcattcgcatcaactttgatgtcaatggctacattgttggagccaacattgagacttatcttttggagaaatctcgtgctatccgccaagccaaggaagaacggaccttccacatcttctattatctcctgtctggggctggagagcacctgaagaccgatctcctgttggagccgtacaacaaataccgcttcctgtccaatggacacgtcaccatccccgggcagcaggacaaggacatgttccaggagaccatggaggccatgaggattatgggcatcccagaagaggagcaaatgggcctgctgcgggtcatctcaggggttcttcagctcggcaacatcgtcttcaagaaggagcggaacactgaccaggcgtccatgcccgacaacacagctgcccaaaaggtgtcccatctcttgggtatcaatgtgaccgatttcaccagaggaatcctcaccccgcgcatcaaggtgggacgggattacgtccagaaggcgcagactaaagagcaggctgactttgccatcgaggccttggccaaggcgacctatgagcggatgttccgctggctggtgctgcgcatcaacaaggctctggacaagaccaagaggcagggcgcctccttcatcgggatcctggacattgccggcttcgagatctttgatctgaactcgtttgagcagctgtgcatcaattacaccaatgagaagctgcagcagctcttcaaccacaccatgttcatcctggagcaggaggagtaccagcgcgagggcatcgagtggaacttcatcgactttggcctcgacctgcagccctgcatcgacctcattgagaagccagcaggccccccggcattcctcattacagaaatcttctattgaatgggaaaggtttaaatgctaaccaaagcaatttatttttaattaatatttttagactctgtgctgtcatactggactcactgctagctaagagacctatcagagatttagatattttctccaggtttcttgtgggttttctttgttgtngttgttgttctagccatgtgacagaggctctttctaaaagtatgtagttcgctgtgtattccg

SEQ ID NO: 314145 - DNA, 679 bp, Homo sapiens
cccgatattcggtcagtgggtgatagcaaaacctcgggtacgccaagaccgtgaagaatgacgaactcctcccgcttcggcaaattcattcgcatcaactttgatgtcaatggctacattgttggagccaacattgagacttatcttttggagaaatctcgtgctatccgccaagccaaggaagaacggaccttccacatcttctattatctcctgtctggggctggagagcacctgaagaccgatctcctgttggagccgtacaacaaataccgcttcctgtccaatggacacgtcaccatccccgggcagcaggacaaggacatgttccaggagaccatggaggccatgaggattatgggcatcccagaagaggagcaaatgggcctgctgcgggtcatctcaggggttcttcagctcggcaacatcgtcttcaagaaggagcggaacactgaccaggcgtccatgcccgacaacacaggtaacacccggggcctctcgctggaaataatggggcaggtgcttggccatggatttgctcaggagggaaggtcttgcggaaattccggacactattctttttaatgttagtatctgtcggtattttctatacagatgtaaaacacacgtaaacatgaccctgcttttttttctcaccaagtaagcatttcagaataac

SEQ ID NO: 314146 - DNA, 411 bp, Homo sapiens
cgccaggaccctggtgcgggcagtgggccctagcagcagttgtggcccaggtccccaggtgcatgtgtgctctctgtctctctctcttctcaaactggctcgtcagaccctcatggttcagcttgtgactcaggtccagctttacctaaaggagatgaggtggggcaggagcagtgggggtgggtccatggtcctttgtgtctccccgcccggtgcaggtggagctggacaacgtgaccgggcttctcagccagtccgacagcaagtccagcaagctcaccaaggacttctccgcgctggagtcccagctgcaggacactcaggtaggggtggcgccaggttcccagaaggtggacccctccagaaaggcctctgtgtccacgcaacattagcttcagagcccatcggatt

SEQ ID NO: 314147 - DNA, 778 bp, Homo sapiens
agctcctggactttttaaaattcctggaattgtgtctctctatcatggggctggtactattaccatacgtttcagaaaacagcatctgtttacaaagcgttttattatacaacacagaaatacatttcaccccaaatgataacagtgaacttcagcccccagaatctccttctccccttcgtgaaacagagctgggatgatggcagaggactccagaacgcactgagattgttccttggcgtgacaaatggcaaaggactctagaacgcacagagattgttccttggtgtgacgggccagacagcacacctttcttcaagccattctcacatcaaataaaacgttgataaatcattgtttctctaagcttgaaaaatgctactaactcaagacaaggtgaaagtgagtttgttgaaatcaacgtgaaggatcgagggtaccaacttggaatgtaaaaccatagaaaataccatctgggaacacggaaatcatctgtcttatctggaagcctgtctccagagtggcaaacttagggactggtttgaggacagagtgtgccctgtgtgctggggaggggtgtaaaggactgggatggaggagggggggctccagatgttcttttacccataaatacactgtacatcaccgtctgccactgaagcttaaggattgaaaaccttggggatgtttcactggttttgcttccgcctctgcaatgtttgaacttgcattttctgagccacgtatgcaactaaaagccttacatgcattacccacc

SEQ ID NO: 314148 - DNA, 3267 bp, Homo sapiens
ttagtagagtactgaaacattccaaaatgtattctttaagatagaattgtatttggaatacaccagttgtatacttgtattagtttgttttcatgctgttgataaagacatacctgagactgggtaatttataaaggaaagaggcttcattgactcatagttccacatggctgaagaggcctcacagtcatggtggaagatgaaggaagagcaacgggacatcttacatggtggccagcaaagagagagcttgtgtagggaaacttccctttataaaaccatcagatctcgtgagacttattcactatcacaagaatagcacaagaaagacccaccctcatgattcagttacctcccaccaggtccctcccatgacatgtgggaatcatgggagctttgattcaagatttgggaggggacatagccaaaccgtatgaatactttcatctggttcatggaaactgtaattatagctgcatgctctggagacaaaatgcctgggttcaaattttcatgtgtctagttcttagctgtgtgaccttacccatcagatttcccctaatctctaatcagcacctgtaaactagaaataataccagtaataacctcatagggattttagaaataccaaatgggagaatccataaaaagtgtttagctcaatacctggcccagaataagcattcataatgtattctagtaattgtagaatagcagcaggaggagtaaaagaataaagcaagatgtcaggcagaaataaactactctcgaatcctttctttaaaataagagtgttcatgttgtggagatcgggtttttcactgtggttctcaaaccctgtgtgccagggtccctgtagggcttggagcccactctcacagtgtctcattcagtaggtctaggctggggccagaggatttgcatttcttacaggttcccaggtgatgctcatgctgcacatctcaccacactctgaaaaccactggcctcaagtatttatttaaattgtgcaccaaaaatatcactgattgatatgaaaataacagtaataattgcttgacatttataaagtctccatctttcaagaagccagagacctctaataaatgtaaccttaaaatacatgatttgtcttcaattgggatggggaaatgggggaggcataggtctctgcccagcacccatttaagggactgatctgaagtcaagcatcaagttccaatgaaactctagggttaggatcaggtatcctggagccacacctaacactttctcccccagaaagtggtctctcccccatttctataaagtcatccattcatagactggtcatacaggtcactgaagatctgctgatcgaccctaatgatgttccacacgttttccttacacacacacacccaggcattcagtttttaaatgccctgaaaacagtcataaaatacatttgaaagtgacaaattcccttttcttagctgcctctcagcagcagaaagatatctcaaactgatgtttcagtaaaatatgtgcgcattaaaaactgatttttttattgaaaatgacgacaacagcagagtttaaggatacaaatccttgccatgagccaccacagaaaggcatatactcaacctttatttatacgtacaaaaaacttctgccacagacttctatacataacctttatgatgtgtaatgtatatgaaatagtaattaaaccacccatctttgctgccttttatacttttctagtgttctccaaaaagcaatacaaattatacatttttgttcttgcatagtatatcattctatcattttgagatttaacattttaacactatcaccattaagtatgaccctgtgaaatttcatctaacaccaaagaagacaatagcataaactgtcctggttctgttgattttgtacatgtcttcaggttttatatgtgtgttattaagacattttgtactgtagatttactgactctcaattctggtattgactagagccaaactccctatagtacttgggagcatggttctattcagttctcaccccagttttcatggttttctgtttgttctgttctgccatctgatctagagtcgcctggcactgccagtgttccgcttagagttcagaactcttggcgacgatcccagtttttctcccagtcaggtaaactgcatactgggtagctgtatttcttttgtgcgaaaatccatgttggggcgatcaatgatgtgtggcacttgtcttcatttctgatttctggggaaaaaattatttcttatgcacagttagcaaagagctagttcttttatattactaccagttatgctaaaattgggggtaggaggagaggaatcacacaactttatgttgatttcaagaattcaaagaaataataatattcatcattttcttgagagtcccctgcctttaaaaaaaaaaaaaaagattaaaagcatttaccagaaactgatcatagttctcttgttaactgtgtcactgtgtttgcttcctgggtgacatctggcctctgtttgtatggtacttctccatgccagacagtgaggggactgctcagtcaagccacaatgcaaggtgcactaagaatcagtactaataggaacagtttttgcttcctgtagtctagtacctggtgttaattgatgtgatcaatcatttgatagtagtttaaacttcttttggtgatgggtgcaacctgctacaggggttgtctgctttattatgattttctaatgttcttgacttaccaaacacacacacacacacacacacacacacacacacacacacacaaaattggtttaaagctgatgtaggaactatactccactgataggtcaaaaacaaagacaattagaaaatactcacattcatatcttttttttctttcttttttttctgtgcagtggattctccaagcagtgagaagtcacctgttatgacacctgtaagtcactcattttaaggaataagattatgagttagtgtgattttaatttataacatttgattggctcaaagagtattcaggccgggtgcaggcggtggctcacgcctgtaatcccaacactttgggagggtgaggcgggtggatcacgaggtcaggtgttcaagatcaggctgactaacatggtgaaacactgtctcttactaaaaatacaaaaattaggcaggtgtggtggcaccgagatcgtgtcactgcactccagtctgggtgacagagcgagacttcgtctc

SEQ ID NO: 314149 - DNA, 5410 bp, Homo sapiens
cgctctcggcagacgccttcaccagatgtagtcctcaggggaagcagcgatgggagaggaagcgactctgaatccgacttgcctcatcggaagctgccagatgtgaagaaggatgacatgtctgcacggcggacttcccatggtgagccgaaatcagcagtgccttttaaccagtacctcccgaacaaaagcaatcagacggcctacgtccccgcgcctctgagaaagaagaaagcagagagagaggaataccgcaagagctggagtaccgccacctccccgctgggtggggagaggcccttcagatacggtccgagaactcctgtgtctgatgacgcagagagcaccagcatgtttgacatgcggtgtgaggaggaggccgcggtgcagccgcacagcagggcccgccaggagcagctgcagctgataaataaccagctgagggaagaggacgacaaatggcaagatgacctggctcgttggaagagtcgtagaagaagtgtttctcaggacttaatcaagaaagaggaagaaaggaaaaaaatggagaagttactggctggagaagatgggacaagtgaacgaaggaaaagcatcaaaacctacagagaaattgttcaagaaaaagagcggagagagagagagctgcatgaagcatataagaacgctcggtcccaggaggaggcagaggggatccttcaacagtacattgagaggttcaccatcagtgaggctgttctcgaacgcttggagatgccaaaaattctggaaagaagccattcaacagagccaaatttatcctccttcctgaatgaccccaatcccatgaaatacctgcggcaacagtcactgcctccacccaaattcactgccactgttgaaaccaccattgctcgtgccagtgttctggataccagcatgtcagcaggcagtgggtctccaagcaaaactgtcactcccaaagcagtgcctatgctgacacccaagccttactcccagcccaaaaattctcaagatgttctgaagacctttaaggtagacgggaaagtcagtgtgaatggagagacggttcatagagaggaggagaaggaaagagagtgtcccacggtggcacctgcccactccttaaccaaatcccagatgtttgaaggtgtggccagagtgcacgggtctccactggagctgaaacaagacaacggtagcatcgagatcaacataaagaagccaaactctgttccccaagagctcgcagcaaccactgagaaaacggaaccgaatagtcaagaggacaagaatgatggtggaaaatcaagaaaagggaatatagaacttgcctcatcagaaccacagcattttacaacaactgtgactcgatgcagcccgaccgtggcctttgtggaatttccctccagcccccagctgaagaatgatgtgtcggaagaaaaagaccagaagaaaccagaaaatgaaatgagtggaaaggtggagttggtgctgtcacaaaaggtggtaaagccaaaatctccagaacccgaagcaacgctgacatttccatttctggacaaaatgcctgaagccaaccaactacatttgccaaatctcaattctcaagtggattctccaagcagtgagaagtcacctgttatgacaccttttaagttctgggcatgggacccagaagaggagcgcaggcgacaggaaaaatggcaacaggaacaggaacgtttgctccaggagagataccagaaggagcaggacaagctgaaagaagagtgggaaaaggcccaaaaggaggtggaagaggaagaacgcagatactatgaggaggagcgtaagataattgaagacactgtggttccatttactgtttcttcaagttccgctgaccagctgtctacctcttcctccatgactgaaggcagtgggacaatgaataagatagacctgggaaactgtcaagatgaaaaacaagacagaagatggaagaaatcattccagggagatgacagtgacttattgctgaagactagggaaagtgatcgactggaggagaagggcagcctaactgaaggggccttggctcattctgggaaccctgtatcaaaaggagtccatgaagaccatcagctggataccgaggctggggccccacactgtggaacaaacccacagcttgctcaggatccatcccagaatcagcagacatcaaatccaacgcacagttcagaagatgtgaagccaaaaaccctcccgctggataaaagcattaaccatcagatcgagtctcccagtgaaaggcggaagtctataagtggaaagaagctgtgctcttcctgtgggcttcctttgggtaaaggagctgcaatgatcatcgagaccctcaatctctattttcacatccagtgtttcaggtgtggaatttgtaaaggccagcttggagatgcagtgagtgggacggatgttaggattcgaaatggtctcctgaactgtaatgattgctacatgcgatccagaagtgccgggcagcctacaacattgtgacacggctttcaagcttccggatcactcaccatttctttactgagagtgtcccctggcaactgcttaacaaaatcccaagctcaggggcttctcagcatttacctaatttctgaaaggctcttctgaaaggtggtatctgttctttcgtagcacagtgtttatgtttttcctgtttattgttttggttttttttttttttttgcatttgcacagtatacacaaaagaatatggggttgtaatgatcctgaatagctcaaaaaaggttttagcatggtcaaacaggcttatggtttaaaatgtgttattctcttctttgggaattagctaaatgatgcaataaacctgttttgttttagaatgtctaggaattaaacactttatgtttacagaattgagctgcagaaagtgcaagacatgccaatttgagacacacggtcttctaagactgaaggataaatttaatgcatttcagaaactaaacatcacagcaagctctatctctgagctataatttgtttttaatgcaaagacactagtttgataatatatactgtaatcctgaaacatttgtgttacttacctttggaggtagaaattataccaataaattattgcaccgttagtattagattctgtgtaccttggaagttatgtcattaatataggctggttcatcaaataaagcaaaaccttgcaatatcagctagatttacactccgggacgttgcccaaaggtaggaagaaagcagagggaaatatttcagtcatcatttccaaagtcattatcaaaatctgtgaggaagtttaatcttccaaagagtcaatgtcagacatcaggcctctgttgcctgcttctctcgaggcactagattaggagtcttcaataagagacttaacatgaggtatatggaagatgaggcaccgagataagttcatcattaggtgtgagcactgctcacccttgctggcaagttctccttaagggcctgaagcacaggtgtccaaagaaaagcgttaagtccatcttaatagaatctatgtggtatatgatgtggtcagcccctggtctgtgatcagcaagaacctacagcacagattatgccctgcccacttcaatgaatacctactctcctccattctccatcactttttttgctatcaagaactccggaccttgcccatggagaagtttagagaggaactcttgtggagagctggtttattttctgccctgtgcgacgagtttcagctggccaagaaaggagtcaagttattaaaaagcatcacaatgtagatctccaggctggttttttgttttttgttgttaagactggggaaagggggactatttattctgccttaaatcaatggcaaataagtcaagatgacattttgtgaatgtagactatggatacactcctaatagattgatgtagtcataaaagggggtcaagtagatgtttttctgttatgtaagcaataatttttccgtgtcttattgagtatggctagcgattatttattacatgctagatgggttctttgcatgtgggttccatataggtgcagaaatttcctcagccactggagggatttcgaccatatttgtcatttggatgagctgttattagattgaaatctacacatcatttcattaaaaattgtgccttagaaaacgcaaagctgttgcacatggcgataaattatggatgcagtacattgaagagagatgaagtcacttccaagtttccaagacttctcatggaggtgtttgctgttttacaggaaaaaataaaaataaaaaaagaaaaaaagaaaaaattaaaaagaaaaattgttttgaaaatgtacagatcaagtccaatattttgattatccacctgcatgttttattaaatattttgataatgtggatgtttacactttgcatgatattagcagagtaccactagtaatgcacaaacatgtacaatatggtcattcataaccgatttttatagaatactttttacatgtgcaactccatccgttatgtaaggattacatgaatattgcacattcccttctggtttcacaaacccatttatacatatttcttagtgaggctcattgtacatgtattgaagctagaatcgagtcaagaaaaataaagccccattctccaactgcaaaatgtgctttcccataatgaacactagtcaccagcacagaataatctccaacattttctaaattctaattgccaactgtttctatttatatttgatttatatttcatttggagtctgttacatggcagcttaggcagactagatcttgttttttccaatgcagcataatgagtatgatctatttcttttcaaataatctttgagatcccaggaaaaaaaaaatgctctgctccattgagctataatgtaaatgtgtttgtttaaaaaacaggtgaggcaagtgagtgatttattgttcctgaggaagtatatctgattttttttctcatactccaaaagctagtccctactctttaataaaaataatgggtaactttttgtttttcactagcgaacttccatgacatttcctttctatgtagtgtgattaatgcaatacatattatagttatctatacacagtgtaagatttaacaaactgaaatgatccacctcatatgtgagtccgtccaaaagatgttactgctctgggtgggccagtgttctatatcggttatactaactttcatttaaagtatttattctaaaatgcctctgagaaacagtaaaaaataaaaacaacaagttgtctaaaatgcaacagcttttatagtaaatgtacatttataaataaaatactcaaatcaaaaaaaaaaac

SEQ ID NO: 314150 - DNA, 6734 bp, Homo sapiens
ttagtagagtactgaaacattccaaaatgtattctttaagatagaattgtatttggaatacaccagttgtatacttgtattagtttgttttcatgctgttgataaagacatacctgagactgggtaatttataaaggaaagaggcttcattgactcatagttccacatggctgaagaggcctcacagtcatggtggaagatgaaggaagagcaacgggacatcttacatggtggccagcaaagagagagcttgtgtagggaaacttccctttataaaaccatcagatctcgtgagacttattcactatcacaagaatagcacaagaaagacccaccctcatgattcagttacctcccaccaggtccctcccatgacatgtgggaatcatgggagctttgattcaagatttgggaggggacatagccaaaccgtatgaatactttcatctggttcatggaaactgtaattatagctgcatgctctggagacaaaatgcctgggttcaaattttcatgtgtctagttcttagctgtgtgaccttacccatcagatttcccctaatctctaatcagcacctgtaaactagaaataataccagtaataacctcatagggattttagaaataccaaatgggagaatccataaaaagtgtttagctcaatacctggcccagaataagcattcataatgtattctagtaattgtagaatagcagcaggaggagtaaaagaataaagcaagatgtcaggcagaaataaactactctcgaatcctttctttaaaataagagtgttcatgttgtggagatcgggtttttcactgtggttctcaaaccctgtgtgccagggtccctgtagggcttggagcccactctcacagtgtctcattcagtaggtctaggctggggccagaggatttgcatttcttacaggttcccaggtgatgctcatgctgcacatctcaccacactctgaaaaccactggcctcaagtatttatttaaattgtgcaccaaaaatatcactgattgatatgaaaataacagtaataattgcttgacatttataaagtctccatctttcaagaagccagagacctctaataaatgtaaccttaaaatacatgatttgtcttcaattgggatggggaaatgggggaggcataggtctctgcccagcacccatttaagggactgatctgaagtcaagcatcaagttccaatgaaactctagggttaggatcaggtatcctggagccacacctaacactttctcccccagaaagtggtctctcccccatttctataaagtcatccattcatagactggtcatacaggtcactgaagatctgctgatcgaccctaatgatgttccacacgttttccttacacacacacacccaggcattcagtttttaaatgccctgaaaacagtcataaaatacatttgaaagtgacaaattcccttttcttagctgcctctcagcagcagaaagatatctcaaactgatgtttcagtaaaatatgtgcgcattaaaaactgatttttttattgaaaatgacgacaacagcagagtttaaggatacaaatccttgccatgagccaccacagaaaggcatatactcaacctttatttatacgtacaaaaaacttctgccacagacttctatacataacctttatgatgtgtaatgtatatgaaatagtaattaaaccacccatctttgctgccttttatacttttctagtgttctccaaaaagcaatacaaattatacatttttgttcttgcatagtatatcattctatcattttgagatttaacattttaacactatcaccattaagtatgaccctgtgaaatttcatctaacaccaaagaagacaatagcataaactgtcctggttctgttgattttgtacatgtcttcaggttttatatgtgtgttattaagacattttgtactgtagatttactgactctcaattctggtattgactagagccaaactccctatagtacttgggagcatggttctattcagttctcaccccagttttcatggttttctgtttgttctgttctgccatctgatctagagtcgcctggcactgccagtgttccgcttagagttcagaactcttggcgacgatcccagtttttctcccagtcaggtaaactgcatactgggtagctgtatttcttttgtgcgaaaatccatgttggggcgatcaatgatgtgtggcacttgtcttcatttctgatttctggggaaaaaattatttcttatgcacagttagcaaagagctagttcttttatattactaccagttatgctaaaattgggggtaggaggagaggaatcacacaactttatgttgatttcaagaattcaaagaaataataatattcatcattttcttgagagtcccctgcctttaaaaaaaaaaaaaaagattaaaagcatttaccagaaactgatcatagttctcttgttaactgtgtcactgtgtttgcttcctgggtgacatctggcctctgtttgtatggtacttctccatgccagacagtgaggggactgctcagtcaagccacaatgcaaggtgcactaagaatcagtactaataggaacagtttttgcttcctgtagtctagtacctggtgttaattgatgtgatcaatcatttgatagtagtttaaacttcttttggtgatgggtgcaacctgctacaggggttgtctgctttattatgattttctaatgttcttgacttaccaaacacacacacacacacacacacacacacacacacacacacacaaaattggtttaaagctgatgtaggaactatactccactgataggtcaaaaacaaagacaattagaaaatactcacattcatatcttttttttctttcttttttttctgtgcagtggattctccaagcagtgagaagtcacctgttatgacaccttttaagttctgggcatgggacccagaagaggagcgcaggcgacaggaaaaatggcaacaggaacaggaacgtttgctccaggagagataccagaaggagcaggacaagctgaaagaagagtgggaaaaggcccaaaaggaggtggaagaggaagaacgcagatactatgaggaggagcgtaagataattgaagacactgtggttccatttactgtttcttcaagttccgctgaccagctgtctacctcttcctccatgactgaaggcagtgggacaatgaataagatagacctgggaaactgtcaagatgaaaaacaagacagaagatggaagaaatcattccagggagatgacagtgacttattgctgaagactagggaaagtgatcgactggaggagaagggcagcctaactgaaggggccttggctcattctgggaaccctgtatcaaaaggagtccatgaagaccatcagctggataccgaggctggggccccacactgtggaacaaacccacagcttgctcaggatccatcccagaatcagcagacatcaaatccaacgcacagttcagaagatgtgaagccaaaaaccctcccgctggataaaagcattaaccatcagatcgagtctcccagtgaaaggcggaagtctataagtggaaagaagctgtgctcttcctgtgggcttcctttgggtaaaggagctgcaatgatcatcgagaccctcaatctctattttcacatccagtgtttcaggtgtggaatttgtaaaggccagcttggagatgcagtgagtgggacggatgttaggattcgaaatggtctcctgaactgtaatgattgctacatgcgatccagaagtgccgggcagcctacaacattgtgacacggctttcaagcttccggatcactcaccatttctttactgagagtgtcccctggcaactgcttaacaaaatcccaagctcaggggcttctcagcatttacctaatttctgaaaggctcttctgaaaggtggtatctgttctttcgtagcacagtgtttatgtttttcctgtttattgttttggttttttttttttttttgcatttgcacagtatacacaaaagaatatggggttgtaatgatcctgaatagctcaaaaaaggttttagcatggtcaaacaggcttatggtttaaaatgtgttattctcttctttgggaattagctaaatgatgcaataaacctgttttgttttagaatgtctaggaattaaacactttatgtttacagaattgagctgcagaaagtgcaagacatgccaatttgagacacacggtcttctaagactgaaggataaatttaatgcatttcagaaactaaacatcacagcaagctctatctctgagctataatttgtttttaatgcaaagacactagtttgataatatatactgtaatcctgaaacatttgtgttacttacctttggaggtagaaattataccaataaattattgcaccgttagtattagattctgtgtaccttggaagttatgtcattaatataggctggttcatcaaataaagcaaaaccttgcaatatcagctagatttacactccgggacgttgcccaaaggtaggaagaaagcagagggaaatatttcagtcatcatttccaaagtcattatcaaaatctgtgaggaagtttaatcttccaaagagtcaatgtcagacatcaggcctctgttgcctgcttctctcgaggcactagattaggagtcttcaataagagacttaacatgaggtatatggaagatgaggcaccgagataagttcatcattaggtgtgagcactgctcacccttgctggcaagttctccttaagggcctgaagcacaggtgtccaaagaaaagcgttaagtccatcttaatagaatctatgtggtatatgatgtggtcagcccctggtctgtgatcagcaagaacctacagcacagattatgccctgcccacttcaatgaatacctactctcctccattctccatcactttttttgctatcaagaactccggaccttgcccatggagaagtttagagaggaactcttgtggagagctggtttattttctgccctgtgcgacgagtttcagctggccaagaaaggagtcaagttattaaaaagcatcacaatgtagatctccaggctggttttttgttttttgttgttaagactggggaaagggggactatttattctgccttaaatcaatggcaaataagtcaagatgacattttgtgaatgtagactatggatacactcctaatagattgatgtagtcataaaagggggtcaagtagatgtttttctgttatgtaagcaataatttttccgtgtcttattgagtatggctagcgattatttattacatgctagatgggttctttgcatgtgggttccatataggtgcagaaatttcctcagccactggagggatttcgaccatatttgtcatttggatgagctgttattagattgaaatctacacatcatttcattaaaaattgtgccttagaaaacgcaaagctgttgcacatggcgataaattatggatgcagtacattgaagagagatgaagtcacttccaagtttccaagacttctcatggaggtgtttgctgttttacaggaaaaaataaaaataaaaaaagaaaaaaagaaaaaattaaaaagaaaaattgttttgaaaatgtacagatcaagtccaatattttgattatccacctgcatgttttattaaatattttgataatgtggatgtttacactttgcatgatattagcagagtaccactagtaatgcacaaacatgtacaatatggtcattcataaccgatttttatagaatactttttacatgtgcaactccatccgttatgtaaggattacatgaatattgcacattcccttctggtttcacaaacccatttatacatatttcttagtgaggctcattgtacatgtattgaagctagaatcgagtcaagaaaaataaagccccattctccaactgcaaaatgtgctttcccataatgaacactagtcaccagcacagaataatctccaacattttctaaattctaattgccaactgtttctatttatatttgatttatatttcatttggagtctgttacatggcagcttaggcagactagatcttgttttttccaatgcagcataatgagtatgatctatttcttttcaaataatctttgagatcccaggaaaaaaaaaatgctctgctccattgagctataatgtaaatgtgtttgtttaaaaaacaggtgaggcaagtgagtgatttattgttcctgaggaagtatatctgattttttttctcatactccaaaagctagtccctactctttaataaaaataatgggtaactttttgtttttcactagcgaacttccatgacatttcctttctatgtagtgtgattaatgcaatacatattatagttatctatacacagtgtaagatttaacaaactgaaatgatccacctcatatgtgagtccgtccaaaagatgttactgctctgggtgggccagtgttctatatcggttatactaactttcatttaaagtatttattctaaaatgcctctgagaaacagtaaaaaataaaaacaacaagttgtctaaaatgcaacagcttttatagtaaatgtacatttataaataaaatactcaaatcaaaaaaaaaaac

SEQ ID NO: 314151 - DNA, 6804 bp, Homo sapiens
ttagtagagtactgaaacattccaaaatgtattctttaagatagaattgtatttggaatacaccagttgtatacttgtattagtttgttttcatgctgttgataaagacatacctgagactgggtaatttataaaggaaagaggcttcattgactcatagttccacatggctgaagaggcctcacagtcatggtggaagatgaaggaagagcaacgggacatcttacatggtggccagcaaagagagagcttgtgtagggaaacttccctttataaaaccatcagatctcgtgagacttattcactatcacaagaatagcacaagaaagacccaccctcatgattcagttacctcccaccaggtccctcccatgacatgtgggaatcatgggagctttgattcaagatttgggaggggacatagccaaaccgtatgaatactttcatctggttcatggaaactgtaattatagctgcatgctctggagacaaaatgcctgggttcaaattttcatgtgtctagttcttagctgtgtgaccttacccatcagatttcccctaatctctaatcagcacctgtaaactagaaataataccagtaataacctcatagggattttagaaataccaaatgggagaatccataaaaagtgtttagctcaatacctggcccagaataagcattcataatgtattctagtaattgtagaatagcagcaggaggagtaaaagaataaagcaagatgtcaggcagaaataaactactctcgaatcctttctttaaaataagagtgttcatgttgtggagatcgggtttttcactgtggttctcaaaccctgtgtgccagggtccctgtagggcttggagcccactctcacagtgtctcattcagtaggtctaggctggggccagaggatttgcatttcttacaggttcccaggtgatgctcatgctgcacatctcaccacactctgaaaaccactggcctcaagtatttatttaaattgtgcaccaaaaatatcactgattgatatgaaaataacagtaataattgcttgacatttataaagtctccatctttcaagaagccagagacctctaataaatgtaaccttaaaatacatgatttgtcttcaattgggatggggaaatgggggaggcataggtctctgcccagcacccatttaagggactgatctgaagtcaagcatcaagttccaatgaaactctagggttaggatcaggtatcctggagccacacctaacactttctcccccagaaagtggtctctcccccatttctataaagtcatccattcatagactggtcatacaggtcactgaagatctgctgatcgaccctaatgatgttccacacgttttccttacacacacacacccaggcattcagtttttaaatgccctgaaaacagtcataaaatacatttgaaagtgacaaattcccttttcttagctgcctctcagcagcagaaagatatctcaaactgatgtttcagtaaaatatgtgcgcattaaaaactgatttttttattgaaaatgacgacaacagcagagtttaaggatacaaatccttgccatgagccaccacagaaaggcatatactcaacctttatttatacgtacaaaaaacttctgccacagacttctatacataacctttatgatgtgtaatgtatatgaaatagtaattaaaccacccatctttgctgccttttatacttttctagtgttctccaaaaagcaatacaaattatacatttttgttcttgcatagtatatcattctatcattttgagatttaacattttaacactatcaccattaagtatgaccctgtgaaatttcatctaacaccaaagaagacaatagcataaactgtcctggttctgttgattttgtacatgtcttcaggttttatatgtgtgttattaagacattttgtactgtagatttactgactctcaattctggtattgactagagccaaactccctatagtacttgggagcatggttctattcagttctcaccccagttttcatggttttctgtttgttctgttctgccatctgatctagagtcgcctggcactgccagtgttccgcttagagttcagaactcttggcgacgatcccagtttttctcccagtcaggtaaactgcatactgggtagctgtatttcttttgtgcgaaaatccatgttggggcgatcaatgatgtgtggcacttgtcttcatttctgatttctggggaaaaaattatttcttatgcacagttagcaaagagctagttcttttatattactaccagttatgctaaaattgggggtaggaggagaggaatcacacaactttatgttgatttcaagaattcaaagaaataataatattcatcattttcttgagagtcccctgcctttaaaaaaaaaaaaaaagattaaaagcatttaccagaaactgatcatagttctcttgttaactgtgtcactgtgtttgcttcctgggtgacatctggcctctgtttgtatggtacttctccatgccagacagtgaggggactgctcagtcaagccacaatgcaaggtgcactaagaatcagtactaataggaacagtttttgcttcctgtagtctagtacctggtgttaattgatgtgatcaatcatttgatagtagtttaaacttcttttggtgatgggtgcaacctgctacaggggttgtctgctttattatgattttctaatgttcttgacttaccaaacacacacacacacacacacacacacacacacacacacacacaaaattggtttaaagctgatgtaggaactatactccactgataggtcaaaaacaaagacaattagaaaatactcacattcatatcttttttttctttcttttttttctgtgcagtggattctccaagcagtgagaagtcacctgttatgacaccttttaagttctgggcatgggacccagaagaggagcgcaggcgacaggaaaaatggcaacaggaacaggaacgtttgctccaggagagataccagaaggagcaggacaagctgaaagaagagtgggaaaaggcccaaaaggaggtggaagaggaagaacgcagatactatgaggaggagcgtaagataattgaagacactgtggttccatttactgtttcttcaagttccgctgaccagctgtctacctcttcctccatgactgaaggcagtgggacaatgaataagatagacctgggaaactgtcaagatgaaaaacaagacagaagatggaagaaatcattccagggagatgacagtgacttattgctgaagactagggaaagtgatcgactggaggagaagggcagcctaactgaaggggccttggctcattctgggaaccctgtatcaaaaggagtccatgaagaccatcagctggataccgaggctggggccccacactgtggaacaaacccacagcttgctcaggatccatcccagaatcagcagacatcaaatccaacgcacagttcagaagatgtgaagccaaaaaccctcccgctggataaaagcattaaccatcagatcgagtctcccagtgaaaggcggaagaaaagtccccgagagcacttccaggctgggcctttctctccctgttctcccacccctcccggtcagtcagtctataagtggaaagaagctgtgctcttcctgtgggcttcctttgggtaaaggagctgcaatgatcatcgagaccctcaatctctattttcacatccagtgtttcaggtgtggaatttgtaaaggccagcttggagatgcagtgagtgggacggatgttaggattcgaaatggtctcctgaactgtaatgattgctacatgcgatccagaagtgccgggcagcctacaacattgtgacacggctttcaagcttccggatcactcaccatttctttactgagagtgtcccctggcaactgcttaacaaaatcccaagctcaggggcttctcagcatttacctaatttctgaaaggctcttctgaaaggtggtatctgttctttcgtagcacagtgtttatgtttttcctgtttattgttttggttttttttttttttttgcatttgcacagtatacacaaaagaatatggggttgtaatgatcctgaatagctcaaaaaaggttttagcatggtcaaacaggcttatggtttaaaatgtgttattctcttctttgggaattagctaaatgatgcaataaacctgttttgttttagaatgtctaggaattaaacactttatgtttacagaattgagctgcagaaagtgcaagacatgccaatttgagacacacggtcttctaagactgaaggataaatttaatgcatttcagaaactaaacatcacagcaagctctatctctgagctataatttgtttttaatgcaaagacactagtttgataatatatactgtaatcctgaaacatttgtgttacttacctttggaggtagaaattataccaataaattattgcaccgttagtattagattctgtgtaccttggaagttatgtcattaatataggctggttcatcaaataaagcaaaaccttgcaatatcagctagatttacactccgggacgttgcccaaaggtaggaagaaagcagagggaaatatttcagtcatcatttccaaagtcattatcaaaatctgtgaggaagtttaatcttccaaagagtcaatgtcagacatcaggcctctgttgcctgcttctctcgaggcactagattaggagtcttcaataagagacttaacatgaggtatatggaagatgaggcaccgagataagttcatcattaggtgtgagcactgctcacccttgctggcaagttctccttaagggcctgaagcacaggtgtccaaagaaaagcgttaagtccatcttaatagaatctatgtggtatatgatgtggtcagcccctggtctgtgatcagcaagaacctacagcacagattatgccctgcccacttcaatgaatacctactctcctccattctccatcactttttttgctatcaagaactccggaccttgcccatggagaagtttagagaggaactcttgtggagagctggtttattttctgccctgtgcgacgagtttcagctggccaagaaaggagtcaagttattaaaaagcatcacaatgtagatctccaggctggttttttgttttttgttgttaagactggggaaagggggactatttattctgccttaaatcaatggcaaataagtcaagatgacattttgtgaatgtagactatggatacactcctaatagattgatgtagtcataaaagggggtcaagtagatgtttttctgttatgtaagcaataatttttccgtgtcttattgagtatggctagcgattatttattacatgctagatgggttctttgcatgtgggttccatataggtgcagaaatttcctcagccactggagggatttcgaccatatttgtcatttggatgagctgttattagattgaaatctacacatcatttcattaaaaattgtgccttagaaaacgcaaagctgttgcacatggcgataaattatggatgcagtacattgaagagagatgaagtcacttccaagtttccaagacttctcatggaggtgtttgctgttttacaggaaaaaataaaaataaaaaaagaaaaaaagaaaaaattaaaaagaaaaattgttttgaaaatgtacagatcaagtccaatattttgattatccacctgcatgttttattaaatattttgataatgtggatgtttacactttgcatgatattagcagagtaccactagtaatgcacaaacatgtacaatatggtcattcataaccgatttttatagaatactttttacatgtgcaactccatccgttatgtaaggattacatgaatattgcacattcccttctggtttcacaaacccatttatacatatttcttagtgaggctcattgtacatgtattgaagctagaatcgagtcaagaaaaataaagccccattctccaactgcaaaatgtgctttcccataatgaacactagtcaccagcacagaataatctccaacattttctaaattctaattgccaactgtttctatttatatttgatttatatttcatttggagtctgttacatggcagcttaggcagactagatcttgttttttccaatgcagcataatgagtatgatctatttcttttcaaataatctttgagatcccaggaaaaaaaaaatgctctgctccattgagctataatgtaaatgtgtttgtttaaaaaacaggtgaggcaagtgagtgatttattgttcctgaggaagtatatctgattttttttctcatactccaaaagctagtccctactctttaataaaaataatgggtaactttttgtttttcactagcgaacttccatgacatttcctttctatgtagtgtgattaatgcaatacatattatagttatctatacacagtgtaagatttaacaaactgaaatgatccacctcatatgtgagtccgtccaaaagatgttactgctctgggtgggccagtgttctatatcggttatactaactttcatttaaagtatttattctaaaatgcctctgagaaacagtaaaaaataaaaacaacaagttgtctaaaatgcaacagcttttatagtaaatgtacatttataaataaaatactcaaatcaaaaaaaaaaac

SEQ ID NO: 314152 - DNA, 4931 bp, Homo sapiens
  misc_feature (7)..(7): n is a, c, g, or t
  misc_feature (9)..(9): n is a, c, g, or t
  misc_feature (11)..(11): n is a, c, g, or t
ccaattngncnttcggcctttttggccgggggacttaatcaagaaagaggaagaaaggaaaaaaatggagaagttactggctggagaagatgggacaagtgaacgaaggaaaagcatcaaaacctacagagaaattgttcaagaaaaagagcggagagagagagagctgcatgaagcatataagaacgctcggtcccaggaggaggcagaggggatccttcaacagtacattgagaggttcaccatcagtgaggctgttctcgaacgcttggagatgccaaaaattctggaaagaagccattcaacagagccaaatttatcctccttcctgaatgaccccaatcccatgaaatacctgcggcaacagtcactgcctccacccaaattcactgccactgttgaaaccaccattgctcgtgccagtgttctggataccagcatgtcagcaggcagtgggtctccaagcaaaactgtcactcccaaagcagtgcctatgctgacacccaagccttactcccagcccaaaaattctcaagatgttctgaagacctttaaggtagacgggaaagtcagtgtgaatggagagacggttcatagagaggaggagaaggaaagagagtgtcccacggtggcacctgcccactccttaaccaaatcccagatgtttgaaggtgtggccagagtgcacgggtctccactggagctgaaacaagacaacggtagcatcgagatcaacataaagaagccaaactctgttccccaagagctcgcagcaaccactgagaaaacggaaccgaatagtcaagaggacaagaatgatggtggaaaatcaagaaaagggaatatagaacttgcctcatcagaaccacagcattttacaacaactgtgactcgatgcagcccgaccgtggcctttgtggaatttccctccagcccccagctgaagaatgatgtgtcggaagaaaaagaccagaagaaaccagaaaatgaaatgagtggaaaggtggagttggtgctgtcacaaaaggtggtaaagccaaaatctccagaacccgaagcaacgctgacatttccatttctggacaaaatgcctgaagccaaccaactacatttgccaaatctcaattctcaagtggattctccaagcagtgagaagtcacctgttatgacaccttttaagttctgggcatgggacccagaagaggagcgcaggcgacaggaaaaatggcaacaggaacaggaacgtttgctccaggagagataccagaaggagcaggacaagctgaaagaagagtgggaaaaggcccaaaaggaggtggaagaggaagaacgcagatactatgaggaggagcgtaagataattgaagacactgtggttccatttactgtttcttcaagttccgctgaccagctgtctacctcttcctccatgactgaaggcagtgggacaatgaataagatagacctgggaaactgtcaagatgaaaaacaagacagaagatggaagaaatcattccagggagatgacagtgacttattgctgaagactagggaaagtgatcgactggaggagaagggcagcctaactgaaggggccttggctcattctgggaaccctgtatcaaaaggagtccatgaagaccatcagctggataccgaggctggggccccacactgtggaacaaacccacagcttgctcaggatccatcccagaatcagcagacatcaaatccaacgcacagttcagaagatgtgaagccaaaaaccctcccgctggataaaagcattaaccatcagatcgagtctcccagtgaaaggcggaagtctataagtggaaagaagctgtgctcttcctgtgggcttcctttgggtaaaggagctgcaatgatcatcgagaccctcaatctctattttcacatccagtgtttcaggtgtggaatttgtaaaggccagcttggagatgcagtgagtgggacggatgttaggattcgaaatggtctcctgaactgtaatgattgctacatgcgatccagaagtgccgggcagcctacaacattgtgacacggctttcaagcttccggatcactcaccatttctttactgagagtgtcccctggcaactgcttaacaaaatcccaagctcaggggcttctcagcatttacctaatttctgaaaggctcttctgaaaggtggtatctgttctttcgtagcacagtgtttatgtttttcctgtttattgttttggttttttttttttttttgcatttgcacagtatacacaaaagaatatggggttgtaatgatcctgaatagctcaaaaaaggttttagcatggtcaaacaggcttatggtttaaaatgtgttattctcttctttgggaattagctaaatgatgcaataaacctgttttgttttagaatgtctaggaattaaacactttatgtttacagaattgagctgcagaaagtgcaagacatgccaatttgagacacacggtcttctaagactgaaggataaatttaatgcatttcagaaactaaacatcacagcaagctctatctctgagctataatttgtttttaatgcaaagacactagtttgataatatatactgtaatcctgaaacatttgtgttacttacctttggaggtagaaattataccaataaattattgcaccgttagtattagattctgtgtaccttggaagttatgtcattaatataggctggttcatcaaataaagcaaaaccttgcaatatcagctagatttacactccgggacgttgcccaaaggtaggaagaaagcagagggaaatatttcagtcatcatttccaaagtcattatcaaaatctgtgaggaagtttaatcttccaaagagtcaatgtcagacatcaggcctctgttgcctgcttctctcgaggcactagattaggagtcttcaataagagacttaacatgaggtatatggaagatgaggcaccgagataagttcatcattaggtgtgagcactgctcacccttgctggcaagttctccttaagggcctgaagcacaggtgtccaaagaaaagcgttaagtccatcttaatagaatctatgtggtatatgatgtggtcagcccctggtctgtgatcagcaagaacctacagcacagattatgccctgcccacttcaatgaatacctactctcctccattctccatcactttttttgctatcaagaactccggaccttgcccatggagaagtttagagaggaactcttgtggagagctggtttattttctgccctgtgcgacgagtttcagctggccaagaaaggagtcaagttattaaaaagcatcacaatgtagatctccaggctggttttttgttttttgttgttaagactggggaaagggggactatttattctgccttaaatcaatggcaaataagtcaagatgacattttgtgaatgtagactatggatacactcctaatagattgatgtagtcataaaagggggtcaagtagatgtttttctgttatgtaagcaataatttttccgtgtcttattgagtatggctagcgattatttattacatgctagatgggttctttgcatgtgggttccatataggtgcagaaatttcctcagccactggagggatttcgaccatatttgtcatttggatgagctgttattagattgaaatctacacatcatttcattaaaaattgtgccttagaaaacgcaaagctgttgcacatggcgataaattatggatgcagtacattgaagagagatgaagtcacttccaagtttccaagacttctcatggaggtgtttgctgttttacaggaaaaaataaaaataaaaaaagaaaaaaagaaaaaattaaaaagaaaaattgttttgaaaatgtacagatcaagtccaatattttgattatccacctgcatgttttattaaatattttgataatgtggatgtttacactttgcatgatattagcagagtaccactagtaatgcacaaacatgtacaatatggtcattcataaccgatttttatagaatactttttacatgtgcaactccatccgttatgtaaggattacatgaatattgcacattcccttctggtttcacaaacccatttatacatatttcttagtgaggctcattgtacatgtattgaagctagaatcgagtcaagaaaaataaagccccattctccaactgcaaaatgtgctttcccataatgaacactagtcaccagcacagaataatctccaacattttctaaattctaattgccaactgtttctatttatatttgatttatatttcatttggagtctgttacatggcagcttaggcagactagatcttgttttttccaatgcagcataatgagtatgatctatttcttttcaaataatctttgagatcccaggaaaaaaaaaatgctctgctccattgagctataatgtaaatgtgtttgtttaaaaaacaggtgaggcaagtgagtgatttattgttcctgaggaagtatatctgattttttttctcatactccaaaagctagtccctactctttaataaaaataatgggtaactttttgtttttcactagcgaacttccatgacatttcctttctatgtagtgtgattaatgcaatacatattatagttatctatacacagtgtaagatttaacaaactgaaatgatccacctcatatgtgagtccgtccaaaagatgttactgctctgggtgggccagtgttctatatcggttatactaactttcatttaaagtatttattctaaaatgcctctgagaaacagtaaaaaataaaaacaacaagttgtctaaaatgcaacagcttttatagtaaatgtacatttataaataaaatactcaaatcaaaaaaaaaaac

SEQ ID NO: 314153 - DNA, 6473 bp, Homo sapiens
ttagtagagtactgaaacattccaaaatgtattctttaagatagaattgtatttggaatacaccagttgtatacttgtattagtttgttttcatgctgttgataaagacatacctgagactgggtaatttataaaggaaagaggcttcattgactcatagttccacatggctgaagaggcctcacagtcatggtggaagatgaaggaagagcaacgggacatcttacatggtggccagcaaagagagagcttgtgtagggaaacttccctttataaaaccatcagatctcgtgagacttattcactatcacaagaatagcacaagaaagacccaccctcatgattcagttacctcccaccaggtccctcccatgacatgtgggaatcatgggagctttgattcaagatttgggaggggacatagccaaaccgtatgaatactttcatctggttcatggaaactgtaattatagctgcatgctctggagacaaaatgcctgggttcaaattttcatgtgtctagttcttagctgtgtgaccttacccatcagatttcccctaatctctaatcagcacctgtaaactagaaataataccagtaataacctcatagggattttagaaataccaaatgggagaatccataaaaagtgtttagctcaatacctggcccagaataagcattcataatgtattctagtaattgtagaatagcagcaggaggagtaaaagaataaagcaagatgtcaggcagaaataaactactctcgaatcctttctttaaaataagagtgttcatgttgtggagatcgggtttttcactgtggttctcaaaccctgtgtgccagggtccctgtagggcttggagcccactctcacagtgtctcattcagtaggtctaggctggggccagaggatttgcatttcttacaggttcccaggtgatgctcatgctgcacatctcaccacactctgaaaaccactggcctcaagtatttatttaaattgtgcaccaaaaatatcactgattgatatgaaaataacagtaataattgcttgacatttataaagtctccatctttcaagaagccagagacctctaataaatgtaaccttaaaatacatgatttgtcttcaattgggatggggaaatgggggaggcataggtctctgcccagcacccatttaagggactgatctgaagtcaagcatcaagttccaatgaaactctagggttaggatcaggtatcctggagccacacctaacactttctcccccagaaagtggtctctcccccatttctataaagtcatccattcatagactggtcatacaggtcactgaagatctgctgatcgaccctaatgatgttccacacgttttccttacacacacacacccaggcattcagtttttaaatgccctgaaaacagtcataaaatacatttgaaagtgacaaattcccttttcttagctgcctctcagcagcagaaagatatctcaaactgatgtttcagtaaaatatgtgcgcattaaaaactgatttttttattgaaaatgacgacaacagcagagtttaaggatacaaatccttgccatgagccaccacagaaaggcatatactcaacctttatttatacgtacaaaaaacttctgccacagacttctatacataacctttatgatgtgtaatgtatatgaaatagtaattaaaccacccatctttgctgccttttatacttttctagtgttctccaaaaagcaatacaaattatacatttttgttcttgcatagtatatcattctatcattttgagatttaacattttaacactatcaccattaagtatgaccctgtgaaatttcatctaacaccaaagaagacaatagcataaactgtcctggttctgttgattttgtacatgtcttcaggttttatatgtgtgttattaagacattttgtactgtagatttactgactctcaattctggtattgactagagccaaactccctatagtacttgggagcatggttctattcagttctcaccccagttttcatggttttctgtttgttctgttctgccatctgatctagagtcgcctggcactgccagtgttccgcttagagttcagaactcttggcgacgatcccagtttttctcccagtcaggtaaactgcatactgggtagctgtatttcttttgtgcgaaaatccatgttggggcgatcaatgatgtgtggcacttgtcttcatttctgatttctggggaaaaaattatttcttatgcacagttagcaaagagctagttcttttatattactaccagttatgctaaaattgggggtaggaggagaggaatcacacaactttatgttgatttcaagaattcaaagaaataataatattcatcattttcttgagagtcccctgcctttaaaaaaaaaaaaaaagattaaaagcatttaccagaaactgatcatagttctcttgttaactgtgtcactgtgtttgcttcctgggtgacatctggcctctgtttgtatggtacttctccatgccagacagtgaggggactgctcagtcaagccacaatgcaaggtgcactaagaatcagtactaataggaacagtttttgcttcctgtagtctagtacctggtgttaattgatgtgatcaatcatttgatagtagtttaaacttcttttggtgatgggtgcaacctgctacaggggttgtctgctttattatgattttctaatgttcttgacttaccaaacacacacacacacacacacacacacacacacacacacacacaaaattggtttaaagctgatgtaggaactatactccactgataggtcaaaaacaaagacaattagaaaatactcacattcatatcttttttttctttcttttttttctgtgcagtggattctccaagcagtgagaagtcacctgttatgacaccttttaagttctgggcatgggacccagaagaggagcgcaggcgacaggaaaaatggcaacaggaacaggaacgtttgctccaggagagataccagaaggagcaggacaagctgaaagaagagtgggaaaaggcccaaaaggaggtggaagaggaagaacgcagatactatgaggaggagcgtaagataattgaagacactgtggttccatttactgtttcttcaagttccgctgaccagctgtctacctcttcctccatgactgaaggcagtgggacaatgaataagatagacctgggaaactgtcaagatgaaaaacaagacagaagatggaagaaatcattccagggagatgacagtgacttattgctgaagactagggaaagtgatcgactggaggagaagggcagcctaactgaaggggccttggctcattctgggaaccctgtatcaaaaggagtccatgaagaccatcagctggataccgaggctggggccccacactgtggaacaaacccacagcttgctcaggatccatcccagaatcagcagacatcaaatccaacgcacagttcagaagatgtgaagccaaaaaccctcccgctggataaaagcattaaccatcagatcgagtctcccagtgaaaggcggaagtctataagtggaaagaagctgtgctcttcctgtgggcttcctttgggtaaaggagctgcaatgatcatcgagaccctcaatctctattttcacatccagtgtttcaggtgtggaatttgtaaaggccagcttggagatgcagtgagtgggacggatgttaggattcgaaatggtctcctgaactgtaatgattgctacatgcgatccagaagtgccgggcagcctacaacattgtgacacggctttcaagcttccggatcactcaccatttctttactgagagtgtcccctggcaactgcttaacaaaatcccaagctcaggggcttctcagcatttacctaatttctgaaaggctcttctgaaagaattgagctgcagaaagtgcaagacatgccaatttgagacacacggtcttctaagactgaaggataaatttaatgcatttcagaaactaaacatcacagcaagctctatctctgagctataatttgtttttaatgcaaagacactagtttgataatatatactgtaatcctgaaacatttgtgttacttacctttggaggtagaaattataccaataaattattgcaccgttagtattagattctgtgtaccttggaagttatgtcattaatataggctggttcatcaaataaagcaaaaccttgcaatatcagctagatttacactccgggacgttgcccaaaggtaggaagaaagcagagggaaatatttcagtcatcatttccaaagtcattatcaaaatctgtgaggaagtttaatcttccaaagagtcaatgtcagacatcaggcctctgttgcctgcttctctcgaggcactagattaggagtcttcaataagagacttaacatgaggtatatggaagatgaggcaccgagataagttcatcattaggtgtgagcactgctcacccttgctggcaagttctccttaagggcctgaagcacaggtgtccaaagaaaagcgttaagtccatcttaatagaatctatgtggtatatgatgtggtcagcccctggtctgtgatcagcaagaacctacagcacagattatgccctgcccacttcaatgaatacctactctcctccattctccatcactttttttgctatcaagaactccggaccttgcccatggagaagtttagagaggaactcttgtggagagctggtttattttctgccctgtgcgacgagtttcagctggccaagaaaggagtcaagttattaaaaagcatcacaatgtagatctccaggctggttttttgttttttgttgttaagactggggaaagggggactatttattctgccttaaatcaatggcaaataagtcaagatgacattttgtgaatgtagactatggatacactcctaatagattgatgtagtcataaaagggggtcaagtagatgtttttctgttatgtaagcaataatttttccgtgtcttattgagtatggctagcgattatttattacatgctagatgggttctttgcatgtgggttccatataggtgcagaaatttcctcagccactggagggatttcgaccatatttgtcatttggatgagctgttattagattgaaatctacacatcatttcattaaaaattgtgccttagaaaacgcaaagctgttgcacatggcgataaattatggatgcagtacattgaagagagatgaagtcacttccaagtttccaagacttctcatggaggtgtttgctgttttacaggaaaaaataaaaataaaaaaagaaaaaaagaaaaaattaaaaagaaaaattgttttgaaaatgtacagatcaagtccaatattttgattatccacctgcatgttttattaaatattttgataatgtggatgtttacactttgcatgatattagcagagtaccactagtaatgcacaaacatgtacaatatggtcattcataaccgatttttatagaatactttttacatgtgcaactccatccgttatgtaaggattacatgaatattgcacattcccttctggtttcacaaacccatttatacatatttcttagtgaggctcattgtacatgtattgaagctagaatcgagtcaagaaaaataaagccccattctccaactgcaaaatgtgctttcccataatgaacactagtcaccagcacagaataatctccaacattttctaaattctaattgccaactgtttctatttatatttgatttatatttcatttggagtctgttacatggcagcttaggcagactagatcttgttttttccaatgcagcataatgagtatgatctatttcttttcaaataatctttgagatcccaggaaaaaaaaaatgctctgctccattgagctataatgtaaatgtgtttgtttaaaaaacaggtgaggcaagtgagtgatttattgttcctgaggaagtatatctgattttttttctcatactccaaaagctagtccctactctttaataaaaataatgggtaactttttgtttttcactagcgaacttccatgacatttcctttctatgtagtgtgattaatgcaatacatattatagttatctatacacagtgtaagatttaacaaactgaaatgatccacctcatatgtgagtccgtccaaaagatgttactgctctgggtgggccagtgttctatatcggttatactaactttcatttaaagtatttattctaaaatgcctctgagaaacagtaaaaaataaaaacaacaagttgtctaaaatgcaacagcttttatagtaaatgtacatttataaataaaatactcaaatcaaaaaaaaaaac

SEQ ID NO: 314154 - DNA, 5373 bp, Homo sapiens
cgctctcggcagacgccttcaccagatgtagtcctcaggggaagcagcgatgggagaggaagcgactctgaatccgacttgcctcatcggaagctgccagatgtgaagaaggatgacatgtctgcacggcggacttcccatggtgagccgaaatcagcagtgccttttaaccagtacctcccgaacaaaagcaatcagacggcctacgtccccgcgcctctgagaaagaagaaagcagagagagaggaataccgcaagagctggagtaccgccacctccccgctgggtggggagaggcccttcagatacggtccgagaactcctgtgtctgatgacgcagagagcaccagcatgtttgacatgcggtgtgaggaggaggccgcggtgcagccgcacagcagggcccgccaggagcagctgcagctgataaataaccagctgagggaagaggacgacaaatggcaagatgacctggctcgttggaagagtcgtagaagaagtgtttctcaggacttaatcaagaaagaggaagaaaggaaaaaaatggagaagttactggctggagaagatgggacaagtgaacgaaggaaaagcatcaaaacctacagagaaattgttcaagaaaaagagcggagagagagagagctgcatgaagcatataagaacgctcggtcccaggaggaggcagaggggatccttcaacagtacattgagaggttcaccatcagtgaggctgttctcgaacgcttggagatgccaaaaattctggaaagaagccattcaacagagccaaatttatcctccttcctgaatgaccccaatcccatgaaatacctgcggcaacagtcactgcctccacccaaattcactgccactgttgaaaccaccattgctcgtgccagtgttctggataccagcatgtcagcaggcagtgggtctccaagcaaaactgtcactcccaaagcagtgcctatgctgacacccaagccttactcccagcccaaaaattctcaagatgttctgaagacctttaaggtagacgggaaagtcagtgtgaatggagagacggttcatagagaggaggagaaggaaagagagtgtcccacggtggcacctgcccactccttaaccaaatcccagatgtttgaaggtgtggccagagtgcacgggtctccactggagctgaaacaagacaacggtagcatcgagatcaacataaagaagccaaactctgttccccaagagctcgcagcaaccactgagaaaacggaaccgaatagtcaagaggacaagaatgatggtggaaaatcaagaaaagggaatatagaacttgcctcatcagaaccacagcattttacaacaactgtgactcgatgcagcccgaccgtggcctttgtggaatttccctccagcccccagctgaagaatgatgtgtcggaagaaaaagaccagaagaaaccagaaaatgaaatgagtggaaaggtggagttggtgctgtcacaaaaggtggtaaagccaaaatctccagaacccgaagcaacgctgacatttccatttctggacaaaatgcctgaagccaaccaactacatttgccaaatctcaattctcaagtggattctccaagcagtgagaagtcacctgttatgacaccttttaagttctgggcatgggacccagaagaggagcgcaggcgacaggaaaaatggcaacaggaacaggaacgtttgctccaggagagataccagaaggagcaggacaagctgaaagaagagtgggaaaaggcccaaaaggaggtggaagaggaagaacgcagatactatgaggaggagcgtaagataattgaagacactgtggttccatttactgtttcttcaagttccgctgaccagctgtctacctcttcctccatgactgaaggcagtgggacaatgaataagatagacctgggaaactgtcaagatgaaaaacaagacagaagatggaagaaatcattccagggagatgacagtgacttattgctgaagactagggaaagtgatcgactggaggagaagggcagcctaactgaaggggccttggctcattctgggaaccctgtatcaaaaggagtccatgaagaccatcagctggataccgaggctggggccccacactgtggaacaaacccacagcttgctcaggatccatcccagaatcagcagacatcaaatccaacgcacagttcagaagatgtgaagccaaaaaccctcccgctggataaaagcattaaccatcagatcgagtctcccagtgaaaggcggaagtctataagtggaaagaagctgtgctcttcctgtgggcttcctttgggtaaaggagctgcaatgatcatcgagaccctcaatctctattttcacatccagtgtttcaggtgtggaatttgtaaaggccagcttggagatgcagtgagtgggacggatgttaggattcgaaatggtctcctgaactgtaatgattgctacatgcgatccagaagtgccgggcagcctacaacattgtgacacggctttcaagcttccggatcactcaccatttctttactgagagtgtcccctggcaactgcttaacaaaatcccaagctcaggggcttctcagcatttacctaatttctgaaaggctcttctgaaaggtggtatctgttctttcgtagcacagtgtttatgtttttcctgtttattgttttggttttttttttttttttgcatttgcacagtatacacaaaagaatatggggttgtaatgatcctgaatagctcaaaaaaggttttagcatggtcaaacaggcttatggtttaaaatgtgttattctcttctttgggaattagctaaatgatgcaataaacctgttttgttttagaatgtctaggaattaaacactttatgtttacagaattgagctgcagaaagtgcaagacatgccaatttgagacacacggtcttctaagactgaaggataaatttaatgcatttcagaaactaaacatcacagcaagctctatctctgagctataatttgtttttaatgcaaagacactagtttgataatatatactgtaatcctgaaacatttgtgttacttacctttggaggtagaaattataccaataaattattgcaccgttagtattagattctgtgtaccttggaagttatgtcattaatataggctggttcatcaaataaagcaaaaccttgcaatatcagctagatttacactccgggacgttgcccaaaggtaggaagaaagcagagggaaatatttcagtcatcatttccaaagtcattatcaaaatctgtgaggaagtttaatcttccaaagagtcaatgtcagacatcaggcctctgttgcctgcttctctcgaggcactagattaggagtcttcaataagagacttaacatgaggtatatggaagatgaggcaccgagataagttcatcattaggtgtgagcactgctcacccttgctggcaagttctccttaagggcctgaagcacaggtgtccaaagaaaagcgttaagtccatcttaatagaatctatgtggtatatgatgtggtcagcccctggtctgtgatcagcaagaacctacagcacagattatgccctgcccacttcaatgaatacctactctcctccattctccatcactttttttgctatcaagaactccggaccttgcccatggagaagtttagagaggaactcttgtggagagctggtttattttctgccctgtgcgacgagtttcagctggccaagaaaggagtcaagttattaaaaagcatcacaatgtagatctccaggctggttttttgttttttgttgttaagactggggaaagggggactatttattctgccttaaatcaatggcaaataagtcaagatgacattttgtgaatgtagactatggatacactcctaatagattgatgtagtcataaaagggggtcaagtagatgtttttctgttatgtaagcaataatttttccgtgtcttattgagtatggctagcgattatttattacatgctagatgggttctttgcatgtgggttccatataggtgcagaaatttcctcagccactggagggatttcgaccatatttgtcatttggatgagctgttattagattgaaatctacacatcatttcattaaaaattgtgccttagaaaacgcaaagctgttgcacatggcgataaattatggatgcagtacattgaagagagatgaagtcacttccaagtttccaagacttctcatggaggtgtttgctgttttacaggaaaaaataaaaataaaaaaagaaaaaaagaaaaaattaaaaagaaaaattgttttgaaaatgtacagatcaagtccaatattttgattatccacctgcatgttttattaaatattttgataatgtggatgtttacactttgcatgatattagcagagtaccactagtaatgcacaaacatgtacaatatggtcattcataaccgatttttatagaatactttttacatgtgcaactccatccgttatgtaaggattacatgaatattgcacattcccttctggtttcacaaacccatttatacatatttcttagtgaggctcattgtacatgtattgaagctagaatcgagtcaagaaaaataaagccccattctccaactgcaaaatgtgctttcccataatgaacactagtcaccagcacagaataatctccaacattttctaaattctaattgccaactgtttctatttatatttgatttatatttcatttggagtctgttacatggcagcttaggcagactagatcttgttttttccaatgcagcataatgagtatgatctatttcttttcaaataatctttgagatcccaggaaaaaaaaaatgctctgctccattgagctataatgtaaatgtgtttgtttaaaaaacaggtgaggcaagtgagtgatttattgttcctgaggaagtatatctgattttttttctcatactccaaaagctagtccctactctttaataaaaataatgggtaactttttgtttttcactagcgaacttccatgacatttcctttctatgtagtgtgattaatgcaatacatattatagttatctatacacagtgtaagatttaacaaactgaaatgatccacctcatatgtgagtccgtccaaaagatgttactgctctgggtgggccagtgttctatatcggttatactaactttcatttaaagtatttattctaaaatgcctctgagaaacagtaaaaaataaaaacaacagggttggctagtcggggtggcatcgataaacaccggg

SEQ ID NO: 314155 - DNA, 5353 bp, Homo sapiens
cgctctcggcagacgccttcaccagatgtagtcctcaggggaagcagcgatgggagaggaagcgactctgaatccgacttgcctcatcggaagctgccagatgtgaagaaggatgacatgtctgcacggcggacttcccatggtgagccgaaatcagcagtgccttttaaccagtacctcccgaacaaaagcaatcagacggcctacgtccccgcgcctctgagaaagaagaaagcagagagagaggaataccgcaagagctggagtaccgccacctccccgctgggtggggagaggcccttcagatacggtccgagaactcctgtgtctgatgacgcagagagcaccagcatgtttgacatgcggtgtgaggaggaggccgcggtgcagccgcacagcagggcccgccaggagcagctgcagctgataaataaccagctgagggaagaggacgacaaatggcaagatgacctggctcgttggaagagtcgtagaagaagtgtttctcaggacttaatcaagaaagaggaagaaaggaaaaaaatggagaagttactggctggagaagatgggacaagtgaacgaaggaaaagcatcaaaacctacagagaaattgttcaagaaaaagagcggagagagagagagctgcatgaagcatataagaacgctcggtcccaggaggaggcagaggggatccttcaacagtacattgagaggttcaccatcagtgaggctgttctcgaacgcttggagatgccaaaaattctggaaagaagccattcaacagagccaaatttatcctccttcctgaatgaccccaatcccatgaaatacctgcggcaacagtcactgcctccacccaaattcactgccactgttgaaaccaccattgctcgtgccagtgttctggataccagcatgtcagcaggcagtgggtctccaagcaaaactgtcactcccaaagcagtgcctatgctgacacccaagccttactcccagcccaaaaattctcaagatgttctgaagacctttaaggtagacgggaaagtcagtgtgaatggagagacggttcatagagaggaggagaaggaaagagagtgtcccacggtggcacctgcccactccttaaccaaatcccagatgtttgaaggtgtggccagagtgcacgggtctccactggagctgaaacaagacaacggtagcatcgagatcaacataaagaagccaaactctgttccccaagagctcgcagcaaccactgagaaaacggaaccgaatagtcaagaggacaagaatgatggtggaaaatcaagaaaagggaatatagaacttgcctcatcagaaccacagcattttacaacaactgtgactcgatgcagcccgaccgtggcctttgtggaatttccctccagcccccagctgaagaatgatgtgtcggaagaaaaagaccagaagaaaccagaaaatgaaatgagtggaaaggtggagttggtgctgtcacaaaaggtggtaaagccaaaatctccagaacccgaagcaacgctgacatttccatttctggacaaaatgcctgaagccaaccaactacatttgccaaatctcaattctcaagtggattctccaagcagtgagaagtcacctgttatgacaccttttaagttctgggcatgggacccagaagaggagcgcaggcgacaggaaaaatggcaacaggaacaggaacgtttgctccaggagagataccagaaggagcaggacaagctgaaagaagagtgggaaaaggcccaaaaggaggtggaagaggaagaacgcagatactatgaggaggagcgtaagataattgaagacactgtggttccatttactgtttcttcaagttccgctgaccagctgtctacctcttcctccatgactgaaggcagtgggacaatgaataagatagacctgggaaactgtcaagatgaaaaacaagacagaagatggaagaaatcattccagggagatgacagtgacttattgctgaagactagggaaagtgatcgactggaggagaagggcagcctaactgaaggggccttggctcattctgggaaccctgtatcaaaaggagtccatgaagaccatcagctggataccgaggctggggccccacactgtggaacaaacccacagcttgctcaggatccatcccagaatcagcagacatcaaatccaacgcacagttcagaagatgtgaagccaaaaaccctcccgctggataaaagcattaaccatcagatcgagtctcccagtgaaaggcggaagtctataagtggaaagaagctgtgctcttcctgtgggcttcctttgggtaaaggagctgcaatgatcatcgagaccctcaatctctattttcacatccagtgtttcaggtgtggaatttgtaaaggccagcttggagatgcagtgagtgggacggatgttaggattcgaaatggtctcctgaactgtaatgattgctacatgcgatccagaagtgccgggcagcctacaacattgtgacacggctttcaagcttccggatcactcaccatttctttactgagagtgtcccctggcaactgcttaacaaaatcccaagctcaggggcttctcagcatttacctaatttctgaaaggctcttctgaaaggtggtatctgttctttcgtagcacagtgtttatgtttttcctgtttattgttttggttttttttttttttttgcatttgcacagtatacacaaaagaatatggggttgtaatgatcctgaatagctcaaaaaaggttttagcatggtcaaacaggcttatggtttaaaatgtgttattctcttctttgggaattagctaaatgatgcaataaacctgttttgttttagaatgtctaggaattaaacactttatgtttacagaattgagctgcagaaagtgcaagacatgccaatttgagacacacggtcttctaagactgaaggataaatttaatgcatttcagaaactaaacatcacagcaagctctatctctgagctataatttgtttttaatgcaaagacactagtttgataatatatactgtaatcctgaaacatttgtgttacttacctttggaggtagaaattataccaataaattattgcaccgttagtattagattctgtgtaccttggaagttatgtcattaatataggctggttcatcaaataaagcaaaaccttgcaatatcagctagatttacactccgggacgttgcccaaaggtaggaagaaagcagagggaaatatttcagtcatcatttccaaagtcattatcaaaatctgtgaggaagtttaatcttccaaagagtcaatgtcagacatcaggcctctgttgcctgcttctctcgaggcactagattaggagtcttcaataagagacttaacatgaggtatatggaagatgaggcaccgagataagttcatcattaggtgtgagcactgctcacccttgctggcaagttctccttaagggcctgaagcacaggtgtccaaagaaaagcgttaagtccatcttaatagaatctatgtggtatatgatgtggtcagcccctggtctgtgatcagcaagaacctacagcacagattatgccctgcccacttcaatgaatacctactctcctccattctccatcactttttttgctatcaagaactccggaccttgcccatggagaagtttagagaggaactcttgtggagagctggtttattttctgccctgtgcgacgagtttcagctggccaagaaaggagtcaagttattaaaaagcatcacaatgtagatctccaggctggttttttgttttttgttgttaagactggggaaagggggactatttattctgccttaaatcaatggcaaataagtcaagatgacattttgtgaatgtagactatggatacactcctaatagattgatgtagtcataaaagggggtcaagtagatgtttttctgttatgtaagcaataatttttccgtgtcttattgagtatggctagcgattatttattacatgctagatgggttctttgcatgtgggttccatataggtgcagaaatttcctcagccactggagggatttcgaccatatttgtcatttggatgagctgttattagattgaaatctacacatcatttcattaaaaattgtgccttagaaaacgcaaagctgttgcacatggcgataaattatggatgcagtacattgaagagagatgaagtcacttccaagtttccaagacttctcatggaggtgtttgctgttttacaggaaaaaataaaaataaaaaaagaaaaaaagaaaaaattaaaaagaaaaattgttttgaaaatgtacagatcaagtccaatattttgattatccacctgcatgttttattaaatattttgataatgtggatgtttacactttgcatgatattagcagagtaccactagtaatgcacaaacatgtacaatatggtcattcataaccgatttttatagaatactttttacatgtgcaactccatccgttatgtaaggattacatgaatattgcacattcccttctggtttcacaaacccatttatacatatttcttagtgaggctcattgtacatgtattgaagctagaatcgagtcaagaaaaataaagccccattctccaactgcaaaatgtgctttcccataatgaacactagtcaccagcacagaataatctccaacattttctaaattctaattgccaactgtttctatttatatttgatttatatttcatttggagtctgttacatggcagcttaggcagactagatcttgttttttccaatgcagcataatgagtatgatctatttcttttcaaataatctttgagatcccaggaagtgaggcaagtgagtgatttattgttcctgaggaagtatatctgattttttttctcatactccaaaagctagtccctactctttaataaaaataatgggtaactttttgtttttcactagcgaacttccatgacatttcctttctatgtagtgtgattaatgcaatacatattatagttatctatacacagtgtaagatttaacaaactgaaatgatccacctcatatgtgagtccgtccaaaagatgttactgctctgggtgggccagtgttctatatcggttatactaactttcatttaaagtatttattctaaaatgcctctgagaaacagtaaaaaataaaaacaacaagttgtctaaaatgcaacagcttttatagtaaatgtacatttataaataaaatactcaaatcaaaaaaaaaaac

SEQ ID NO: 314156 - DNA, 2012 bp, Homo sapiens
cagtcagaaactcttttaaaaaattggagtgaagatagggagtgtgaaattcaagaatgactatttctcaaagtgaagtcacgtttttactgcctttttacatggatctcaaatctctgcaagactgaaaactttgagaataaaaattgaaggtgccgggcagcctacaacattgtgacacggctttcaagcttccggatcactcaccatttctttactgagagtgtcccctggcaactgcttaacaaaatcccaagctcaggggcttctcagcatttacctaatttctgaaaggctcttctgaaagaactccggaccttgcccatggagaagtttagagaggaactcttgtggagagctggtttattttctgccctgtgcgacgagtttcagctggccaagaaaggagtcaagttattaaaaagcatcacaatgtagatctccaggctggttttttgttttttgttgttaagactggggaaagggggactatttattctgccttaaatcaatggcaaataagtcaagatgacattttgtgaatgtagactatggatacactcctaatagattgatgtagtcataaaagggggtcaagtagatgtttttctgttatgtaagcaataatttttccgtgtcttattgagtatggctagcgattatttattacatgctagatgggttctttgcatgtgggttccatataggtgcagaaatttcctcagccactggagggatttcgaccatatttgtcatttggatgagctgttattagattgaaatctacacatcatttcattaaaaattgtgccttagaaaacgcaaagctgttgcacatggcgataaattatggatgcagtacattgaagagagatgaagtcacttccaagtttccaagacttctcatggaggtgtttgctgttttacaggaaaaaataaaaataaaaaaagaaaaaaagaaaaaattaaaaagaaaaattgttttgaaaatgtacagatcaagtccaatattttgattatccacctgcatgttttattaaatattttgataatgtggatgtttacactttgcatgatattagcagagtaccactagtaatgcacaaacatgtacaatatggtcattcataaccgatttttatagaatactttttacatgtgcaactccatccgttatgtaaggattacatgaatattgcacattcccttctggtttcacaaacccatttatacatatttcttagtgaggctcattgtacatgtattgaagctagaatcgagtcaagaaaaataaagccccattctccaactgcaaaatgtgctttcccataatgaacactagtcaccagcacagaataatctccaacattttctaaattctaattgccaactgtttctatttatatttgatttatatttcatttggagtctgttacatggcagcttaggcagactagatcttgttttttccaatgcagcataatgagtatgatctatttcttttcaaataatctttgagatcccaggaaaaaaaaaatgctctgctccattgagctataatgtaaatgtgtttgtttaaaaaacaggtgaggcaagtgagtgatttattgttcctgaggaagtatatctgattttttttctcatactccaaaagctagtccctactctttaataaaaataatgggtaactttttgtttttcactagcgaacttccatgacatttcctttctatgtagtgtgattaatgcaatacatattatagttatctatacacagtgtaagatttaacaaactgaaatgatccacctcatatgtgagtccgtccaaaagatgttactgctctgggtgggccagtgttctatatcggttatactaactttcatttaaagtatttattctaaaatgcctctgagaaacagtaaaaaataaaaacaacaagttgtctaaaatgcaacagcttttatagtaaatgtacatttataaataaaatactcaaatcaaaaaaaaaaac

SEQ ID NO: 314157 - DNA, 1588 bp, Homo sapiens
atttactcacctgggagtagtccaatcacaggaggagcaagctactattattggggaaagggggactatttattctgccttaaatcaatggcaaataagtcaagatgacattttgtgaatgtagactatggatacactcctaatagattgatgtagtcataaaagggggtcaagtagatgtttttctgttatgtaagcaataatttttccgtgtcttattgagtatggctagcgattatttattacatgctagatgggttctttgcatgtgggttccatataggtgcagaaatttcctcagccactggagggatttcgaccatatttgtcatttggatgagctgttattagattgaaatctacacatcatttcattaaaaattgtgccttagaaaacgcaaagctgttgcacatggcgataaattatggatgcagtacattgaagagagatgaagtcacttccaagtttccaagacttctcatggaggtgtttgctgttttacaggaaaaaataaaaataaaaaaagaaaaaaagaaaaaattaaaaagaaaaattgttttgaaaatgtacagatcaagtccaatattttgattatccacctgcatgttttattaaatattttgataatgtggatgtttacactttgcatgatattagcagagtaccactagtaatgcacaaacatgtacaatatggtcattcataaccgatttttatagaatactttttacatgtgcaactccatccgttatgtaaggattacatgaatattgcacattcccttctggtttcacaaacccatttatacatatttcttagtgaggctcattgtacatgtattgaagctagaatcgagtcaagaaaaataaagccccattctccaactgcaaaatgtgctttcccataatgaacactagtcaccagcacagaataatctccaacattttctaaattctaattgccaactgtttctatttatatttgatttatatttcatttggagtctgttacatggcagcttaggcagactagatcttgttttttccaatgcagcataatgagtatgatctatttcttttcaaataatctttgagatcccaggaaaaaaaaaatgctctgctccattgagctataatgtaaatgtgtttgtttaaaaaacaggtgaggcaagtgagtgatttattgttcctgaggaagtatatctgattttttttctcatactccaaaagctagtccctactctttaataaaaataatgggtaactttttgtttttcactagcgaacttccatgacatttcctttctatgtagtgtgattaatgcaatacatattatagttatctatacacagtgtaagatttaacaaactgaaatgatccacctcatatgtgagtccgtccaaaagatgttactgctctgggtgggccagtgttctatatcggttatactaactttcatttaaagtatttattctaaaatgcctctgagaaacagtaaaaaataaaaacaacaagttgtctaaaatgcaacagcttttatagtaaatgtacatttataaataaaatactcaaatcaaaaaaaaaaac

SEQ ID NO: 314158 - DNA, 3284 bp, Homo sapiens
attcggcacaggcgtaatacagttttacttcatggaacaccgccctctttccccacaaattctacccaggttataccttttaattatcttaattttattttttaaatgcatttccaagtgagaggagcctggggttcaaataccatttttctagctcttctttaaacctattttggcacctacatataaaatgatattgacccgattcagtgacatcactgaagacaaagacggtcacattttggcgtttgcggcaaaaggaggcggtggggtgccagcacgcccaccccccgcccagggccagaacacaccgcccagttcacgcgctgtgcgcagcccgggaagggggcagttttccaagcccggtagcgcccccacgcggcaggaagcccaggcgccggagacgcgacggggctgatcgcggtccctcttgtgttcgctctctccacactcaggagcaccagcatgtttgacatgcggtgtgaggaggaggccgcggtgcagccgcacagcagggcccgccaggagcagctgcagctgataaataaccagctgagggaagaggacgacaaatggcaagatgacctggctcgttggaagagtcgtagaagaagtgtttctcaggacttaatcaagaaagaggaagaaaggaaaaaaatggagaagttactggctggagaagatgggacaagtgaacgaaggaaaagcatcaaaacctacagagaaattgttcaagaaaaagagcggagagagagagagctgcatgaagcatataagaacgctcggtcccaggaggaggcagaggggatccttcaacagtacattgagaggttcaccatcagtgaggctgttctcgaacgcttggagatgccaaaaattctggaaagaagccattcaacagagccaaatttatcctccttcctgaatgaccccaatcccatgaaatacctgcggcaacagtcactgcctccacccaaattcactgccactgttgaaaccaccattgctcgtgccagtgttctggataccagcatgtcagcaggcagtgggtctccaagcaaaactgtcactcccaaagcagtgcctatgctgacacccaagccttactcccagcccaaaaattctcaagatgttctgaagacctttaaggtagacgggaaagtcagtgtgaatggagagacggttcatagagaggaggagaaggaaagagagtgtcccacggtggcacctgcccactccttaaccaaatcccagatgtttgaaggtgtggccagagtgcacgggtctccactggagctgaaacaagacaacggtagcatcgagatcaacataaagaagccaaactctgttccccaagagctcgcagcaaccactgagaaaacggaaccgaatagtcaagaggacaagaatgatggtggaaaatcaagaaaagggaatatagaacttgcctcatcagaaccacagcattttacaacaactgtgactcgatgcagcccgaccgtggcctttgtggaatttccctccagcccccagctgaagaatgatgtgtcggaagaaaaagaccagaagaaaccagaaaatgaaatgagtggaaaggtggagttggtgctgtcacaaaaggtggtaaagccaaaatctccagaacccgaagcaacgctgacatttccatttctggacaaaatgcctgaagccaaccaactacatttgccaaatctcaattctcaagtggattctccaagcagtgagaagtcacctgttatgacaccttttaagttctgggcatgggacccagaagaggagcgcaggcgacaggaaaaatggcaacaggaacaggaacgtttgctccaggagagataccagaaggagcaggacaagctgaaagaagagtgggaaaaggcccaaaaggaggtggaagaggaagaacgcagatactatgaggaggagcgtaagataattgaagacactgtggttccatttactgtttcttcaagttccgctgaccagctgtctacctcttcctccatgactgaaggcagtgggacaatgaataagatagacctgggaaactgtcaagatgaaaaacaagacagaagatggaagaaatcattccagggagatgacagtgacttattgctgaagactagggaaagtgatcgactggaggagaagggcagcctaactgaaggggccttggctcattctgggaaccctgtatcaaaaggagtccatgaagaccatcagctggataccgaggctggggccccacactgtggaacaaacccacagcttgctcaggatccatcccagaatcagcagacatcaaatccaacgcacagttcagaagatgtgaagccaaaaaccctcccgctggataaaagcattaaccatcagatcgagtctcccagtgaaaggcggaagtctataagtggaaagaagctgtgctcttcctgtgggcttcctttgggtaaaggagctgcaatgatcatcgagaccctcaatctctattttcacatccagtgtttcaggtgtggaatttgtaaaggccagcttggagatgcagtgagtgggacggatgttaggattcgaaatggtctcctgaactgtaatgattgctacatgcgatccagaagtgccgggcagcctacaacattgtgacacggctttcaagcttccggatcactcaccatttctttactgagagtgtcccctggcaactgcttaacaaaatcccaagctcaggggcttctcagcatttacctaatttctgaaaggctcttctgaaaggtggtatctgttctttcgtagcacagtgtttatgtttttcctgtttattgttttggttttttttttttttttgcatttgcacagtatacacaaaagaatatggggttgtaatgatcctgaatagctcaaaaaaggttttagcatggtcaaacaggcttatggtttaaaatgtgttattctcttctttgggaattagctaaatgatgcaataaacctgttttgttttagaatgtctaggaattaaacactttatgtttacagaattgagctgcagaaagtgcaagacatgccaatttgagacacacggtcttctaagactgaaggataaatttaatgcatttcagaaactaaacatcacagcaagctctatctctgagctataatttgtttttaatgcaaagacactagtttgataatatatactgtaatcctgaaacatttgtgttacttacctttggaggtagaaattataccaataaattattgcaccgttagtatta

SEQ ID NO: 314159 - DNA, 1018 bp, Homo sapiens
attcggcacaggcgtaatacagttttacttcatggaacaccgccctctttccccacaaattctacccaggttataccttttaattatcttaattttattttttaaatgcatttccaagtgagaggagcctggggttcaaataccatttttctagctcttctttaaacctattttggcacctacatataaaatgatattgacccgattcagtgacatcactgaagacaaagacggtcacattttggcgtttgcggcaaaaggaggcggtggggtgccagcacgcccaccccccgcccagggccagaacacaccgcccagttcacgcgctgtgcgcagcccgggaagggggcagttttccaagcccggtagcgcccccacgcggcaggaagcccaggcgccggagacgcgacggggctgatcgcggtccctcttgtgttcgctctctccacactcaggagcaccagcatgtttgacatgcggtgtgaggaggaggccgcggtgcagccgcacagcagggcccgccaggagcagctgcagctgataaataaccagctgagggaagaggacgacaaatggcaagatgacctggctcgttggaagagtcgtagaagaagtgtttctcaggacttaatcaagaaagaggaagaaaggaaaaaaatggagaagttactggctggagaagatgggacaagtgaacgaaggaaaagcatcaaaacctacagagaaattgttcaagaaaaagagcggagagagagagagctgcatgaagcatataagaacgctcggtcccaggaggaggcagaggggatccttcaacagtacattgagaggttcaccatcagtgaggctgttctcgaacgcttggagatgccaaaaattctggaaagaaaagaacgcgttctttcattgcagggctgacaaagactgaacaggatgttattcttgcagctaaggacatttgccttttgaccttttttcggctatgaaacagctattgggtagggaatttttatcggga

SEQ ID NO: 314160 - DNA, 407 bp, Homo sapiens
tctgagcacactgtcattcagcttatattgccaggacgggatatggactgaatgtacttcatggcattgcagaataaatggtcctatagatatttgattttcttttccttctgtacgtttctggatgtaactccattgcagaaccacagcattttacaacaactgtgactcgatgcagcccgaccgtggcctttgtggaatttccctccagcccccagctgaagaatgatgtgtcggaagaaaaagaccagaagaaaccagaaaatgaaatgagtggaaaggtggagttggtgctgtcacaaaaggtgaagtgcagagtggaggaaagcggttaaacccacaagttaacatggccccatattacagctagctgctgctgtggcagttgtgaataatgaagatttatt

SEQ ID NO: 314161 - DNA, 5524 bp, Homo sapiens
attcggcacaggcgtaatacagttttacttcatggaacaccgccctctttccccacaaattctacccaggttataccttttaattatcttaattttattttttaaatgcatttccaagtgagaggagcctggggttcaaataccatttttctagctcttctttaaacctattttggcacctacatataaaatgatattgacccgattcagtgacatcactgaagacaaagacggtcacattttggcgtttgcggcaaaaggaggcggtggggtgccagcacgcccaccccccgcccagggccagaacacaccgcccagttcacgcgctgtgcgcagcccgggaagggggcagttttccaagcccggtagcgcccccacgcggcaggaagcccaggcgccggagacgcgacggggctgatcgcggtccctcttgtgttcgctctctccacactcaggagcaccagcatgtttgacatgcggtgtgaggaggaggccgcggtgcagccgcacagcagggcccgccaggagcagctgcagctgataaataaccagctgagggaagaggacgacaaatggcaagatgacctggctcgttggaagagtcgtagaagaagtgtttctcaggacttaatcaagaaagaggaagaaaggaaaaaaatggagaagttactggctggagaagatgggacaagtgaacgaaggaaaagcatcaaaacctacagagaaattgttcaagaaaaagagcggagagagagagagctgcatgaagcatataagaacgctcggtcccaggaggaggcagaggggatccttcaacagtacattgagaggttcaccatcagtgaggctgttctcgaacgcttggagatgccaaaaattctggaaagaagccattcaacagagccaaatttatcctccttcctgaatgaccccaatcccatgaaatacctgcggcaacagtcactgcctccacccaaattcactgccactgttgaaaccaccattgctcgtgccagtgttctggataccagcatgtcagcaggcagtgggtctccaagcaaaactgtcactcccaaagcagtgcctatgctgacacccaagccttactcccagcccaaaaattctcaagatgttctgaagacctttaaggtagacgggaaagtcagtgtgaatggagagacggttcatagagaggaggagaaggaaagagagtgtcccacggtggcacctgcccactccttaaccaaatcccagatgtttgaaggtgtggccagagtgcacgggtctccactggagctgaaacaagacaacggtagcatcgagatcaacataaagaagccaaactctgttccccaagagctcgcagcaaccactgagaaaacggaaccgaatagtcaagaggacaagaatgatggtggaaaatcaagaaaagggaatatagaacttgcctcatcagaaccacagcattttacaacaactgtgactcgatgcagcccgaccgtggcctttgtggaatttccctccagcccccagctgaagaatgatgtgtcggaagaaaaagaccagaagaaaccagaaaatgaaatgagtggaaaggtggagttggtgctgtcacaaaaggtggtaaagccaaaatctccagaacccgaagcaacgctgacatttccatttctggacaaaatgcctgaagccaaccaactacatttgccaaatctcaattctcaagtggattctccaagcagtgagaagtcacctgttatgacaccttttaagttctgggcatgggacccagaagaggagcgcaggcgacaggaaaaatggcaacaggaacaggaacgtttgctccaggagagataccagaaggagcaggacaagctgaaagaagagtgggaaaaggcccaaaaggaggtggaagaggaagaacgcagatactatgaggaggagcgtaagataattgaagacactgtggttccatttactgtttcttcaagttccgctgaccagctgtctacctcttcctccatgactgaaggcagtgggacaatgaataagatagacctgggaaactgtcaagatgaaaaacaagacagaagatggaagaaatcattccagggagatgacagtgacttattgctgaagactagggaaagtgatcgactggaggagaagggcagcctaactgaaggggccttggctcattctgggaaccctgtatcaaaaggagtccatgaagaccatcagctggataccgaggctggggccccacactgtggaacaaacccacagcttgctcaggatccatcccagaatcagcagacatcaaatccaacgcacagttcagaagatgtgaagccaaaaaccctcccgctggataaaagcattaaccatcagatcgagtctcccagtgaaaggcggaagtctataagtggaaagaagctgtgctcttcctgtgggcttcctttgggtaaaggagctgcaatgatcatcgagaccctcaatctctattttcacatccagtgtttcaggtgtggaatttgtaaaggccagcttggagatgcagtgagtgggacggatgttaggattcgaaatggtctcctgaactgtaatgattgctacatgcgatccagaagtgccgggcagcctacaacattgtgacacggctttcaagcttccggatcactcaccatttctttactgagagtgtcccctggcaactgcttaacaaaatcccaagctcaggggcttctcagcatttacctaatttctgaaaggctcttctgaaaggtggtatctgttctttcgtagcacagtgtttatgtttttcctgtttattgttttggttttttttttttttttgcatttgcacagtatacacaaaagaatatggggttgtaatgatcctgaatagctcaaaaaaggttttagcatggtcaaacaggcttatggtttaaaatgtgttattctcttctttgggaattagctaaatgatgcaataaacctgttttgttttagaatgtctaggaattaaacactttatgtttacagaattgagctgcagaaagtgcaagacatgccaatttgagacacacggtcttctaagactgaaggataaatttaatgcatttcagaaactaaacatcacagcaagctctatctctgagctataatttgtttttaatgcaaagacactagtttgataatatatactgtaatcctgaaacatttgtgttacttacctttggaggtagaaattataccaataaattattgcaccgttagtattagattctgtgtaccttggaagttatgtcattaatataggctggttcatcaaataaagcaaaaccttgcaatatcagctagatttacactccgggacgttgcccaaaggtaggaagaaagcagagggaaatatttcagtcatcatttccaaagtcattatcaaaatctgtgaggaagtttaatcttccaaagagtcaatgtcagacatcaggcctctgttgcctgcttctctcgaggcactagattaggagtcttcaataagagacttaacatgaggtatatggaagatgaggcaccgagataagttcatcattaggtgtgagcactgctcacccttgctggcaagttctccttaagggcctgaagcacaggtgtccaaagaaaagcgttaagtccatcttaatagaatctatgtggtatatgatgtggtcagcccctggtctgtgatcagcaagaacctacagcacagattatgccctgcccacttcaatgaatacctactctcctccattctccatcactttttttgctatcaagaactccggaccttgcccatggagaagtttagagaggaactcttgtggagagctggtttattttctgccctgtgcgacgagtttcagctggccaagaaaggagtcaagttattaaaaagcatcacaatgtagatctccaggctggttttttgttttttgttgttaagactggggaaagggggactatttattctgccttaaatcaatggcaaataagtcaagatgacattttgtgaatgtagactatggatacactcctaatagattgatgtagtcataaaagggggtcaagtagatgtttttctgttatgtaagcaataatttttccgtgtcttattgagtatggctagcgattatttattacatgctagatgggttctttgcatgtgggttccatataggtgcagaaatttcctcagccactggagggatttcgaccatatttgtcatttggatgagctgttattagattgaaatctacacatcatttcattaaaaattgtgccttagaaaacgcaaagctgttgcacatggcgataaattatggatgcagtacattgaagagagatgaagtcacttccaagtttccaagacttctcatggaggtgtttgctgttttacaggaaaaaataaaaataaaaaaagaaaaaaagaaaaaattaaaaagaaaaattgttttgaaaatgtacagatcaagtccaatattttgattatccacctgcatgttttattaaatattttgataatgtggatgtttacactttgcatgatattagcagagtaccactagtaatgcacaaacatgtacaatatggtcattcataaccgatttttatagaatactttttacatgtgcaactccatccgttatgtaaggattacatgaatattgcacattcccttctggtttcacaaacccatttatacatatttcttagtgaggctcattgtacatgtattgaagctagaatcgagtcaagaaaaataaagccccattctccaactgcaaaatgtgctttcccataatgaacactagtcaccagcacagaataatctccaacattttctaaattctaattgccaactgtttctatttatatttgatttatatttcatttggagtctgttacatggcagcttaggcagactagatcttgttttttccaatgcagcataatgagtatgatctatttcttttcaaataatctttgagatcccaggaaaaaaaaaatgctctgctccattgagctataatgtaaatgtgtttgtttaaaaaacaggtgaggcaagtgagtgatttattgttcctgaggaagtatatctgattttttttctcatactccaaaagctagtccctactctttaataaaaataatgggtaactttttgtttttcactagcgaacttccatgacatttcctttctatgtagtgtgattaatgcaatacatattatagttatctatacacagtgtaagatttaacaaactgaaatgatccacctcatatgtgagtccgtccaaaagatgttactgctctgggtgggccagtgttctatatcggttatactaactttcatttaaagtatttattctaaaatgcctctgagaaacagtaaaaaataaaaacaacaagttgtctaaaatgcaacagcttttatagtaaatgtacatttataaataaaatactcaaatcaaaaaaaaaaac

SEQ ID NO: 314162 - DNA, 5395 bp, Homo sapiens
cgctctcggcagacgccttcaccagatgtagtcctcaggggaagcagcgatgggagaggaagcgactctgaatccgacttgcctcatcggaagctgccagatgtgaagaaggatgacatgtctgcacggcggacttcccatggtgagccgaaatcagcagtgccttttaaccagtacctcccgaacaaaagcaatcagacggcctacgtccccgcgcctctgagaaagaagaaagcagagagagaggaataccgcaagagctggagtaccgccacctccccgctgggtggggagaggcccttcagatacggtccgagaactcctgtgtctgatgacgcagagagcaccagcatgtttgacatgcggtgtgaggaggaggccgcggtgcagccgcacagcagggcccgccaggagcagctgcagctgataaataaccagctgagggaagaggacgacaaatggcaagatgacctggctcgttggaagagtcgtagaagaagtgtttctcaggacttaatcaagaaagaggaagaaaggaaaaaaatggagaagttactggctggagaagatgggacaagtgaacgaaggaaaagcatcaaaacctacagagaaattgttcaagaaaaagagcggagagagagagagctgcatgaagcatataagaacgctcggtcccaggaggaggcagaggggatccttcaacagtacattgagaggttcaccatcagtgaggctgttctcgaacgcttggagatgccaaaaattctggaaagaagccattcaacagagccaaatttatcctccttcctgaatgaccccaatcccatgaaatacctgcggcaacagtcactgcctccacccaaattcactgccactgttgaaaccaccattgctcgtgccagtgttctggataccagcatgtcagcaggcagtgggtctccaagcaaaactgtcactcccaaagcagtgcctatgctgacacccaagccttactcccagcccaaaaattctcaagatgttctgaagacctttaaggtagacgggaaagtcagtgtgaatggagagacggttcatagagaggaggagaaggaaagagagtgtcccacggtggcacctgcccactccttaaccaaatcccagatgtttgaaggtgtggccagagtgcacgggtctccactggagctgaaacaagacaacggtagcatcgagatcaacataaagaagccaaactctgttccccaagagctcgcagcaaccactgagaaaacggaaccgaatagtcaagaggacaagaatgatggtggaaaatcaagaaaagggaatatagaacttgcctcatcagaaccacagcattttacaacaactgtgactcgatgcagcccgaccgtggcctttgtggaatttccctccagcccccagctgaagaatgatgtgtcggaagaaaaagaccagaagaaaccagaaaatgaaatgagtggaaaggtggagttggtgctgtcacaaaaggtggtaaagccaaaatctccagaacccgaagcaacgctgacatttccatttctggacaaaatgcctgaagccaaccaactacatttgccaaatctcaattctcaagtggattctccaagcagtgagaagtcacctgttatgacaccttttaagttctgggcatgggacccagaagaggagcgcaggcgacaggaaaaatggcaacaggaacaggaacgtttgctccaggagagataccagaaggagcaggacaagctgaaagaagagtgggaaaaggcccaaaaggaggtggaagaggaagaacgcagatactatgaggaggagcgtaagataattgaagacactgtggttccatttactgtttcttcaagttccgctgaccagctgtctacctcttcctccatgactgaaggcagtgggacaatgaataagatagacctgggaaactgtcaagatgaaaaacaagacagaagatggaagaaatcattccagggagatgacagtgacttattgctgaagactagggaaagtgatcgactggaggagaagggcagcctaactgaaggggccttggctcattctgggaaccctgtatcaaaaggagtccatgaagaccatcagctggataccgaggctggggccccacactgtggaacaaacccacagcttgctcaggatccatcccagaatcagcagacatcaaatccaacgcacagttcagaagatgtgaagccaaaaaccctcccgctggataaaagcattaaccatcagatcgagtctcccagtgaaaggcggaagtctataagtggaaagaagctgtgctcttcctgtgggcttcctttgggtaaaggagctgcaatgatcatcgagaccctcaatctctattttcacatccagtgtttcaggtgtggaatttgtaaaggccagcttggagatgcagtgagtgggacggatgttaggattcgaaatggtctcctgaactgtaatgattgctacatgcgatccagaagtgccgggcagcctacaacattgtgacacggctttcaagcttccggatcactcaccatttctttactgagagtgtcccctggcaactgcttaacaaaatcccaagctcaggggcttctcagcatttacctaatttctgaaaggctcttctgaaaggtggtatctgttctttcgtagcacagtgtttatgtttttcctgtttattgttttggttttttttttttttttgcatttgcacagtatacacaaaagaatatggggttgtaatgatcctgaatagctcaaaaaaggttttagcatggtcaaacaggcttatggtttaaaatgtgttattctcttctttgggaattagctaaatgatgcaataaacctgttttgttttagaatgtctaggaattaaacactttatgtttacagaattgagctgcagaaagtgcaagacatgccaatttgagacacacggtcttctaagactgaaggataaatttaatgcatttcagaaactaaacatcacagcaagctctatctctgagctataatttgtttttaatgcaaagacactagtttgataatatatactgtaatcctgaaacatttgtgttacttacctttggaggtagaaattataccaataaattattgcaccgttagtattagattctgtgtaccttggaagttatgtcattaatataggctggttcatcaaataaagcaaaaccttgcaatatcagctagatttacactccgggacgttgcccaaaggtaggaagaaagcagagggaaatatttcagtcatcatttccaaagtcattatcaaaatctgtgaggaagtttaatcttccaaagagtcaatgtcagacatcaggcctctgttgcctgcttctctcgaggcactagattaggagtcttcaataagagacttaacatgaggtatatggaagatgaggcaccgagataagttcatcattaggtgtgagcactgctcacccttgctggcaagttctccttaagggcctgaagcacaggtgtccaaagaaaagcgttaagtccatcttaatagaatctatgtggtatatgatgtggtcagcccctggtctgtgatcagcaagaacctacagcacagattatgccctgcccacttcaatgaatacctactctcctccattctccatcactttttttgctatcaagaactccggaccttgcccatggagaagtttagagaggaactcttgtggagagctggtttattttctgccctgtgcgacgagtttcagctggccaagaaaggagtcaagttattaaaaagcatcacaatgtagatctccaggctggttttttgttttttgttgttaagactggggaaagggggactatttattctgccttaaatcaatggcaaataagtcaagatgacattttgtgaatgtagactatggatacactcctaatagattgatgtagtcataaaagggggtcaagtagatgtttttctgttatgtaagcaataatttttccgtgtcttattgagtatggctagcgattatttattacatgctagatgggttctttgcatgtgggttccatataggtgcagaaatttcctcagccactggagggatttcgaccatatttgtcatttggatgagctgttattagattgaaatctacacatcatttcattaaaaattgtgccttagaaaacgcaaagctgttgcacatggcgataaattatggatgcagtacattgaagagagatgaagtcacttccaagtttccaagacttctcatggaggtgtttgctgttttacaggaaaaaataaaaataaaaaaagaaaaaaagaaaaaattaaaaagaaaaattgttttgaaaatgtacagatcaagtccaatattttgattatccacctgcatgttttattaaatattttgataatgtggatgtttacactttgcatgatattagcagagtaccactagtaatgcacaaacatgtacaatatggtcattcataaccgatttttatagaatactttttacatgtgcaactccatccgttatgtaaggattacatgaatattgcacattcccttctggtttcacaaacccatttatacatatttcttagtgaggctcattgtacatgtattgaagctagaatcgagtcaagaaaaataaagccccattctccaactgcaaaatgtgctttcccataatgaacactagtcaccagcacagaataatctccaacattttctaaattctaattgccaactgtttctatttatatttgatttatatttcatttggagtctgttacatggcagcttaggcagactagatcttgttttttccaatgcagcataatgagtatgatctatttcttttcaaataatctttgagatcccaggaaaaaaaaaatgctctgctccattgagctataatgtaaatgtgtttgtttaaaaaacaggtgaggcaagtgagtgatttattgttcctgaggaagtatatctgattttttttctcatactccaaaagctagtccctactctttaataaaaataatgggtaactttttgtttttcactagcgaacttccatgacatttcctttctatgtagtgtgattaatgcaatacatattatagttatctatacacagtgtaagatttaacaaactgaaatgatccacctcatatgtgagtccgtccaaaagatgttactgctctgggtgggccagtgttctatatcggttatactaactttcatttaaagtatttattctaaaatgcctctgagaaacagtaaaaaataaaaacaagtatctccatgaatccttttcctggagggcacccttcggcagacagagaagacatggtaga

SEQ ID NO: 314163 - DNA, 4331 bp, Homo sapiens
cgtgacccttactaaaaacttaagttcttcatagtgtggttataggacgtgatttgtgttgcttgttgttcaataccatgaaagagctttgggaattccagcatcttaggctcttttatatctctgagcacactgtcattcagcttatattgccaggacgggatatggactgaatgtacttcatggcattgcagaataaatggtcctatagatatttgattttcttttccttctgtacgtttctggatgtaactccattgcagaaccacagcattttacaacaactgtgactcgatgcagcccgaccgtggcctttgtggaatttccctccagcccccagctgaagaatgatgtgtcggaagaaaaagaccagaagaaaccagaaaatgaaatgagtggaaaggtggagttggtgctgtcacaaaaggtggtaaagccaaaatctccagaacccgaagcaacgctgacatttccatttctggacaaaatgcctgaagccaaccaactacatttgccaaatctcaattctcaagtggattctccaagcagtgagaagtcacctgttatgacaccttttaagttctgggcatgggacccagaagaggagcgcaggcgacaggaaaaatggcaacaggaacaggaacgtttgctccaggagagataccagaaggagcaggacaagctgaaagaagagtgggaaaaggcccaaaaggaggtggaagaggaagaacgcagatactatgaggaggagcgtaagataattgaagacactgtggttccatttactgtttcttcaagttccgctgaccagctgtctacctcttcctccatgactgaaggcagtgggacaatgaataagatagacctgggaaactgtcaagatgaaaaacaagacagaagatggaagaaatcattccagggagatgacagtgacttattgctgaagactagggaaagtgatcgactggaggagaagggcagcctaactgaaggggccttggctcattctgggaaccctgtatcaaaaggagtccatgaagaccatcagctggataccgaggctggggccccacactgtggaacaaacccacagcttgctcaggatccatcccagaatcagcagacatcaaatccaacgcacagttcagaagatgtgaagccaaaaaccctcccgctggataaaagcattaaccatcagatcgagtctcccagtgaaaggcggaagtctataagtggaaagaagctgtgctcttcctgtgggcttcctttgggtaaaggagctgcaatgatcatcgagaccctcaatctctattttcacatccagtgtttcaggtgtggaatttgtaaaggccagcttggagatgcagtgagtgggacggatgttaggattcgaaatggtctcctgaactgtaatgattgctacatgcgatccagaagtgccgggcagcctacaacattgtgacacggctttcaagcttccggatcactcaccatttctttactgagagtgtcccctggcaactgcttaacaaaatcccaagctcaggggcttctcagcatttacctaatttctgaaaggctcttctgaaaggtggtatctgttctttcgtagcacagtgtttatgtttttcctgtttattgttttggttttttttttttttttgcatttgcacagtatacacaaaagaatatggggttgtaatgatcctgaatagctcaaaaaaggttttagcatggtcaaacaggcttatggtttaaaatgtgttattctcttctttgggaattagctaaatgatgcaataaacctgttttgttttagaatgtctaggaattaaacactttatgtttacagaattgagctgcagaaagtgcaagacatgccaatttgagacacacggtcttctaagactgaaggataaatttaatgcatttcagaaactaaacatcacagcaagctctatctctgagctataatttgtttttaatgcaaagacactagtttgataatatatactgtaatcctgaaacatttgtgttacttacctttggaggtagaaattataccaataaattattgcaccgttagtattagattctgtgtaccttggaagttatgtcattaatataggctggttcatcaaataaagcaaaaccttgcaatatcagctagatttacactccgggacgttgcccaaaggtaggaagaaagcagagggaaatatttcagtcatcatttccaaagtcattatcaaaatctgtgaggaagtttaatcttccaaagagtcaatgtcagacatcaggcctctgttgcctgcttctctcgaggcactagattaggagtcttcaataagagacttaacatgaggtatatggaagatgaggcaccgagataagttcatcattaggtgtgagcactgctcacccttgctggcaagttctccttaagggcctgaagcacaggtgtccaaagaaaagcgttaagtccatcttaatagaatctatgtggtatatgatgtggtcagcccctggtctgtgatcagcaagaacctacagcacagattatgccctgcccacttcaatgaatacctactctcctccattctccatcactttttttgctatcaagaactccggaccttgcccatggagaagtttagagaggaactcttgtggagagctggtttattttctgccctgtgcgacgagtttcagctggccaagaaaggagtcaagttattaaaaagcatcacaatgtagatctccaggctggttttttgttttttgttgttaagactggggaaagggggactatttattctgccttaaatcaatggcaaataagtcaagatgacattttgtgaatgtagactatggatacactcctaatagattgatgtagtcataaaagggggtcaagtagatgtttttctgttatgtaagcaataatttttccgtgtcttattgagtatggctagcgattatttattacatgctagatgggttctttgcatgtgggttccatataggtgcagaaatttcctcagccactggagggatttcgaccatatttgtcatttggatgagctgttattagattgaaatctacacatcatttcattaaaaattgtgccttagaaaacgcaaagctgttgcacatggcgataaattatggatgcagtacattgaagagagatgaagtcacttccaagtttccaagacttctcatggaggtgtttgctgttttacaggaaaaaataaaaataaaaaaagaaaaaaagaaaaaattaaaaagaaaaattgttttgaaaatgtacagatcaagtccaatattttgattatccacctgcatgttttattaaatattttgataatgtggatgtttacactttgcatgatattagcagagtaccactagtaatgcacaaacatgtacaatatggtcattcataaccgatttttatagaatactttttacatgtgcaactccatccgttatgtaaggattacatgaatattgcacattcccttctggtttcacaaacccatttatacatatttcttagtgaggctcattgtacatgtattgaagctagaatcgagtcaagaaaaataaagccccattctccaactgcaaaatgtgctttcccataatgaacactagtcaccagcacagaataatctccaacattttctaaattctaattgccaactgtttctatttatatttgatttatatttcatttggagtctgttacatggcagcttaggcagactagatcttgttttttccaatgcagcataatgagtatgatctatttcttttcaaataatctttgagatcccaggaaaaaaaaaatgctctgctccattgagctataatgtaaatgtgtttgtttaaaaaacaggtgaggcaagtgagtgatttattgttcctgaggaagtatatctgattttttttctcatactccaaaagctagtccctactctttaataaaaataatgggtaactttttgtttttcactagcgaacttccatgacatttcctttctatgtagtgtgattaatgcaatacatattatagttatctatacacagtgtaagatttaacaaactgaaatgatccacctcatatgtgagtccgtccaaaagatgttactgctctgggtgggccagtgttctatatcggttatactaactttcatttaaagtatttattctaaaatgcctctgagaaacagtaaaaaataaaaacaacaagttgtctaaaatgcaacagcttttatagtaaatgtacatttataaataaaatactcaaatcaaaaaaaaaaac

SEQ ID NO: 314164 - DNA, 1907 bp, Homo sapiens
attcggcacaggcgtaatacagttttacttcatggaacaccgccctctttccccacaaattctacccaggttataccttttaattatcttaattttattttttaaatgcatttccaagtgagaggagcctggggttcaaataccatttttctagctcttctttaaacctattttggcacctacatataaaatgatattgacccgattcagtgacatcactgaagacaaagacggtcacattttggcgtttgcggcaaaaggaggcggtggggtgccagcacgcccaccccccgcccagggccagaacacaccgcccagttcacgcgctgtgcgcagcccgggaagggggcagttttccaagcccggtagcgcccccacgcggcaggaagcccaggcgccggagacgcgacggggctgatcgcggtccctcttgtgttcgctctctccacactcaggagcaccagcatgtttgacatgcggtgtgaggaggaggccgcggtgcagccgcacagcagggcccgccaggagcagctgcagctgataaataaccagctgagggaagaggacgacaaatggcaagatgacctggctcgttggaagagtcgtagaagaagtgtttctcaggacttaatcaagaaagaggaagaaaggaaaaaaatggagaagttactggctggagaagatgggacaagtgaacgaaggaaaagcatcaaaacctacagagaaattgttcaagaaaaagagcggagagagagagagctgcatgaagcatataagaacgctcggtcccaggaggaggcagaggggatccttcaacagtacattgagaggttcaccatcagtgaggctgttctcgaacgcttggagatgccaaaaattctggaaagaagccattcaacagagccaaatttatcctccttcctgaatgaccccaatcccatgaaatacctgcggcaacagtcactgcctccacccaaattcactgccactgttgaaaccaccattgctcgtgccagtgttctggataccagcatgtcagcaggcagtgggtctccaagcaaaactgtcactcccaaagcagtgcctatgctgacacccaagccttactcccagcccaaaaattctcaagatgttctgaagacctttaaggtagacgggaaagtcagtgtgaatggagagacggttcatagagaggaggagaaggaaagagagtgtcccacggtggcacctgcccactccttaaccaaatcccagatgtttgaaggtgtggccagagtgcacgggtctccactggagctgaaacaagacaacggtagcatcgagatcaacataaagaagccaaactctgttccccaagagctcgcagcaaccactgagaaaacggaaccgaatagtcaagaggacaagaatgatggtggaaaatcaagaaaagggaatatagaacttgcctcatcagaaccacagcattttacaacaactgtgactcgatgcagcccgaccgtggcctttgtggaatttccctccagcccccagctgaagaatgatgtgtcggaagaaaaagaccagaagaaaccagaaaatgaaatgagtggaaaggtggagttggtgctgtcacaaaaggtggtaaagccaaaatctccagaacccgaagcaacgctgacatttccatttctggacaaaatgcctgaagccaaccaactacatttgccaaatctcaattctcaagtggattctccaagcagtgagaagtcacctgttatgacaccttttaagttctgggcatgggacccagaagaggagcgcaggcgacaggaaaaatggcaacaggaacaggaacgtttgctccaggagagataccagaagggtcacagaccctggaggagcagctctgaagcaccttctgaggg

SEQ ID NO: 314165 - DNA, 2100 bp, Homo sapiens
aaatgatgctaagcataacgtagatgagacgccaggctgaaccaggggaaggctggcattgttagtgtccccaactagcagtccacctttatctgtggcagctataaatgtacaggacccatcagagtcctaagaaaatgagagtaattatctctggcatcatccacatttccgactctttccaatctcttttccctttttctgtaatgtacccagcatccccctattgtattttggttgcccaagattcttgattctttgagtgtgtagtagcatttcttaaaatgagatcatcagaccaacccttgattcacatgaaagctgtaatgacacaacaaagagaaggcgacagttttaaagtataattgtcagccaaatgtgtattttatatttggttcatagaatatatctagatgtggggaaagtctcctatttggtaatttagttaaaatgtaaatgttatatcacagcatatgttggtatgttttggagtgtgcttccattgtgctcagcttttgaaaagtttgaaatccactttagtcaaatgtagtcaatgggatttccagagatacatattgtttttcttagtgtaccacacactccttgaaggcagatactgtacttaatatatcactgtcttccataatactgccctaggtctttttagtttttaagagaccgggtctcgctatgtttcccatgctgaactcaaatgcctgggcttaagcaatcctcccacctcagcctctggagtagctgggactacaggggcatgcaccaccaggcctggcttcctaggagggtctttaaagagaaaatatttgttcaattgaaaacaggattcttgtcatctacaactccaacacagcctgaaaatatccacattataacctggaccttagacctactttctccactatcctgcaaagctacatctgtaactacctattggctatctatatgagtcctcaagcatctcagactttacatgaataaaactcaacttccttcccattcaaatctgtttattttcttctgtaagagaaagataccatttgagactccagaatctgcctctaactctcaacaagactctgcaattactcaagtatcctttccatcctcattgccctgctgttattacataggccctggttcaagtccttgttacttgttcccattattgcaataacttctaattccaatgccgttgtgtgatcccattttaaacacggccagagcagtcttccaacaacatagctctaatctagtttcatccccacttttacatgcttcagtggctttcccagtgacttggcatggaacacgtcctcagttgccatacattccagctaactcttacccaacctttctttgttcacacagtttccttttccttcctcattgacccatccgcatctctgtttatccaagacttctctgtgatagctgacccttagtctttctctcccctattcctccagactagatcctgtctccttcctgcagccccgacacagccttcagttcatatcttttgcatgatgcttagcaccttctatccctaaggacaacttactcatttgagatttctggcagggtaccttgcatgcagtggacactcagtatttgctgaattaaattccttcctatggatcccttctgattttttttaagtgcctctaatacacatatcattctagggctcatgccacttttaatgtcattttctaaaggaaaatcttatctatgatattttcccttataagagatagttgttttgagtagggttttttaaaagataaaggtagtaggaaattttttaaagcctaaatatcaaattcctttccctttggagttgggggaaggaatgaagggggagcaacttgctctttcatatgagttggtcatagcatgtaagaaccaatcttgaaatatcgttttttttttaatggcttataatgtatttctagaaatactttgtacttaaaatgataacagtttgtatctttttgtccatataaagatactttataaataaaaaaattagcattgtaaataatgttaatatgtatttatacaaaataaatttactataat

SEQ ID NO: 314166 - DNA, 654 bp, Homo sapiens
aaatgatgctaagcataacgtagatgagacgccaggctgaaccaggggaaggctggcattgttagtgtccccaactagcagtccacctttatctgtggcagctataaatgtacaggacccatcagagtcctaagaaaatgagagtaattatctctggcatcatccacatttccgactctttccaatctcttttccctttttctgtaatgtacccagcatccccctattgtattttggttgcccaagattcttgattctttgagtgtgtagtagcatttcttaaaatgagatcatcagaccaacccttgattcacatgaaagctgtaatgacacaacaaagagaaggcgacagttttaaagtataattgtcagccaaatgtgtattttatatttggttcatagaatatatctagatgtggggaaagtctcctatttggtaatttagttaaaatgtaaatgttatatcacagcatatgttggtatgttttggagtgtgcttccattgtgctcagcttttgaaaagtttgaaaccccatctctattaaaaatacaagaattagccggtcgtggtggtacatggctgtagtcctagctattcagcaggctgaggcaggagcatcgcttgaacccaggaggcagaggttgcagtgagcc

SEQ ID NO: 314167 - DNA, 2602 bp, Homo sapiens
aaatgatgctaagcataacgtagatgagacgccaggctgaaccaggggaaggctggcattgttagtgtccccaactagcagtccacctttatctgtggcagctataaatgtacaggacccatcagagtcctaagaaaatgagagtaattatctctggcatcatccacatttccgactctttccaatctcttttccctttttctgtaatgtacccagcatccccctattgtattttggttgcccaagattcttgattctttgagtgtgtagtagcatttcttaaaatgagatcatcagaccaacccttgattcacatgaaagctgtaatgacacaacaaagagaaggcgacagttttaaagtataattgtcagccaaatgtgtattttatatttggttcatagaatatatctagatgtggggaaagtctcctatttggtaatttagttaaaatgtaaatgttatatcacagcatatgttggtatgttttggagtgtgcttccattgtgctcagcttttgaaaagtttgaaatccactttagtcaaatgtagtcaatgggatttccagagatacatattgtttttcttagtgtaccacacactccttgaaggcagatactgtacttaatatatcactgtcttccataatactgccctaggtctttttagtttttaagagaccgggtctcgctatgtttcccatgctgaactcaaatgcctgggcttaagcaatcctcccacctcagcctctggagtagctgggactacaggggcatgcaccaccaggcctggcttcctaggagggtctttaaagagaaaatatttgttcaattgaaaacaggattcttgtcatctacaactccaacacagcctgaaaatatccacattataacctggaccttagacctactttctccactatcctgcaaagctacatctgtaactacctattggctatctatatgagtcctcaagcatctcagactttacatgaataaaactcaacttccttcccattcaaatctgtttattttcttctgtaagagaaagataccatttgagactccagaatctgcctctaactctcaacaagactctgcaattactcaagtatcctttccatcctcattgccctgctgttattacataggccctggttcaagtccttgttacttgttcccattattgcaataacttctaattccaatgccgttgtgtgatcccattttaaacacggccagagcagtcttccaacaacatagctctaatctagtttcatccccacttttacatgcttcagtggctttcccagtgacttggcatggaacacgtcctcagttgccatacattccagctaactcttacccaacctttctttgttcacacagtttccttttccttcctcattgacccatccgcatctctgtttatccaagacttctctgtgatagctgacccttagtctttctctcccctattcctccagactagatcctgtctccttcctgcagccccgacacagccttcagttcatatcttttgcatgatgcttagcaccttctatccctaaggacaacttactcatttgagatttctggcagggtaccttgcatgcagtggacactcagtatttgctgaattaaattccttcctatggatcccttctgattttttttaagtgcctctaatacacatatcattctagggctcatgccacttttaatgtcattttctaaaggaaaatcttatctatgatattttcccttataagagatagttgttttgagtagggttttttaaaagataaaggtagtaggaaattttttaaagcctaaatatcaaattcctttccctttggagttgggggaaggaatgaagggggagcaacttgctctttcatatgagttggtcatagcatgtaagaaccaatcttgaaatatcgttttttttttaatggcttataatgtatttctagaaatactttgtacttaaaatgataacagtttgtatctttttgtccatataaagatactttataaataaaaaaattagcattgtaaataatgttaatatgtatttatacaaaataaatttactataatataaaaaaatggtgtgatttttttccccctcaagacagagtcttgctctgtcgcccaggctggagtgcagtggcgcgatctcggctcattgcaatcttcacttcctgggttcaagcaattctcctgcctcagcctcctgaggagctgggatgacaggtgcgcaccaccatgcccggctaattttttgtatttttagtagagacgggatttcaccatgttggccaggctggtctcaaactctgacctcaggtgatccacccgcctcaacctccccaagtgctaggattacaggcgtgagctactgagcctggccagcatcatagatttaaagatgaacttcggctagagtcacacatttaaagatgaacttcggctgggcacggtggctcatgcctgtaatcccagcactttggggaggccaaggcgagcggatcacttgaggtgaggagttcgagaccagcctggccaacatggtgaaaccctgtctctactaaaaatacaa

SEQ ID NO: 314168 - DNA, 1833 bp, Homo sapiens
  misc_feature (13)..(13): n is a, c, g, or t
acgtcgcaacagntaaacgagacggttaggagggtctttaaagagaaaatatttgttcaattgaaaacaggattcttgtcatctacaactccaacacagcctgaaaatatccacattataacctggaccttagacctactttctccactatcctgcaaagctacatctgtaactacctattggctatctatatgagtcctcaagcatctcagactttacatgaataaaactcaacttccttcccattcaaatctgtttattttcttctgtaagagaaagataccatttgagactccagaatctgcctctaactctcaacaagactctgcaattactcaagtatcctttccatcctcattgccctgctgttattacataggccctggttcaagtccttgttacttgttcccattattgcaataacttctaattccaatgccgttgtgtgatcccattttaaacacggccagagcagtcttccaacaacatagctctaatctagtttcatccccacttttacatgcttcagtggctttcccagtgacttggcatggaacacgtcctcagttgccatacattccagctaactcttacccaacctttctttgttcacacagtttccttttccttcctcattgacccatccgcatctctgtttatccaagacttctctgtgatagctgacccttagtctttctctcccctattcctccagactagatcctgtctccttcctgcagccccgacacagccttcagttcatatcttttgcatgatgcttagcaccttctatccctaaggacaacttactcatttgagatttctggcagggtaccttgcatgcagtggacactcagtatttgctgaattaaattccttcctatggatcccttctgattttttttaagtgcctctaatacacatatcattctagggctcatgccacttttaatgtcattttctaaaggaaaatcttatctatgatattttcccttataagagatagttgttttgagtagggttttttaaaagataaaggtagtaggaaattttttaaagcctaaatatcaaattcctttccctttggagttgggggaaggaatgaagggggagcaacttgctctttcatatgagttggtcatagcatgtaagaaccaatcttgaaatatcgttttttttttaatggcttataatgtatttctagaaatactttgtacttaaaatgataacagtttgtatctttttgtccatataaagatactttataaataaaaaaattagcattgtaaataatgttaatatgtatttatacaaaataaatttactataatataaaaaaatggtgtgatttttttccccctcaagacagagtcttgctctgtcgcccaggctggagtgcagtggcgcgatctcggctcattgcaatcttcacttcctgggttcaagcaattctcctgcctcagcctcctgaggagctgggatgacaggtgcgcaccaccatgcccggctaattttttgtatttttagtagagacgggatttcaccatgttggccaggctggtctcaaactctgacctcaggtgatccacccgcctcaacctccccaagtgctaggattacaggcgtgagctactgagcctggccagcatcatagatttaaagatgaacttcggctagagtcacacatttaaagatgaacttcggctgggcacggtggctcatgcctgtaatcccagcactttggggaggccaaggcgagcggatcacttgaggtgaggagttcgagaccagcctggccaacatggtgaaaccctgtctctactaaaaatacaa

SEQ ID NO: 314169 - DNA, 1542 bp, Homo sapiens
  misc_feature (68)..(68): n is a, c, g, or t
  misc_feature (102)..(102): n is a, c, g, or t
gagagttagaggcagattctggatctcaatggtatctttctcttacagaagaaaataaacagatttgnatgggaaggaagttgagttttattcatgtaaagnctgagatggttgttcccattattgcaataacttctaattccaatgccgttgtgtgatcccattttaaacacggccagagcagtcttccaacaacatagctctaatctagtttcatccccacttttacatgcttcagtggctttcccagtgacttggcatggaacacgtcctcagttgccatacattccagctaactcttacccaacctttctttgttcacacagtttccttttccttcctcattgacccatccgcatctctgtttatccaagacttctctgtgatagctgacccttagtctttctctcccctattcctccagactagatcctgtctccttcctgcagccccgacacagccttcagttcatatcttttgcatgatgcttagcaccttctatccctaaggacaacttactcatttgagatttctggcagggtaccttgcatgcagtggacactcagtatttgctgaattaaattccttcctatggatcccttctgattttttttaagtgcctctaatacacatatcattctagggctcatgccacttttaatgtcattttctaaaggaaaatcttatctatgatattttcccttataagagatagttgttttgagtagggttttttaaaagataaaggtagtaggaaattttttaaagcctaaatatcaaattcctttccctttggagttgggggaaggaatgaagggggagcaacttgctctttcatatgagttggtcatagcatgtaagaaccaatcttgaaatatcgttttttttttaatggcttataatgtatttctagaaatactttgtacttaaaatgataacagtttgtatctttttgtccatataaagatactttataaataaaaaaattagcattgtaaataatgttaatatgtatttatacaaaataaatttactataatataaaaaaatggtgtgatttttttccccctcaagacagagtcttgctctgtcgcccaggctggagtgcagtggcgcgatctcggctcattgcaatcttcacttcctgggttcaagcaattctcctgcctcagcctcctgaggagctgggatgacaggtgcgcaccaccatgcccggctaattttttgtatttttagtagagacgggatttcaccatgttggccaggctggtctcaaactctgacctcaggtgatccacccgcctcaacctccccaagtgctaggattacaggcgtgagctactgagcctggccagcatcatagatttaaagatgaacttcggctagagtcacacatttaaagatgaacttcggctgggcacggtggctcatgcctgtaatcccagcactttggggaggccaaggcgagcggatcacttgaggtgaggagttcgagaccagcctggccaacatggtgaaaccctgtctctactaaaaatacaa

SEQ ID NO: 314170 - DNA, 3180 bp, Homo sapiens
agcgggatccaagaggtgcagagcaagcgcatgcgtcgtgacggcccggcttaggcgactctgggcgggtctgggccgctccagtgttttggggcacagaagctgtgggaggagctggaggcttcaccgtggtaaccacagcgccgctgctgccccgccttgcaggcctcaggactgtcatcgcctctgggtgtgagggtactttggccaccgtccccggaaataaccgcgcctgcctctcaagataccccatcctctccacgccgctgccgctgccgccatgcaaggggaggacgccagatacctcaaaaggaaagttaaaggagggaatatagatgtacatccatcagaaaaagcactcattgttcactatgaagtggaagctaccattcttggagaaatgggggaccccatgttgggagaacgaaaagaatgtcaaaaaatcattcgacttaagagtctcaatgccaacacagatataacttccctggcaaggaaggtggttgaagaatgtaaactcattcatccttcaaaactaaatgaggtagaacagctgttgtactatctacagaaccgccgtgattcattgtcaggaaaagagaaaaaagaaaaatcaagcaagcctaaagatccacctccttttgaaggaatggagattgatgaagttgctaacattaatgacatggatgaatatattgagttattatatgaagatattcctgacaaagttcggggttctgctttgatcctgcagcttgctcgaaatcctgataacttggaagaactactattgaatgaaactgcccttggtgcattagcaagggtcctgagagaagactggaagcaaagtgtcgagttagctacaaacataatttacatctttttttgtttctccagcttttctcaatttcatggacttattactcactataaaattggagctctgtgtatgaatattattgatcatgagttaaaaagacatgagctttggcaagaagaactctcaaagaagaagaaagctgttgatgaagaccctgaaaaccaaaccttgagaaaggattatgaaaaaacctttaaaaagtaccaggggcttgtggtaaaacaggaacagctattacgagttgctctttatttgcttctgaatcttgctgaggatactcgtaccgaactgaaaatgaggaacaagaacatagttcacatgttggtgaaagcccttgatcgggacaattttgagctgctaattttagttgtgtcattcttgaagaaactcagcatttttatggagaataaaaatgatatggtggaaatggatattgttgaaaaactggtgaaaatgataccttgtgagcatgaagacctgctgaatatcaccctccgacttttactaaacctatcctttgacacaggactgaggaataagatggtacaagttggactgcttcccaagctcactgcactcctaggcaatgacaactacaaacaaatagcaatgtgtgttctttaccacataagcatggatgaccgctttaaatcaatgtttgcatacactgactgtataccacagttaatgaagatgctgtttgaatgttcagatgaacgaattgacttggaactcatttctttctgcattaatcttgctgctaacaaaagaaatgtacagcttatctgtgaaggaaatgggctgaagatgctcatgaagagggctctgaagtttaaggatccattgctgatgaaaatgattagaaacatttctcagcatgatggaccaactaaaaatctgtttattgattatgttggggaccttgcagcccagatctctaatgatgaagaagaggagtttgtgattgaatgtttgggaactcttgcaaacttgaccattccagacttagactgggaattggttcttaaagaatataagttggttccatacctcaaggataaactaaaaccaggtgctgcagaagatgatcttgttttagaagtggttataatgattggaactgtatccatggatgactcttgtgctgcattgctagccaaatctggcataatccctgcactcattgaattgctaaatgctcaacaagaagatgatgaatttgtgtgtcagataatttatgtcttctaccagatggttttccaccaagccacaagagacgtcataatcaaggaaacacaggctccagcatatctcatagacctaatgcatgataagaataatgaaatccgaaaggtctgtgataatacattagatattatagcggaatatgatgaagaatgggctaagaaaattcagagtgaaaagtttcgctggcataactctcagtggctggagatggtagagagtcgtcagatggatgagagtgagcagtacttgtatggtgatgatcgaattgagccatacattcatgaaggagatattctcgaaagacctgaccttttctacaactcagatggattaattgcctctgaaggagccataagtcccgatttcttcaatgattaccaccttcaaaatggagatgttgttgggcagcattcatttcctggcagccttggaatggatggctttggccaaccagttggcattcttggacgccctgccacagcatatggattccgccctgatgaaccttactactatggctatggatcttgataaagtatctgtttccatgtgtaatctcagcttagaagaaatctgtgtgggttgggttaattttggatctttgcctaataatgcatgttgatgttattgtgggtctgtgtttgtttttatttttatatgttgttagctgcagattaaccccagcccctctgtcttctgttaagtacagttgatactgacattgttcactcatcaaaccacatcttgatgctaagtaacatttcccatgagcctcaaaactgaatgctgaaaagctactagactggaaaacaaacactgcattatgtatgttaagtgactaatttaatttcaattaaaaagcgtaaagtgaaaatgaataagtgaaagtcatgtgtttatatttcacacatttcactacgaattacatgttaatatagggtgcgcgtgaattttattttttctcctttttttctgtttgtaaactcttgagtaatttgtataatatatgctacctttaaaatttataaaaagaacatcaccttcatattcca

SEQ ID NO: 314171 - DNA, 2870 bp, Homo sapiens
accaggaagagaattattttaaagggtccttttaactgaaatctcctttgtattaagatgtgctacatgagctcaaactaattggaaaggtggcaggataatggcattgatagccagtggatatgggctccttgggccccactggccatttgatggcatcccaaaggcaatcacaaggaaagttaaaggagggaatatagatgtacatccatcagaaaaagcactcattgttcactatgaagtggaagctaccattcttggagaaatgggggaccccatgttgggagaacgaaaagaatgtcaaaaaatcattcgacttaagagtctcaatgccaacacagatataacttccctggcaaggaaggtggttgaagaatgtaaactcattcatccttcaaaactaaatgaggtagaacagctgttgtactatctacagaaccgccgtgattcattgtcaggaaaagagaaaaaagaaaaatcaagcaagcctaaagatccacctccttttgaaggaatggagattgatgaagttgctaacattaatgacatggatgaatatattgagttattatatgaagatattcctgacaaagttcggggttctgctttgatcctgcagcttgctcgaaatcctgataacttggaagaactactattgaatgaaactgcccttggtgcattagcaagggtcctgagagaagactggaagcaaagtgtcgagttagctacaaacataatttacatctttttttgtttctccagcttttctcaatttcatggacttattactcactataaaattggagctctgtgtatgaatattattgatcatgagttaaaaagacatgagctttggcaagaagaactctcaaagaagaagaaagctgttgatgaagaccctgaaaaccaaaccttgagaaaggattatgaaaaaacctttaaaaagtaccaggggcttgtggtaaaacaggaacagctattacgagttgctctttatttgcttctgaatcttgctgaggatactcgtaccgaactgaaaatgaggaacaagaacatagttcacatgttggtgaaagcccttgatcgggacaattttgagctgctaattttagttgtgtcattcttgaagaaactcagcatttttatggagaataaaaatgatatggtggaaatggatattgttgaaaaactggtgaaaatgataccttgtgagcatgaagacctgctgaatatcaccctccgacttttactaaacctatcctttgacacaggactgaggaataagatggtacaagttggactgcttcccaagctcactgcactcctaggcaatgacaactacaaacaaatagcaatgtgtgttctttaccacataagcatggatgaccgctttaaatcaatgtttgcatacactgactgtataccacagttaatgaagatgctgtttgaatgttcagatgaacgaattgacttggaactcatttctttctgcattaatcttgctgctaacaaaagaaatgtacagcttatctgtgaaggaaatgggctgaagatgctcatgaagagggctctgaagtttaaggatccattgctgatgaaaatgattagaaacatttctcagcatgatggaccaactaaaaatctgtttattgattatgttggggaccttgcagcccagatctctaatgatgaagaagaggagtttgtgattgaatgtttgggaactcttgcaaacttgaccattccagacttagactgggaattggttcttaaagaatataagttggttccatacctcaaggataaactaaaaccaggtgctgcagaagatgatcttgttttagaagtggttataatgattggaactgtatccatggatgactcttgtgctgcattgctagccaaatctggcataatccctgcactcattgaattgctaaatgctcaacaagaagatgatgaatttgtgtgtcagataatttatgtcttctaccagatggttttccaccaagccacaagagacgtcataatcaaggaaacacaggctccagcatatctcatagacctaatgcatgataagaataatgaaatccgaaaggtctgtgataatacattagatattatagcggaatatgatgaagaatgggctaagaaaattcagagtgaaaagtttcgctggcataactctcagtggctggagatggtagagagtcgtcagatggatgagagtgagcagtacttgtatggtgatgatcgaattgagccatacattcatgaaggagatattctcgaaagacctgaccttttctacaactcagatggattaattgcctctgaaggagccataagtcccgatttcttcaatgattaccaccttcaaaatggagatgttgttgggcagcattcatttcctggcagccttggaatggatggctttggccaaccagttggcattcttggacgccctgccacagcatatggattccgccctgatgaaccttactactatggctatggatcttgataaagtatctgtttccatgtgtaatctcagcttagaagaaatctgtgtgggttgggttaattttggatctttgcctaataatgcatgttgatgttattgtgggtctgtgtttgtttttatttttatatgttgttagctgcagattaaccccagcccctctgtcttctgttaagtacagttgatactgacattgttcactcatcaaaccacatcttgatgctaagtaacatttcccatgagcctcaaaactgaatgctgaaaagctactagactggaaaacaaacactgcattatgtatgttaagtgactaatttaatttcaattaaaaagcgtaaagtgaaaatga

SEQ ID NO: 314172 - DNA, 2827 bp, Homo sapiens
agcgggatccaagaggtgcagagcaagcgcatgcgtcgtgacggcccggcttaggcgactctgggcgggtctgggccgctccagtgttttggggcacagaagctgtgggaggagctggaggcttcaccgtggtaaccacagcgccgctgctgccccgccttgcaggcctcaggactgtcatcgcctctgggtgtgagggtactttggccaccgtccccggaaataaccgcgcctgcctctcaagataccccatcctctccacgccgctgccgctgccgccatgcaaggggaggacgccagatacctcaaaaggaaagttaaaggagggaatatagatgtacatccatcagaaaaagcactcattgttcactatgaagtggaagctaccattcttggagaaatgggggaccccatgttgggagaacgaaaagaatgtcaaaaaatcattcgacttaagagtctcaatgccaacacagatataacttccctggcaaggaaggtggttgaagaatgtaaactcattcatccttcaaaactaaatgaggtagaacagctgttgtactatctacagaaccgccgtgattcattgtcaggaaaagagaaaaaagaaaaatcaagcaagcctaaagatccacctccttttgaaggaatggagattgatgaagttgctaacattaatgacatggatgaatatattgagttattatatgaagatattcctgacaaagttcggggttctgctttgatcctgcagcttgctcgaaatcctgataacttggaagaactactattgaatgaaactgcccttggtgcattagcaagggtcctgagagaagactggaagcaaagtgtcgagttagctacaaacataatttacatctttttttgtttctccagcttttctcaatttcatggacttattactcactataaaattggagctctgtgtatgaatattattgatcatgagttaaaaagacatgagctttggcaagaagaactctcaaagaagaagaaagctgttgatgaagaccctgaaaaccaaaccttgagaaaggattatgaaaaaacctttaaaaagtaccaggggcttgtggtaaaacaggaacagctattacgagttgctctttatttgcttctgaatcttgctgaggatactcgtaccgaactgaaaatgaggaacaagaacatagttcacatgttggtgaaagcccttgatcgggacaattttgagctgctaattttagttgtgtcattcttgaagaaactcagcatttttatggagaataaaaatgatatggtggaaatggatattgttgaaaaactggtgaaaatgataccttgtgagcatgaagacctgctgaatatcaccctccgacttttactaaacctatcctttgacacaggactgaggaataagatggtacaagttggactgcttcccaagctcactgcactcctaggcaatgacaactacaaacaaatagcaatgtgtgttctttaccacataagcatggatgaccgctttaaatcaatgtttgcatacactgactgtataccacagttaatgaagatgctgtttgaatgttcagatgaacgaattgacttggaactcatttctttctgcattaatcttgctgctaacaaaagaaatgtacagcttatctgtgaaggaaatgggctgaagatgctcatgaagagggctctgaagtttaaggatccattgctgatgaaaatgattagaaacatttctcagcatgatggaccaactaaaaatctgtttattgattatgttggggaccttgcagcccagatctctaatgatgaagaagaggagtttgtgattgaatgtttgggaactcttgcaaacttgaccattccagacttagactgggaattggttcttaaagaatataagttggttccatacctcaaggataaactaaaaccaggtgctgcagaagatgatcttgttttagaagtggttataatgattggaactgtatccatggatgactcttgtgctgcattgctagccaaatctggcataatccctgcactcattgaattgctaaatgctcaacaagaagatgatgaatttgtgtgtcagataatttatgtcttctaccagatggttttccaccaagccacaagagacgtcataatcaaggaaacacaggctccagcatatctcatagacctaatgcatgataagaataatgaaatccgaaaggtctgtgataatacattagatattatagcggaatatgatgaagaatgggctaagaaaattcagagtgaaaagtttcgctggcataactctcagtggctggagatggtagagagtcgtcagatggatgagagtgagcagtacttgtatggtgatgatcgaattgagccatacattcatgaaggagatattctcgaaagacctgaccttttctacaactcagatggattaattgcctctgaaggagccataagtcccgatttcttcaatgattaccaccttcaaaatggagatgttgttgggcagcattcatttcctggcagcacttttcatccaaggatttcaaagtgctttacaaatacgcactaattaagcctcacaaacagccagagccttggaatggatggctttggccaaccagtaagaccaggagggggcaatgggcccaggctttctgtggtatctgatgcaggaaggactgcagtggatcagaacttacaaaccaaacttttattctgagaaactggctgtacaatatctaaaaagaaagtgacatgaaggaagcaatctacaacttccttccgcttagcgtgcaaa

SEQ ID NO: 314173 - DNA, 641 bp, Homo sapiens
ccatttttttttctttctagatggattaattgcctctgaaggagccataagtcccgatttcttcaatgattaccaccttcaaaatggagatgttgttgggcagcattcatttcctggcagcacttttcatccaaggatttcaaagtgctttacaaatacgcactaattaagcctcacaaacagccagagccttggaatggatggctttggccaaccagttggcattcttggacgccctgccacagcatatggattccgccctgatgaaccttactactatggctatggatcttgataaagtatctgtttccatgtgtaatctcagcttagaagaaatctgtgtgggttgggttaattttggatctttgcctaataatgcatgttgatgttattgtgggtctgtgtttgtttttatttttatatgttgttagctgcagattaaccccagcccctctgtcttctgttaagtacagttgatactgacattgttcactcatcaaaccacatcttgatgctaagtaacatttcccatgagcctcaaaactgaatgctgaaaagctactagactggaaaacaaacactgcattatgtatgttaagtgactaatttaatttcaattaaaaagcgtaaagtgaaaatga

SEQ ID NO: 314174 - DNA, 693 bp, Homo sapiens
aaattttgtcaaattccttatcttgttcttttaatcataggcttatggtatgatttggccctgcatgagagttcactgatataactcaaacacatgtttttactaaaagtggaattagtcctgtatcttcatatgaaaagacattataaacagcaaaactcactttactacagttttatttttatcattccctagcaatatattactgatcattgctagcatgtaaaatcttttcatatttttgcttaagagccatatataagtaatttattaaataaaacttttctgatttgattcttccactttgtttcaaatagtacctactgacagaggtttcccatacttttaacacacattgttagaagtattttattatatacacttttaatggctctattaaccttaaaaaaaaaagttaatgatatccacctaaatcactatccctgctaggaagagaatcttggtggtataaaaatgtaggcctcttaatctgcattgtggatgtgtgatgaaaaacatagcttatcattcttttttttcttttttagccttggaatggatggctttggccaaccagttggcattcttggacgccctgccacagcatatggattccgccctgatgaaccttactactatggctatggatcttgataaagtatctgtttccatgtgtaatctcagcttagaaga

SEQ ID NO: 314175 - DNA, 3005 bp, Homo sapiens
agcgggatccaagaggtgcagagcaagcgcatgcgtcgtgacggcccggcttaggcgactctgggcgggtctgggccgctccagtgttttggggcacagaagctgtgggaggagctggaggcttcaccgtggtaaccacagcgccgctgctgccccgccttgcaggcctcaggactgtcatcgcctctgggtgtgagggtactttggccaccgtccccggaaataaccgcgcctgcctctcaagataccccatcctctccacgccgctgccgctgccgccatgcaaggggaggacgccagatacctcaaaaggaaagttaaaggagggaatatagatgtacatccatcagaaaaagcactcattgttcactatgaagtggaagctaccattcttggagaaatgggggaccccatgttgggagaacgaaaagaatgtcaaaaaatcattcgacttaagagtctcaatgccaacacagatataacttccctggcaaggaaggtggttgaagaatgtaaactcattcatccttcaaaactaaatgaggtagaacagctgttgtactatctacagaaccgccgtgattcattgtcaggaaaagagaaaaaagaaaaatcaagcaagcctaaagatccacctccttttgaaggaatggagattgatgaagttgctaacattaatgacatggatgaatatattgagttattatatgaagatattcctgacaaagttcggggttctgctttgatcctgcagcttgctcgaaatcctgataacttggaagaactactattgaatgaaactgcccttggtgcattagcaagggtcctgagagaagactggaagcaaagtgtcgagttagctacaaacataatttacatctttttttgtttctccagcttttctcaatttcatggacttattactcactataaaattggagctctgtgtatgaatattattgatcatgagttaaaaagacatgagctttggcaagaagaactctcaaagaagaagaaagctgttgatgaagaccctgaaaaccaaaccttgagaaaggattatgaaaaaacctttaaaaagtaccaggggcttgtggtaaaacaggaacagctattacgagttgctctttatttgcttctgaatcttgctgaggatactcgtaccgaactgaaaatgaggaacaagaacatagttcacatgttggtgaaagcccttgatcgggacaattttgagctgctaattttagttgtgtcattcttgaagaaactcagcatttttatggagaataaaaatgatatggtggaaatggatattgttgaaaaactggtgaaaatgataccttgtgagcatgaagacctgctgaatatcaccctccgacttttactaaacctatcctttgacacaggactgaggaataagatggtacaagttggactgcttcccaagctcactgcactcctaggcaatgacaactacaaacaaatagcaatgtgtgttctttaccacataagcatggatgaccgctttaaatcaatgtttgcatacactgactgtataccacagttaatgaagatgctgtttgaatgttcagatgaacgaattgacttggaactcatttctttctgcattaatcttgctgctaacaaaagaaatgtacagcttatctgtgaaggaaatgggctgaagatgctcatgaagagggctctgaagtttaaggatccattgctgatgaaaatgattagaaacatttctcagcatgatggaccaactaaaaatctgtttattgattatgttggggaccttgcagcccagatctctaatgatgaagaagaggagtttgtgattgaatgtttgggaactcttgcaaacttgaccattccagacttagactgggaattggttcttaaagaatataagttggttccatacctcaaggataaactaaaaccaggtgctgcagaagatgatcttgttttagaagtggttataatgattggaactgtatccatggatgactcttgtgctgcattgctagccaaatctggcataatccctgcactcattgaattgctaaatgctcaacaagaagatgatgaatttgtgtgtcagataatttatgtcttctaccagatggttttccaccaagccacaagagacgtcataatcaaggaaacacaggctccagcatatctcatagacctaatgcatgataagaataatgaaatccgaaaggtctgtgataatacattagatattatagcggaatatgatgaagaatgggctaagaaaattcagagtgaaaagtttcgctggcataactctcagtggctggagatggtagagagtcgtcagatggatgagagtgagcagtacttgtatggtgatgatcgaattgagccatacattcatgaaggagatattctcgaaagacctgaccttttctacaactcagatggattaattgcctctgaaggagccataagtcccgatttcttcaatgattaccaccttcaaaatggagatgttgttgggcagcattcatttcctggcagccttggaatggatggctttggccaaccagttggcattcttggacgccctgccacagcatatggattccgccctgatgaaccttactactatggctatggatcttgataaagtatctgtttccatgtgtaatctcagcttagaagaaatctgtgtgggttgggttaattttggatctttgcctaataatgcatgttgatgttattgtgggtctgtgtttgtttttatttttatatgttgttagctgcagattaaccccagcccctctgtcttctgttaagtacagttgatactgacattgttcactcatcaaaccacatcttgatgctaagtaacatttcccatgagcctcaaaactgaatgctgaaaagctactagactggaaaacaaacactgcattatgtatgttaagtgactaatttaatttcaattaaaaagcgtaaagtgaaaatga

SEQ ID NO: 314176 - DNA, 3369 bp, Homo sapiens
agcgggatccaagaggtgcagagcaagcgcatgcgtcgtgacggcccggcttaggcgactctgggcgggtctgggccgctccagtgttttggggcacagaagctgtgggaggagctggaggcttcaccgtggtaaccacagcgccgctgctgccccgccttgcaggcctcaggactgtcatcgcctctgggtgtgagggtactttggccaccgtccccggaaataaccgcgcctgcctctcaagataccccatcctctccacgccgctgccgctgccgccatgcaaggggaggacgccagatacctcaaaaggaaagttaaaggagggaatatagatgtacatccatcagaaaaagcactcattgttcactatgaagtggaagctaccattcttggagaaatgggggaccccatgttgggagaacgaaaagaatgtcaaaaaatcattcgacttaagagtctcaatgccaacacagatataacttccctggcaaggaaggtggttgaagaatgtaaactcattcatccttcaaaactaaatgaggtagaacagctgttgtactatctacagaaccgccgtgattcattgtcaggaaaagagaaaaaagaaaaatcaagcaagcctaaagatccacctccttttgaaggaatggagattgatgaagttgctaacattaatgacatggatgaatatattgagttattatatgaagatattcctgacaaagttcggggttctgctttgatcctgcagcttgctcgaaatcctgataacttggaagaactactattgaatgaaactgcccttggtgcattagcaagggtcctgagagaagactggaagcaaagtgtcgagttagctacaaacataatttacatctttttttgtttctccagcttttctcaatttcatggacttattactcactataaaattggagctctgtgtatgaatattattgatcatgagttaaaaagacatgagctttggcaagaagaactctcaaagaagaagaaagctgttgatgaagaccctgaaaaccaaaccttgagaaaggattatgaaaaaacctttaaaaagtaccaggggcttgtggtaaaacaggaacagctattacgagttgctctttatttgcttctgaatcttgctgaggatactcgtaccgaactgaaaatgaggaacaagaacatagttcacatgttggtgaaagcccttgatcgggacaattttgagctgctaattttagttgtgtcattcttgaagaaactcagcatttttatggagaataaaaatgatatggtggaaatggatattgttgaaaaactggtgaaaatgataccttgtgagcatgaagacctgctgaatatcaccctccgacttttactaaacctatcctttgacacaggactgaggaataagatggtacaagttggactgcttcccaagctcactgcactcctaggcaatgacaactacaaacaaatagcaatgtgtgttctttaccacataagcatggatgaccgctttaaatcaatgtttgcatacactgactgtataccacagttaatgaagatgctgtttgaatgttcagatgaacgaattgacttggaactcatttctttctgcattaatcttgctgctaacaaaagaaatgtacagcttatctgtgaaggaaatgggctgaagatgctcatgaagagggctctgaagtttaaggatccattgctgatgaaaatgattagaaacatttctcagcatgatggaccaactaaaaatctgtttattgattatgttggggaccttgcagcccagatctctaatgatgaagaagaggagtttgtgattgaatgtttgggaactcttgcaaacttgaccattccagacttagactgggaattggttcttaaagaatataagttggttccatacctcaaggataaactaaaaccaggtgctgcagaagatgatcttgttttagaagtggttataatgattggaactgtatccatggatgactcttgtgctgcattgctagccaaatctggcataatccctgcactcattgaattgctaaatgctcaacaagaagatgatgaatttgtgtgtcagataatttatgtcttctaccagatggttttccaccaagccacaagagacgtcataatcaaggaaacacaggctccagcatatctcatagacctaatgcatgataagaataatgaaatccgaaaggtctgtgataatacattagatattatagcggaatatgatgaagaatgggctaagaaaattcagagtgaaaagtttcgctggcataactctcagtggctggagatggtagagagtcgtcagatggatgagagtgagcagtacttgtatggtgatgatcgaattgagccatacattcatgaaggagatattctcgaaagacctgaccttttctacaactcagatggattaattgcctctgaaggagccataagtcccgatttcttcaatgattaccaccttcaaaatggagatgttgttgggcagcattcatttcctggcagccttggaatggatggctttggccaaccagttggcattcttggacgccctgccacagcatatggattccgccctgatgaaccttactactatggctatggatcttgataaagtatctgtttccatgtgtaatctcagcttagaagaaatctgtgtgggttgggttaattttggatctttgcctaataatgcatgttgatgttattgtgggtctgtgtttgtttttatttttatatgttgttagctgcagattaaccccagcccctctgtcttctgttaagtacagttgatactgacattgttcactcatcaaaccacatcttgatgctaagtaacatttcccatgagcctcaaaactgaatgctgaaaagctactagactggaaaacaaacactgcattatgtatgttaagtgactaatttaatttcaattaaaaagcgtaaagtgaaaatgacaaaaaaaacaaaacacaaaaaaaagaaccaaacaaacaaaaaaaaacaacagaagcaaacagacaacaaaaaaaaacagacagaaacagccaacacacacaacacaaaaaaacacaaaagggggggggggggggcacgataaaataccatccccgggaggggacaaacaaagaggtacaagcccacaactgttgttggaaaaagagggcggccccatagtaggggggcgatataaaaaaagacggacgagagcggcgagaatcaaaaaacgctcgtggggggaacgacaacaccgatgcgcgagacttcgtgagggaagaaccacaccactacggagagggaagacatcagacggaacacact

SEQ ID NO: 314177 - DNA, 2493 bp, Homo sapiens
agcgggatccaagaggtgcagagcaagcgcatgcgtcgtgacggcccggcttaggcgactctgggcgggtctgggccgctccagtgttttggggcacagaagctgtgggaggagctggaggcttcaccgtggtaaccacagcgccgctgctgccccgccttgcaggcctcaggactgtcatcgcctctgggtgtgagggtactttggccaccgtccccggaaataaccgcgcctgcctctcaagataccccatcctctccacgccgctgccgctgccgccatgcaaggggaggacgccagatacctcaaaaggaaagttaaaggagggaatatagatgtacatccatcagaaaaagcactcattgttcactatgaagtggaagctaccattcttggagaaatgggggaccccatgttgggagaacgaaaagaatgtcaaaaaatcattcgacttaagagtctcaatgccaacacagatataacttccctggcaaggaaggtggttgaagaatgtaaactcattcatccttcaaaactaaatgaggtagaacagctgttgtactatctacagaaccgccgtgattcattgtcaggaaaagagaaaaaagaaaaatcaagcaagcctaaagatccacctccttttgaaggaatggagattgatgaagttgctaacattaatgacatggatgaatatattgagttattatatgaagatattcctgacaaagttcggggttctgctttgatcctgcagcttgctcgaaatcctgataacttggaagaactactattgaatgaaactgcccttggtgcattagcaagggtcctgagagaagactggaagcaaagtgtcgagttagctacaaacataatttacatctttttttgtttctccagcttttctcaatttcatggacttattactcactataaaattggagctctgtgtatgaatattattgatcatgagttaaaaagacatgagctttggcaagaagaactctcaaagaagaagaaagctgttgatgaagaccctgaaaaccaaaccttgagaaaggattatgaaaaaacctttaaaaagtaccaggggcttgtggtaaaacaggaacagctattacgagttgctctttatttgcttctgaatcttgctgaggatactcgtaccgaactgaaaatgaggaacaagaacatagttcacatgttggtgaaagcccttgatcgggacaattttgagctgctaattttagttgtgtcattcttgaagaaactcagcatttttatggagaataaaaatgatatggtggaaatggatattgttgaaaaactggtgaaaatgataccttgtgagcatgaagacctgctgaatatcaccctccgacttttactaaacctatcctttgacacaggactgaggaataagatggtacaagttggactgcttcccaagctcactgcactcctaggcaatgacaactacaaacaaatagcaatgtgtgttctttaccacataagcatggatgaccgctttaaatcaatgtttgcatacactgactgtataccacagttaatgaagatgctgtttgaatgttcagatgaacgaattgacttggaactcatttctttctgcattaatcttgctgctaacaaaagaaatgtacagcttatctgtgaaggaaatgggctgaagatgctcatgaagagggctctgaagtttaaggatccattgctgatgaaaatgattagaaacatttctcagcatgatggaccaactaaaaatctgtttattgattatgttggggaccttgcagcccagatctctaatgatgaagaagaggagtttgtgattgaatgtttgggaactcttgcaaacttgaccattccagacttagactgggaattggttcttaaagaatataagttggttccatacctcaaggataaactaaaaccaggtgctgcagaagatgatcttgttttagaagtggttataatgattggaactgtatccatggatgactcttgtgctgcattgctagccaaatctggcataatccctgcactcattgaattgctaaatgctcaacaagaagatgatgaatttgtgtgtcagataatttatgtcttctaccagatggttttccaccaagccacaagagacgtcataatcaaggaaacacaggctccagcatatctcatagacctaatgcatgataagaataatgaaatccgaaaggtctgtgataatacattagatattatagcggaatatgatgaagaatgggctaagaaaattcagagtgaaaagtttcgctggcataactctcagtggctggagatggtagagatcatcaaaccacatcttgatgctaagtaacatttcccatgagcctcaaaactgaatgctgaaaagctactagactggaaaacaaacactgcattatgtatgttaagtgactaatttaatttcaattaaaaagcgtaaagtgaaaatga

SEQ ID NO: 314178 - DNA, 3127 bp, Homo sapiens
tccgccgccgccgctgccgcgcggtggcccgtgcgcctcggcaccttcggcaatttccgtcgggccccagccgccattttctcgccgcttgtgtggctcgctggctgcgtggctcggttcttgtgagcgaagctttgtccggttcggcaatggacggaatcgtcactgaggttgcagttggcgtgaagagaggatctgacgaactactctcaggcagtgttctcagtagtccgaactctaatatgagcagcatggtagttacagccaatggtaatgatagtaaaaaatttaaaggagaagataaaatggatggtgctccttctcgtgtacttcatattcgaaaattacctggggaagtaacagaaactgaagttattgctttaggcttaccttttggtaaggtgaccaacatccttatgctgaaaggaaaaaatcaggcatttttggaactagcaaccgaggaagcagctattactatggttaattactattctgctgtgacacctcatcttcgtaaccaaccaatatatatccagtactcgaatcacaaagaactaaagacagataatacattaaaccaacgtgctcaggcagttcttcaagctgtgacagctgtccagacagcaaatactcctcttagtggcaccacagttagcgagagtgcagtgactccagcccagagtccagtacttagaataattattgacaacatgtactaccctgtaacacttgatgttcttcaccaaatattttctaagtttggtgctgtattgaagataatcacatttacaaaaaataaccagtttcaagctttgctccagtatggtgatccagtaaatgctcaacaagcaaaactagccctagatggtcagaatatttataatgcctgctgtaccctaaggattgatttttccaaacttgtgaatttgaatgtaaaatacaacaatgataaaagtagggattatactcgacctgatcttccatctggggatggacaacctgcattggacccagctattgctgcagcatttgccaaggagacatccctcttagctgttccaggagctctgagtcctttggccattccaaatgctgctgcagcagctgctgcagctgctgctggccgagtgggtatgcctggagtctcagctggtggcaatacagtcctgttggttagcaatttaaatgaagagatggttacgccccaaagtctgtttaccctcttcggtgtttatggagatgtgcagcgtgtgaagattttatacaataagaaagacagcgctctaatacagatggctgatggaaaccaatcacaacttgccatgaatcatcttaatggacagaaaatgtatggaaaaattattcgtgttactctgtctaaacatcagactgtacagctacctcgagagggacttgatgatcaagggctaacaaaagattttggtaattccccattgcatcgttttaagaaacctggatccaaaaattttcaaaacatttttcctccttctgccacccttcacctatctaatatccctccatcagtagcagaagaggatctacgaacactgttcgctaacactgggggcactgtgaaagcatttaagttttttcaagatcacaaaatggctcttcttcagatggcaacagtggaagaagctattcaggccttgattgatcttcataattataaccttggagaaaaccatcatctgagagtgtctttctccaagtcaacaatttaaaaatgggaagatgaagattgggggtgaatcacattgttcaatgtcatcacctatttgactgttcagaaaagtggggaccagagtttgattttttttgtttttgtttttttggggtttcttttttttttccatgctgttatcattccttggttataaaatgaaatggcatatgtaaaggcagagttgttaactgctatatttcatctgttctatagggaagccattttgtctgtttaaaatttcagtttaattttgcttttttttttttttttttcctttcaacttagttgacatacgtgccttaaaaaggaaaactagtgttgctattgtgcatttactagaaaaaaggaattggttgtttagggcacactgttatatgggaattaaaatatgtttaggcaggggtgtgtaaaaaggttaagtttttgtttctcctgcttggaacttattttgaattactggcttgtcacctttttttctatttaatcaaataagatacatgatattgaaagaataaagcagcatttttagtttttactaccttaggctttattgctttgaaaacaacattggccttttgtatctcacaattctggtctagattcagttatgaatgtaggcattagttaaaattaacaagatgcagagtattaatttcttaagacaacaaagtgatttctgtaagtttgagccctatgtggaaagcattgtggaatcttaacctttttgtacacactcttgtgggacgtatcatataaatgtcagcactaagtaatgtcttgtttgtggctgaatatttttcgtagatgtttttgaagttgacatgacttacgtgcatttaaatatatattgccatccttagtttgtaattaagatttggaatatggttgtggatttctgagcatgtgcagactggtctagctagttcaggaactggtgcatgtatttttcaaagataaagaaagtgtactgcgaaaatatgcaggaagattaattttgtggcagttttctaaaactgacaaccaggtgggaccaaagtttatgtgcctttagtcttaatttaccttgcattgtaatattcagttttaataaatcttcaaaatattttgtatttaggaatagatctgactttaataaaaacatggctcagaatctacaggtcaaattaatttgaacagttcttgtcaatccgaattgttgattctgtttaaatgaccaatactttttgaaattgatgtacttagtttcaagattcatagattctgttatctatgtagacagaatggtcatgtatattttctattagttgagtttttacatctttagaaatgtaaaattcagtatagtttgaaagcggcacaattaaaaattaattttctaac

SEQ ID NO: 314179 - DNA, 385 bp, Homo sapiens
aatctttaggtgacttccacataaaattaattccatttttggattacctctctgtggctccaaaaaaggtgtttatggagatgtgcagcgtgtgaagattttatacaataagaaagacagcgctctaatacagatggctgatggaaaccaatcacaacttgccatgaatcatcttaatggacagaaaatgtatggaaaaattattcgtgttactctgtctaaacatcagactgtacagctacctcgagagggacttgatgatcaagggctaacaaaagattttggtaattccccattgcatcgttttaagaaacctggatccaaaaattttcaaaacatttttcctccttctgccacccttcacctatctaatatcccgtaagta

SEQ ID NO: 314180 - DNA, 2385 bp, Homo sapiens
tcctggtagcttttaagttcgagtttttgttgttgagttttattactaaaattatactttcactaatttttattttttgtttaagattgctgatatgctttattcacttttacaggccctagatggtcagaatatttataatgcctgctgtaccctaaggattgatttttccaaacttgtgaatttgaatgtaaaatacaacaatgataaaagtagggattatactcgacctgatcttccatctggggatggacaacctgcattggacccagctattgctgcagcatttgccaaggagacatccctcttagctgttccaggagctctgagtcctttggccattccaaatgctgctgcagcagctgctgcagctgctgctggccgagtgggtatgcctggagtctcagctggtggcaatacagtcctgttggttagcaatttaaatgaagagatggttacgccccaaagtctgtttaccctcttcggtgtttatggagatgtgcagcgtgtgaagattttatacaataagaaagacagcgctctaatacagatggctgatggaaaccaatcacaacttgccatgaatcatcttaatggacagaaaatgtatggaaaaattattcgtgttactctgtctaaacatcagactgtacagctacctcgagagggacttgatgatcaagggctaacaaaagattttggtaattccccattgcatcgttttaagaaacctggatccaaaaattttcaaaacatttttcctccttctgccacccttcacctatctaatatccctccatcagtagcagaagaggatctacgaacactgttcgctaacactgggggcactgtgaaagcatttaagttttttcaagatcacaaaatggctcttcttcagatggcaacagtggaagaagctattcaggccttgattgatcttcataattataaccttggagaaaaccatcatctgagagtgtctttctccaagtcaacaatttaaaaatgggaagatgaagattgggggtgaatcacattgttcaatgtcatcacctatttgactgttcagaaaagtggggaccagagtttgattttttttgtttttgtttttttggggtttcttttttttttccatgctgttatcattccttggttataaaatgaaatggcatatgtaaaggcagagttgttaactgctatatttcatctgttctatagggaagccattttgtctgtttaaaatttcagtttaattttgcttttttttttttttttttcctttcaacttagttgacatacgtgccttaaaaaggaaaactagtgttgctattgtgcatttactagaaaaaaggaattggttgtttagggcacactgttatatgggaattaaaatatgtttaggcaggggtgtgtaaaaaggttaagtttttgtttctcctgcttggaacttattttgaattactggcttgtcacctttttttctatttaatcaaataagatacatgatattgaaagaataaagcagcatttttagtttttactaccttaggctttattgctttgaaaacaacattggccttttgtatctcacaattctggtctagattcagttatgaatgtaggcattagttaaaattaacaagatgcagagtattaatttcttaagacaacaaagtgatttctgtaagtttgagccctatgtggaaagcattgtggaatcttaacctttttgtacacactcttgtgggacgtatcatataaatgtcagcactaagtaatgtcttgtttgtggctgaatatttttcgtagatgtttttgaagttgacatgacttacgtgcatttaaatatatattgccatccttagtttgtaattaagatttggaatatggttgtggatttctgagcatgtgcagactggtctagctagttcaggaactggtgcatgtatttttcaaagataaagaaagtgtactgcgaaaatatgcaggaagattaattttgtggcagttttctaaaactgacaaccaggtgggaccaaagtttatgtgcctttagtcttaatttaccttgcattgtaatattcagttttaataaatcttcaaaatattttgtatttaggaatagatctgactttaataaaaacatggctcagaatctacaggtcaaattaatttgaacagttcttgtcaatccgaattgttgattctgtttaaatgaccaatactttttgaaattgatgtacttagtttcaagattcatagattctgttatctatgtagacagaatggtcatgtatattttctattagttgagtttttacatctttagaaatgtaaaattcagtatagtttgaaagcggcacaattaaaaattaattttctaac

SEQ ID NO: 314181 - DNA, 675 bp, Homo sapiens
tcacctatctaatatcccgtaagtatataagctagagtgtattgagatacattctattttgataaaatatgaaatttattcttaatcttcactttttcttcccattcaattttcctagtccatcagtagcagaagaggatctacgaacactgttcgctaacactgggggcactgtgaaagcatttaagttttttcagtaagcaagcttccttatctttaaattagtgacctgataaaatttttaagtagtttttgttcttttcgtttatagaaatttttgattccggaatggccaaaattcaagtatttaataagccctttctaatttgtatgaagtgtctaattttataattttgtttcagaagagatcacaaaatggctcttcttcagatggcaacagtggaagaagctattcaggccttgattgatcttcataattataaccttggagaaaaccatcatctgagagtgtctttctccaagtcaacaatttaaaaatgggaagatgaagattgggggtgaatcacattgttcaatgtcatcacctatttgactgttcagaaaagtggggaccagagtttgattttttttgtttttgtttttttggggtttcttttttttttccatgctgttatcattccttggttataaaatgaaatggcatatgtaaaggca

SEQ ID NO: 314182 - DNA, 3028 bp, Homo sapiens
ctgctccgcccctctctgtgggctacgtggacgacactccagttcgtgcgcttcgacaacgcgtcactgagggtgcagctggcgtgaagagaggatctgacgaactactctcaggcagtgttctcagtagtccgaactctaatatgagcagcatggtagttacagccaatggtaatgatagtaaaaaatttaaaggagaagataaaatggatggtgctccttctcgtgtacttcatattcgaaaattacctggggaagtaacagaaactgaagttattgctttaggcttaccttttggtaaggtgaccaacatccttatgctgaaaggaaaaaatcaggcatttttggaactagcaaccgaggaagcagctattactatggttaattactattctgctgtgacacctcatcttcgtaaccaaccaatatatatccagtactcgaatcacaaagaactaaagacagataatacattaaaccaacgtgctcaggcagttcttcaagctgtgacagctgtccagacagcaaatactcctcttagtggcaccacagttagcgagagtgcagtgactccagcccagagtccagtacttagaataattattgacaacatgtactaccctgtaacacttgatgttcttcaccaaatattttctaagtttggtgctgtattgaagataatcacatttacaaaaaataaccagtttcaagctttgctccagtatggtgatccagtaaatgctcaacaagcaaaactagccctagatggtcagaatatttataatgcctgctgtaccctaaggattgatttttccaaacttgtgaatttgaatgtaaaatacaacaatgataaaagtagggattatactcgacctgatcttccatctggggatggacaacctgcattggacccagctattgctgcagcatttgccaaggagacatccctcttagctgttccaggagctctgagtcctttggccattccaaatgctgctgcagcagctgctgcagctgctgctggccgagtgggtatgcctggagtctcagctggtggcaatacagtcctgttggttagcaatttaaatgaagagatggttacgccccaaagtctgtttaccctcttcggtgtttatggagatgtgcagcgtgtgaagattttatacaataagaaagacagcgctctaatacagatggctgatggaaaccaatcacaacttgccatgaatcatcttaatggacagaaaatgtatggaaaaattattcgtgttactctgtctaaacatcagactgtacagctacctcgagagggacttgatgatcaagggctaacaaaagattttggtaattccccattgcatcgttttaagaaacctggatccaaaaattttcaaaacatttttcctccttctgccacccttcacctatctaatatccctccatcagtagcagaagaggatctacgaacactgttcgctaacactgggggcactgtgaaagcatttaagttttttcaagatcacaaaatggctcttcttcagatggcaacagtggaagaagctattcaggccttgattgatcttcataattataaccttggagaaaaccatcatctgagagtgtctttctccaagtcaacaatttaaaaatgggaagatgaagattgggggtgaatcacattgttcaatgtcatcacctatttgactgttcagaaaagtggggaccagagtttgattttttttgtttttgtttttttggggtttcttttttttttccatgctgttatcattccttggttataaaatgaaatggcatatgtaaaggcagagttgttaactgctatatttcatctgttctatagggaagccattttgtctgtttaaaatttcagtttaattttgcttttttttttttttttttcctttcaacttagttgacatacgtgccttaaaaaggaaaactagtgttgctattgtgcatttactagaaaaaaggaattggttgtttagggcacactgttatatgggaattaaaatatgtttaggcaggggtgtgtaaaaaggttaagtttttgtttctcctgcttggaacttattttgaattactggcttgtcacctttttttctatttaatcaaataagatacatgatattgaaagaataaagcagcatttttagtttttactaccttaggctttattgctttgaaaacaacattggccttttgtatctcacaattctggtctagattcagttatgaatgtaggcattagttaaaattaacaagatgcagagtattaatttcttaagacaacaaagtgatttctgtaagtttgagccctatgtggaaagcattgtggaatcttaacctttttgtacacactcttgtgggacgtatcatataaatgtcagcactaagtaatgtcttgtttgtggctgaatatttttcgtagatgtttttgaagttgacatgacttacgtgcatttaaatatatattgccatccttagtttgtaattaagatttggaatatggttgtggatttctgagcatgtgcagactggtctagctagttcaggaactggtgcatgtatttttcaaagataaagaaagtgtactgcgaaaatatgcaggaagattaattttgtggcagttttctaaaactgacaaccaggtgggaccaaagtttatgtgcctttagtcttaatttaccttgcattgtaatattcagttttaataaatcttcaaaatattttgtatttaggaatagatctgactttaataaaaacatggctcagaatctacaggtcaaattaatttgaacagttcttgtcaatccgaattgttgattctgtttaaatgaccaatactttttgaaattgatgtacttagtttcaagattcatagattctgttatctatgtagacagaatggtcatgtatattttctattagttgagtttttacatctttagaaatgtaaaattcagtatagtttgaaagcggcacaattaaaaattaattttctaac

SEQ ID NO: 314183 - DNA, 3386 bp, Homo sapiens
tccgccgccgccgctgccgcgcggtggcccgtgcgcctcggcaccttcggcaatttccgtcgggccccagccgccattttctcgccgcttgtgtggctcgctggctgcgtggctcggttcttgtgagcgaagctttgtccggttcggcaatggacggaatcgtcactgaggttgcagttggcgtgaagagaggatctgacgaactactctcaggcagtgttctcagtagtccgaactctaatatgagcagcatggtagttacagccaatggtaatgatagtaaaaaatttaaaggagaagataaaatggatggtgctccttctcgtgtacttcatattcgaaaattacctggggaagtaacagaaactgaagttattgctttaggcttaccttttggtaaggtgaccaacatccttatgctgaaaggaaaaaatcaggcatttttggaactagcaaccgaggaagcagctattactatggttaattactattctgctgtgacacctcatcttcgtaaccaaccaatatatatccagtactcgaatcacaaagaactaaagacagataatacattaaaccaacgtgctcaggcagttcttcaagctgtgacagctgtccagacagcaaatactcctcttagtggcaccacagttagcgagagtgcagtgactccagcccagagtccagtacttagaataattattgacaacatgtactaccctgtaacacttgatgttcttcaccaaatattttctaagtttggtgctgtattgaagataatcacatttacaaaaaataaccagtttcaagctttgctccagtatggtgatccagtaaatgctcaacaagcaaaactagccctagatggtcagaatatttataatgcctgctgtaccctaaggattgatttttccaaacttgtgaatttgaatgtaaaatacaacaatgataaaagtagggattatactcgacctgatcttccatctggggatggacaacctgcattggacccagctattgctgcagcatttgccaaggagacatccctcttagctgttccaggagctctgagtcctttggccattccaaatgctgctgcagcagctgctgcagctgctgctggccgagtgggtatgcctggagtctcagctggtggcaatacagtcctgttggttagcaatttaaatgaagagatggttacgccccaaagtctgtttaccctcttcggtgtttatggagatgtgcagcgtgtgaagattttatacaataagaaagacagcgctctaatacagatggctgatggaaaccaatcacaacttgccatgaatcatcttaatggacagaaaatgtatggaaaaattattcgtgttactctgtctaaacatcagactgtacagctacctcgagagggacttgatgatcaagggctaacaaaagattttggtaattccccattgcatcgttttaagaaacctggatccaaaaattttcaaaacatttttcctccttctgccacccttcacctatctaatatccctccatcagtagcagaagaggatctacgaacactgttcgctaacactgggggcactgtgaaagcatttaagttttttcaagatcacaaaatggctcttcttcagatggcaacagtggaagaagctattcaggccttgattgatcttcataattataaccttggagaaaaccatcatctgagagtgtctttctccaagtcaacaatttaaaaatgggaagatgaagattgggggtgaatcacattgttcaatgtcatcacctatttgactgttcagaaaagtggggaccagagtttgattttttttgtttttgtttttttggggtttcttttttttttccatgctgttatcattccttggttataaaatgaaatggcatatgtaaaggcagagttgttaactgctatatttcatctgttctatagggaagccattttgtctgtttaaaatttcagtttaattttgcttttttttttttttttttcctttcaacttagttgacatacgtgccttaaaaaggaaaactagtgttgctattgtgcatttactagaaaaaaggaattggttgtttagggcacactgttatatgggaattaaaatatgtttaggcaggggtgtgtaaaaaggttaagtttttgtttctcctgcttggaacttattttgaattactggcttgtcacctttttttctatttaatcaaataagatacatgatattgaaagaataaagcagcatttttagtttttactaccttaggctttattgctttgaaaacaacattggccttttgtatctcacaattctggtctagattcagttatgaatgtaggcattagttaaaattaacaagatgcagagtattaatttcttaagacaacaaagtgatttctgtaagtttgagccctatgtggaaagcattgtggaatcttaacctttttgtacacactcttgtgggacgtatcatataaatgtcagcactaagtaatgtcttgtttgtggctgaatatttttcgtagatgtttttgaagttgacatgacttacgtgcatttaaatatatattgccatccttagtttgtaattaagatttggaatatggttgtggatttctgagcatgtgcagactggtctagctagttcaggaactggtgcatgtatttttcaaagataaagaaagtgtactgcgaaaatatgcaggaagattaattttgtggcagttttctaaaactgacaaccaggtgggaccaaagtttatgtgcctttagtcttaatttaccttgcattgtaatattcagttttaataaatcttcaaaatattttgtatttaggaatagatctgactttaataaaaacatggctcagaatctacaggtcaaattaatttgaacagttcttgtcaatccgaattgttgattctgtttaaatgaccaatactttttgaaattgatgtacttagtttcaagattcatagattctgttatctatgtagacagaatggtcatgtatattttctattagttgagtttttacatctttagaaatgtaaaattcagtatagtttgaaagcggcacaattaaaaattaattttctaacaaagttgggaggtttgatggttgtttaatttcattttgtgtgtactctgcttacccctgtagcatgctcaataaacacttctgtagctctatattcaccttttctgtctttctctgctgccttttctctctcctcttctttgttttcactccactgtgcttctgaattcatgtttattctctgccagggtgggaaaggagtaataatattacaattctatggctttataccataaataaatctagatgctgtgaaaata

SEQ ID NO: 314184 - DNA, 1829 bp, Homo sapiens
aaatcagccaaagcctgagggaagcgagacgagtgtgctgagaggggagcctctcactgcaggtgtcccccgaccgccgtcgctgttggccaccttgcagcgctggggcacaacacagcccaaatccccctgtctgactgccttggatacaactgggaaagccgtctacactctcacctatggtaaactttggagtcggagtttaaaactagcttatactctacttaataaactgacaagtaagaatgaacctctacttaaacctggagacagagtggcgctcgtgtttccgaatagtgaccctgtgatgttcatggttgcattttatgggtgtctcctggcagagctggttcctgtccccatagaagtgccattaacaagaaaggatgcaggcagccagcaggttgggtttctgctgggcagctgtggagtcttcttggccctgaccacagacgcttgtcagaaaggcctccccaaggcacagacaggagaggtggcagctttcaaaggttggcccccgctctcctggctagtgattgatgggaagcatctagccaagcccccaaaggactggcaccctctggcccaggacacagggactgggactgcctacattgagtataaaaccagcaaagaaggcagtacggtgggggtcacagtgtcccacgcatccctgctggcacagtgccgggctctgacccaggcgtgcgggtactcagaagctgaaacattaacaaacgtgctggatttcaaaagggatgctggtctgtggcatggcgtgttaacaagcgtcatgaacaggatgcacgtggtcagcgtcccctacgcgctgatgaaggcgaacccactctcctggatccagaaagtgtgcttctataaagctcgggccgcgctggtgaagtcgcgagacatgcactggtctctcctagctcagcggggccagagggacgtcagcctcagctcactgcgcatgctgattgtggccgatggtgccaacccgtggtcgatctcctcctgtgacgccttcctcaacgtcttccagtccagaggtctgaggccagaggtcatctgtccttgtgcaagttctcctgaggcgctgactgtcgccatccgcaggccacctgatctgggaggaccacctccaagaaaagcagtcctgtcgatgaacggtctaagttatggtgttatcagagtggatactgaagaaaagttgtcagtccttactgttcaggacgttggtcaggtgatgcctggagctaatgtatgtgttgtgaagttagaaggtaccccttatctttgtaaaactgatgaagtgggagaaatatgcgtcagttccagtgcaactggcacagcgtactatggattgcttggaatcacgaagaatgtgtttgaggcagttccggtcaccacaggaggagcacccatctttgacaggccattcaccaggacaggcctgctgggcttcatcgggcctgtgagtatgtcctcctgtaccagcactggcagtcagagaaggtagggggtgtggctaagggacacctcgttgcagccccacccttgtcctggccgttcctgacctcccatgtggccttggtcggtggcgctgacctccctgcccatcaccctacctgtgtgcagggccatccacacctccgagactggtgcacagtcctgcacacaggcctgagtcgggggtccccggggtggatgaggatgttttgctttttatatggagtggcaggtttgtgagtattcattatatcattctttaccattttggatgtctaaactattcaaaaataaatgcttctatttgtaacatcttggcc

SEQ ID NO: 314185 - DNA, 2111 bp, Homo sapiens
aaatcagccaaagcctgagggaagcgagacgagtgtgctgagaggggagcctctcactgcaggtgtcccccgaccgccgtcgctgttggccaccttgcagcgctggggcacaacacagcccaaatccccctgtctgactgccttggatacaactgggaaagccgtctacactctcacctatggtaaactttggagtcggagtttaaaactagcttatactctacttaataaactgacaagtaagaatgaacctctacttaaacctggagacagagtggcgctcgtgtttccgaatagtgaccctgtgatgttcatggttgcattttatgggtgtctcctggcagagctggttcctgtccccatagaagtgccattaacaagaaaggatgcaggcagccagcaggttgggtttctgctgggcagctgtggagtcttcttggccctgaccacagacgcttgtcagaaaggcctccccaaggcacagacaggagaggtggcagctttcaaaggttggcccccgctctcctggctagtgattgatgggaagcatctagccaagcccccaaaggactggcaccctctggcccaggacacagggactgggactgcctacattgagtataaaaccagcaaagaaggcagtacggtgggggtcacagtgtcccacgcatccctgctggcacagtgccgggctctgacccaggcgtgcgggtactcagaagctgaaacattaacaaacgtgctggatttcaaaagggatgctggtctgtggcatggcgtgttaacaagcgtcatgaacaggatgcacgtggtcagcgtcccctacgcgctgatgaaggcgaacccactctcctggatccagaaagtgtgcttctataaagctcgggccgcgctggtgaagtcgcgagacatgcactggtctctcctagctcagcggggccagagggacgtcagcctcagctcactgcgcatgctgattgtggccgatggtgccaacccgtggtcgatctcctcctgtgacgccttcctcaacgtcttccagtccagaggtctgaggccagaggtcatctgtccttgtgcaagttctcctgaggcgctgactgtcgccatccgcaggccacctgatctgggaggaccacctccaagaaaagcagtcctgtcgatgaacggtctaagttatggtgttatcagagtggatactgaagaaaagttgtcagtccttactgttcaggacgttggtcaggtgatgcctggagctaatgtatgtgttgtgaagttagaaggtaccccttatctttgtaaaactgatgaagtgggagaaatatgcgtcagttccagtgcaactggcacagcgtactatggattgcttggaatcacgaagaatgtgtttgaggcagttccggtcaccacaggaggagcacccatctttgacaggccattcaccaggacaggcctgctgggcttcatcgggcctgacaacctggtcttcatcgtgggcaaactggacgggctgatggtcactggagttcgcagacacaatgcagatgacgttgtggccaccgcactggccgtggagcccatgaagtttgtctacagaggcaggatcgctgtgttctctgtgaccgtgctgcacgacgaccggattgtcctggtggctgagcagcggccggatgcctcggaggaggacagcttccagtggatgagccgtgtgctgcaggccattgatagcatccaccaggtgggcgtgtactgtctggccctggttcctgccaacaccttgcccaaggctcctctcggagggattcacatttctgaaaccaaacagcgctttctggaagggacgctgcacccgtgtaatgtgctgatgtgccctcacacctgtgttaccaacctccccaaacctcgtcagaaacaaccagaggttggaccagcctcaatgatcgtggggaacctggttgctgggaagagaatcgctcaggcttccgggagagagctcgcccacctggaggacagcgaccaggcacggaagttcctgttcctggctgacgtgctgcagtggcgtgcccacaccactcctgaccacccgctgttcttgctgctgaacgccaagg

SEQ ID NO: 314186 - DNA, 584 bp, Homo sapiens
ctcgggccgcgctggtgaagtcgcgagacatgcactggtctctcctagctcagcggggccagagggacgtcagcctcagctcactgcgcatgctgattgtggccgatggtgccaacccgtgtgagtgagcctgtgtgcccggcgcataccccacacagtgtcccctcctgcaaaccaaagtagaatacactgagaagcaaaatggaggcattttcactgccattgtcatatagatacacatgtcccatcgtttctatgacacggaacatcttggtgattcactggtttatcccatgcatgtttattaggccactaaatttaaaagcaattttaatatgcttgatgaaaggtacatgccttaatgagagtcatctttcttaagaaattaccagattgtgctgtggcctggggttcctgtttctctttaggcctcatccccaccctcctgccctttgtcctggtgcccccacgtctctggcttctggcttcacttctcccaccaggacccaaccattctccctcctggtttgcctgggtgtcccccacatcctcccaggaggagctccctatggctgctgcctgac

SEQ ID NO: 314187 - DNA, 307 bp, Homo sapiens
tccttttataaatttactccatctcaggcaagtacttttatagcagcatgagaacagactaatacagtaaattggcactggtagagtggggtgctgatattaagatacccaaaaatgtgggagtgactttggatctgggtaacaggcagagtaggaacagtttcgagggctcaggcttccgggagagagctcgcccacctggaggacagcgaccaggcacggaagttcctgttcctggctgacgtgctgcagtggcgtgcccacaccactcctgaccacccgctgttcttgctgctgaacgccaagg

SEQ ID NO: 314188 - DNA, 1961 bp, Homo sapiens
aaatcagccaaagcctgagggaagcgagacgagtgtgctgagaggggagcctctcactgcaggtgtcccccgaccgccgtcgctgttggccaccttgcagcgctggggcacaacacagcccaaatccccctgtctgactgccttggatacaactgggaaagccgtctacactctcacctatggtaaactttggagtcggagtttaaaactagcttatactctacttaataaactgacaagtaagaatgaacctctacttaaacctggagacagagtggcgctcgtgtttccgaatagtgaccctgtgatgttcatggttgcattttatgggtgtctcctggcagagctggttcctgtccccatagaagtgccattaacaagaaaggatgcaggcagccagcaggttgggtttctgctgggcagctgtggagtcttcttggccctgaccacagacgcttgtcagaaaggcctccccaaggcacagacaggagaggtggcagctttcaaaggttggcccccgctctcctggctagtgattgatgggaagcatctagccaagcccccaaaggactggcaccctctggcccaggacacagggactgggactgcctacattgagtataaaaccagcaaagaaggcagtacggtgggggtcacagtgtcccacgcatccctgctggcacagtgccgggctctgacccaggcgtgcgggtactcagaagctgaaacattaacaaacgtgctggatttcaaaagggatgctggtctgtggcatggcgtgttaacaagcgtcatgaacaggatgcacgtggtcagcgtcccctacgcgctgatgaaggcgaacccactctcctggatccagaaagtgtgcttctataaagctcgggccgcgctggtgaagtcgcgagacatgcactggtctctcctagctcagcggggccagagggacgtcagcctcagctcactgcgcatgctgattgtggccgatggtgccaacccgtggtcgatctcctcctgtgacgccttcctcaacgtcttccagtccagaggtctgaggccagaggtcatctgtccttgtgcaagttctcctgaggcgctgactgtcgccatccgcaggccacctgatctgggaggaccacctccaagaaaagcagtcctgtcgatgaacggtctaagttatggtgttatcagagtggatactgaagaaaagttgtcagtccttactgttcaggacgttggtcaggtgatgcctggagctaatgtatgtgttgtgaagttagaaggtaccccttatctttgtaaaactgatgaagtgggagaaatatgcgtcagttccagtgcaactggcacagcgtactatggattgcttggaatcacgaagaatgtgtttgaggcagttccggtcaccacaggaggagcacccatctttgacaggccattcaccaggacaggcctgctgggcttcatcgggcctgacaacctggtcttcatcgtgggcaaactggacgggctgatggtcactggagttcgcagacacaatgcagatgacgttgtggccaccgcactggccgtggagcccatgaagtttgtctacagaggcaggtgatgcgctgcggacccccacgccgggagtagattccttcatttgcagctcgggaagtctttgtgcagtagatggaaagcccagcaaacttgaattcacaaagcctaaaaattgttgtacatcagaaaactcctaaagtaaaaggaaaatatttgcagcaatgataccagagttaatatccttactgtccaaagagttccttggattccttaagaaaataaggttttgatgtaaaatttggggcaaaggctcaaggggacaaatcagggagggaagaattgagtaaagcaaaggagaaatgggtctaagttcctaataaccttggaatgtgaattaaaacagaaaagtgccattttct

SEQ ID NO: 314189 - DNA, 5833 bp, Homo sapiens
gcggggccagctgcagcgtgtagtgcgagtggggcggacgcgcgcagcccgcccgcccggcgaccagcaaggagttggcatcctttggaagagttcgtgaaagctttctgcccagagctcctggaccaatgcatcttcccaccaccttaaaccactgagcagttcagagccccagttgcagacgacttgtcctgccaccaccatgagttctgaatgtgatggtggttccaaagctgtgatgaatggcttggcacctggcagcaatgggcaagacaaagcaactgccgaccctttacgcgcacgctctatttctgctgttaaaatcattcctgtgaagacagtgaaaaacgcctcaggcctagttctccctacagacatggatcctacaaaaatctgcactgggaagggagcggtgactctccgggcctcgtcttcctacagggaaaccccaagcagtagccctgcgagccctcaggaaacccggcaacacgaaagcaaaccaggtctggagccagagccttcttcagcagatgagtggaggctttcttccagtgctgatgccaatggaaatgcccagccctcttcactcgctgccaagggctacagaagtgtgcatcccaaccttccttctgacaagtcccaggattccagtcctctactaaatgaagtttcttcttcccttattggaactgattcccaagcctttccatcagttagcaagccttcatccgcctatccctccacaacgattgtcaatcctactattgtgctcttgcaacacaatcgagaacagcaaaaacgactcagtagcctttcagatcctgtctcagaaagaagagtgggagagcaggactcagcaccaacccaggaaaaacccacctcacctggcaaggctattgaaaaaagagcaaaggatgacagtaggcgggtggtgaagagcactcaggacttaagcgatgtttccatggatgaagtgggcatcccactccggaacactgagagatcaaaagactggtacaagactatgtttaaacagatccacaaactgaacagagatgatgattcagatctgtactctcccagatactcattttctgaagacacaaaatctcccctttctgtgcctcgctcaaaaagtgagatgagctacattgatggtgagaaggtagtcaagaggtcggccacactacccctcccagcccgctcttcctcactgaagtcaagctcagaaagaaatgactgggaacccccagataagaaagtagatacaagaaaatatcgtgcagagcccaagagcatttacgaatatcagcctggcaagtcttccgttctgaccaacgaaaagatgagctcagccatcagccctactccggaaatttcttcagagactcctggatatatatattcttccaacttccatgcagtgaagagggaatcagacggggctcctggggatctcactagcttggagaatgagagacaaatttataaaagtgtcttggaaggtggtgacatccctcttcagggcctgagtgggctcaagcgaccatccagctctgcttccactaaagattcagaatcgccaagacattttataccagctgattacttggaatccacggaagaatttattcgaagacgtcatgatgataaagagaaacttttagcggaccagagacgacttaaacgcgagcaagaagaggctgatattgcagctcgacgccacacaggcgtcattccgacgcaccatcagtttatcactaatgagcgctttggggacctcctcaatatagacgatactgcaaaaaggaaatctgggtcagagatgagacctgccagagccaaatttgactttaaagctcagacactaaaggagcttcctctgcagaagggagatattgtttacatttataagcaaattgatcagaactggtatgaaggagaacaccacggccgggtgggaatcttcccacgcacctacatcgagcttcttcctcctgctgagaaggcacagcccaaaaagttgacaccagtgcaggttttggaatatggagaagctattgctaagtttaactttaatggtgatacacaagtagaaatgtccttcagaaagggtgagaggatcacactgctccggcaggtagatgagaactggtacgaagggaggatcccggggacatcccgacaaggcatcttccccatcacctacgtggatgtgatcaagcgaccactggtgaaaaaccctgtggattacatggacctgcctttctcctcctccccaagtcgcagtgccactgcaagcccacagcaacctcaagcccagcagcgaagagtcacccccgacaggagtcaaacctcacaagatttatttagctatcaagcattatatagctatataccacagaatgatgatgagttggaactccgcgatggagatatcgttgatgtcatggaaaaatgtgacgatggatggtttgttggtacttcaagaaggacaaagcagtttggtacttttccaggcaactatgtaaaacctttgtatctataagaagactgaaaaccatggagattatttttattggaggaggaagcatcattcatgaaccgatctttttagttgagtcagtaggaaaattaatacagtggataaagtaagaagcaaaagacagggacagagaagtgttgtgtttaaaacccaagcctgtctaaggttactgtgtattagacagggccgaactagtgtgctgagcaaaaagaattgaagcaaattgtatttacttagccgcttctgggagccacttcagcctttcccctcccctccacttcttgggtaatctgacctgaagcatagtccaggagcagagttagccagaaatgcctcctgctgccccagccttagagagctcccatctcaatcattgagcctgaaggcttcaagcccaagaatgcaacaagacccccagcctacatttctcagctcccctggagccagctgatcctgtaacgctgctggaggtcagtctgagctaccaagactgtccctagacaaaggtggagtcccccacactgcccaagaccaaatccctcactcaacctgctgaggtgtggatggggaaacagaggcaaaactgaggcacctgatgcattcagcctgctgtgcagcagtgccattgactgccctgatgttcagagagaaacgcacacaaggtttgcccatgagaattggggagcagatggccaagcagataggttatgtctgttttctgagtgatgaagtcaggaagccctgtggctctggaggccacttgtggttcattcttttcccatatccttggcttttagaaatggttaccttcaggacagtgcagctgcatttatcagagcactattgctaagttttcttttctggcttgtgtttttctgggacagtttagaattgggaggcctattctcatagaacaccaaaaatgatgttcagtgattcatttaacatacaccaatgtactctggctgctggggggacaaccataagcaagacatgcccagggtttgccgtggctccagatctactccctgtaggagttcaaggatcacacaaacggtagtaaccagggttgtgaatctgagtacaccctggcaaggcttctcttcagactgaagcagcaattctgccactaccagcagcaaccaggacgtctgttctttgtgggggccagatcagaagagagaggcccctgtgacgcccgggctgcttggtcacaactctgtccaattcaaggatgtttatcggcctctcttagatcctgagtgagacaaatacagaaatgacccattccctgcccaccagaaactcagaggtgattggggagactgacacaggaaaatgaacttaatcaagagagactgtgatatgtgctaagaagggtgtgagggagggagagatgaattttccctggagggatcctagaaagcattgtcatattgccatctccattagctcacttttaaacaactagggtgctggaagaacctttgtctgagggtagttcatagctggaaatacttggaatattttccagagtctctaaactctcatcttcccccacagatacacatccaagctcacaaataggagtagcaattctaggtggtagggttgtgtacggaacccctggctgtctgcatatatctcagaattaccccaggaccattgtcccaaagtctagagtctttacaggtaggcaaaatttgttttcaatgcctgtgcctcagctgctgtcacaaatacccatcttaggatcccatcagcttcccatcccccaccagacagccacagtaccctcactttctccctattgttctttcaaatcctgttctcaggaaagaaactgccactaattcattcacactaaggtgtaaatgattgataataggaatgagttacctcttcccacagacatttgtttttaagtatgacagagcagggccttaatcccaagggaaaaggttatggaactggagggggtgagctttctgggtagaaggagacttcctgaatttccttaaaacccagtaagagtaagacctgttgttttggaaggtctgctccaccatctaagagcactgtttttttttttttgttgttgttgttgttttacggtctctgagggaatatagtaaaaatgcatatgcacgtgcaatttgcacggcagcatttcaccgattgtggactgtattggctaatgtgtttcctggtctttagatgcaaaccattaataacactatcttatctcatagttttttcaggggtgcttcttgattagtagggaattttgaacacctctttaaatacagctagaaaataaaaccaatttgtaaagccacatttgcatatgatgccagcctcacgcatttgtatatctccagaaattcaggtatgcctcaccaatttgcccgtctttaataaaatcttgtgttaaaatttgcatcacgtcgccttcctatgtatgacgaaacaagaaacagagatttccaattgctcttttgtcttcagacatttagtaatataaagtacctatttttatgctgaaatgtttatacaggtttattaatagcaagtgcaactaactggcggcatgccttgcaacacattttgatatattagccatgcttccgggtaaaggcaagccccaaactccttatcttttgcagtctctctgggatcagtaaaagaaaaaaaaaataatgtgcttaagaagtgggactgtaaatatgtatatttaactttgtatagcccatgtacctaccttgtatagaaaaataattttaaaaatttgaatggaagggggtaaaggaagtcatgaagtttttttgcatttttatttaaatgaaggaattccaaataactcacctacagatttttagcacaaaaatagccattgtaaagtgttaaaatttacgataagtattctattggggaggaaaggtaactctgatctcagttacagtttttttttcctttttaatttcattattttgggtttttggtttttgcagtcctatttatctgcagtcgtattaagtcctattgctagaataggttactacaaaaaaggttatattctgaaagaaaaataactgacattatatataaccaattaatttaaagtattgccatttaaattacacactgagagcatgtcctatgcagacatagatttttctgttcatttatttttcttcattgcagtggattgatttgataaatagatgtgttgaattactacatttgctgtacatattatttaataaactttattcagaattgcgtggc

SEQ ID NO: 314190 - DNA, 5938 bp, Homo sapiens
gcggggccagctgcagcgtgtagtgcgagtggggcggacgcgcgcagcccgcccgcccggcgaccagcaaggagttggcatcctttggaagagttcgtgaaagctttctgcccagagctcctggaccaatgcatcttcccaccaccttaaaccactgagcagttcagagccccagttgcagacgacttgtcctgccaccaccatgagttctgaatgtgatggtggttccaaagctgtgatgaatggcttggcacctggcagcaatgggcaagacaaagacatggatcctacaaaaatctgcactgggaagggagcggtgactctccgggcctcgtcttcctacagggaaaccccaagcagtagccctgcgagccctcaggaaacccggcaacacgaaagcaaaccaggtctggagccagagccttcttcagcagatgagtggaggctttcttccagtgctgatgccaatggaaatgcccagccctcttcactcgctgccaagggctacagaagtgtgcatcccaaccttccttctgacaagtcccaggatgccacttcctccagtgcagcccagccggaggtaatagttgtccctctctacctggttaatactgacagagggcaagaaggcactgccagacctccaacacctctggggcctcttggctgcgtccccacaatcccagcgactgcctctgccgcctcacctctgaccttcccgactctagatgatttcattccccctcatctgcagaggtggccccaccacagccagccagcccgcgcctctggctcctttgcccccattagccagacgccaccatccttctcaccaccacctccgctggtccctcctgccccggaggacctccgcagagtctcggagcctgacctcacgggagctgtttcgagtaccgattccagtcctctactaaatgaagtttcttcttcccttattggaactgattcccaagcctttccatcagttagcaagccttcatccgcctatccctccacaacgattgtcaatcctactattgtgctcttgcaacacaatcgagaacagcaaaaacgactcagtagcctttcagatcctgtctcagaaagaagagtgggagagcaggactcagcaccaacccaggaaaaacccacctcacctggcaaggctattgaaaaaagagcaaaggatgacagtaggcgggtggtgaagagcactcaggacttaagcgatgtttccatggatgaagtgggcatcccactccggaacactgagagatcaaaagactggtacaagactatgtttaaacagatccacaaactgaacagagatgatgattcagatctgtactctcccagatactcattttctgaagacacaaaatctcccctttctgtgcctcgctcaaaaagtgagatgagctacattgatggtgagaaggtagtcaagaggtcggccacactacccctcccagcccgctcttcctcactgaagtcaagctcagaaagaaatgactgggaacccccagataagaaagtagatacaagaaaatatcgtgcagagcccaagagcatttacgaatatcagcctggcaagtcttccgttctgaccaacgaaaagatgagctcagccatcagccctactccggaaatttcttcagagactcctggatatatatattcttccaacttccatgcagtgaagagggaatcagacggggctcctggggatctcactagcttggagaatgagagacaaatttataaaagtgtcttggaaggtggtgacatccctcttcagggcctgagtgggctcaagcgaccatccagctctgcttccactaaagattcagaatcgccaagacattttataccagctgattacttggaatccacggaagaatttattcgaagacgtcatgatgataaagagatgagacctgccagagccaaatttgactttaaagctcagacactaaaggagcttcctctgcagaagggagatattgtttacatttataagcaaattgatcagaactggtatgaaggagaacaccacggccgggtgggaatcttcccacgcacctacatcgagcttcttcctcctgctgagaaggcacagcccaaaaagttgacaccagtgcaggttttggaatatggagaagctattgctaagtttaactttaatggtgatacacaagtagaaatgtccttcagaaagggtgagaggatcacactgctccggcaggtagatgagaactggtacgaagggaggatcccggggacatcccgacaaggcatcttccccatcacctacgtggatgtgatcaagcgaccactggtgaaaaaccctgtggattacatggacctgcctttctcctcctccccaagtcgcagtgccactgcaagcccacagcaacctcaagcccagcagcgaagagtcacccccgacaggagtcaaacctcacaagatttatttagctatcaagcattatatagctatataccacagaatgatgatgagttggaactccgcgatggagatatcgttgatgtcatggaaaaatgtgacgatggatggtttgttggtacttcaagaaggacaaagcagtttggtacttttccaggcaactatgtaaaacctttgtatctataagaagactgaaaaccatggagattatttttattggaggaggaagcatcattcatgaaccgatctttttagttgagtcagtaggaaaattaatacagtggataaagtaagaagcaaaagacagggacagagaagtgttgtgtttaaaacccaagcctgtctaaggttactgtgtattagacagggccgaactagtgtgctgagcaaaaagaattgaagcaaattgtatttacttagccgcttctgggagccacttcagcctttcccctcccctccacttcttgggtaatctgacctgaagcatagtccaggagcagagttagccagaaatgcctcctgctgccccagccttagagagctcccatctcaatcattgagcctgaaggcttcaagcccaagaatgcaacaagacccccagcctacatttctcagctcccctggagccagctgatcctgtaacgctgctggaggtcagtctgagctaccaagactgtccctagacaaaggtggagtcccccacactgcccaagaccaaatccctcactcaacctgctgaggtgtggatggggaaacagaggcaaaactgaggcacctgatgcattcagcctgctgtgcagcagtgccattgactgccctgatgttcagagagaaacgcacacaaggtttgcccatgagaattggggagcagatggccaagcagataggttatgtctgttttctgagtgatgaagtcaggaagccctgtggctctggaggccacttgtggttcattcttttcccatatccttggcttttagaaatggttaccttcaggacagtgcagctgcatttatcagagcactattgctaagttttcttttctggcttgtgtttttctgggacagtttagaattgggaggcctattctcatagaacaccaaaaatgatgttcagtgattcatttaacatacaccaatgtactctggctgctggggggacaaccataagcaagacatgcccagggtttgccgtggctccagatctactccctgtaggagttcaaggatcacacaaacggtagtaaccagggttgtgaatctgagtacaccctggcaaggcttctcttcagactgaagcagcaattctgccactaccagcagcaaccaggacgtctgttctttgtgggggccagatcagaagagagaggcccctgtgacgcccgggctgcttggtcacaactctgtccaattcaaggatgtttatcggcctctcttagatcctgagtgagacaaatacagaaatgacccattccctgcccaccagaaactcagaggtgattggggagactgacacaggaaaatgaacttaatcaagagagactgtgatatgtgctaagaagggtgtgagggagggagagatgaattttccctggagggatcctagaaagcattgtcatattgccatctccattagctcacttttaaacaactagggtgctggaagaacctttgtctgagggtagttcatagctggaaatacttggaatattttccagagtctctaaactctcatcttcccccacagatacacatccaagctcacaaataggagtagcaattctaggtggtagggttgtgtacggaacccctggctgtctgcatatatctcagaattaccccaggaccattgtcccaaagtctagagtctttacaggtaggcaaaatttgttttcaatgcctgtgcctcagctgctgtcacaaatacccatcttaggatcccatcagcttcccatcccccaccagacagccacagtaccctcactttctccctattgttctttcaaatcctgttctcaggaaagaaactgccactaattcattcacactaaggtgtaaatgattgataataggaatgagttacctcttcccacagacatttgtttttaagtatgacagagcagggccttaatcccaagggaaaaggttatggaactggagggggtgagctttctgggtagaaggagacttcctgaatttccttaaaacccagtaagagtaagacctgttgttttggaaggtctgctccaccatctaagagcactgtttttttttttttgttgttgttgttgttttacggtctctgagggaatatagtaaaaatgcatatgcacgtgcaatttgcacggcagcatttcaccgattgtggactgtattggctaatgtgtttcctggtctttagatgcaaaccattaataacactatcttatctcatagttttttcaggggtgcttcttgattagtagggaattttgaacacctctttaaatacagctagaaaataaaaccaatttgtaaagccacatttgcatatgatgccagcctcacgcatttgtatatctccagaaattcaggtatgcctcaccaatttgcccgtctttaataaaatcttgtgttaaaatttgcatcacgtcgccttcctatgtatgacgaaacaagaaacagagatttccaattgctcttttgtcttcagacatttagtaatataaagtacctatttttatgctgaaatgtttatacaggtttattaatagcaagtgcaactaactggcggcatgccttgcaacacattttgatatattagccatgcttccgggtaaaggcaagccccaaactccttatcttttgcagtctctctgggatcagtaaaagaaaaaaaaaataatgtgcttaagaagtgggactgtaaatatgtatatttaactttgtatagcccatgtacctaccttgtatagaaaaataattttaaaaatttgaatggaagggggtaaaggaagtcatgaagtttttttgcatttttatttaaatgaaggaattccaaataactcacctacagatttttagcacaaaaatagccattgtaaagtgttaaaatttacgataagtattctattggggaggaaaggtaactctgatctcagttacagtttttttttcctttttaatttcattattttgggtttttggtttttgcagtcctatttatctgcagtcgtattaagtcctattgctagaataggttactacaaaaaaggttatattctgaaagaaaaataactgacattatatataaccaattaatttaaagtattgccatttaaattacacactgagagcatgtcctatgcagacatagatttttctgttcatttatttttcttcattgcagtggattgatttgataaatagatgtgttgaattactacatttgctgtacatattatttaataaactttattcagaattgcgtggc

SEQ ID NO: 314191 - DNA, 4113 bp, Homo sapiens
gattattttgcttccggacctcgactggaaattttttaaaagcccttatgacaaatgagcatgttacctctccttttttctttttagcagctttcagctttaacctaatgggtctatttattttattctgcatgcttaccagtggatcgtaaaggtgggaatgctcacatgatttcttcatcttcagtccatagccgaacgtttaacactagcaatgcgttaggccctgtgtgtaagcacaagaagcccctgtcagctgcgaaggcctgcatttcggaaatccttccatccaaattcaaacccaggctctctgctcccagcgctcttttgcaggaacagaagagtatcctcttgccctcagagaaggctcaaagctgtgagaacctttgtgtttctggttctttaaatgattccaaaagaggcctccccctccaagtgggagggagcattgagaacctgctcatgcgctcccgacgggattatgacagcaagtcgagcagtaccatgagcctccaggagtacagcaccagcggcaggaggccctgtcctctctcaagaaaggctgggatgcagttcaccatgctttatcgggacatgcaccagatcaaccgatctggcctcttcctgggctccatctcctcctcctcgagtgtgcgggatcttgcctcccactttgaaaagagtagcctggcattgtccaggggtgagctgggccccagccaggagggctcggaacacatccccaagcacaccgtctcttcccgcatcaccgcttttgagcagctaattcagcggtcccgttccatgccatccctggacctgtccggaaggctgagcaagtctcccacacctgtgctgtcccggggcagcctgacctcagcccgctcggccgagtccctacttgagtcaaccaagctccatcccaaggagatggatgggatgaactccagtggggtctatgcttccccaacatgtagcaatatggcacaccatgccttgagcttcaggggccttgtgccttctgagcctctctccacctgctctgatgacgtggaccgctgttcaaatatctccactgacagcagagaaggcagtggcggcagtgttcatggagatttccccaaacatcgcctcaacaagtgcaagggcacctgcccggcctcatacacccgcttcaccaccatccggaagcatgagcagcagcagacctctagacagcctgagtggcgcctggatgccagaggggacaagagcaccctcctcaggaacatctacctaatgagcccccttcctttccggctgaaaaagcccctccaccaccaccccagacaaccttcccctggtgactcctcaggcctcctggtgggccagaagccagacctccccagtcagccccatcaggaccagcccccttctggggggaagcccgtggttcccacacgcctgtcttcccgacacaccatggccaggcttagccgcagctcagagccctctcaggagagacccacggccctggaggactacccaagggccattaataatggaaactccgtgccatactcagaccacagcctggacaggaacaacaacccacaaagtgaactggcaccatcccgtggaggtggcattttgtgtgtttgcctagtctcacctgcccgtccctccactttgcttgcattatcccgtcctcctctgtgcccttggtgctcattttctggtctgtcctttgttttctgtttgttttgcttggcaattaatcatggctcgtagtggctgcacttctttaaaaacaaagcccccatgtcatttagactaaccaccaaactgtgtttcgaaagaaaaattggccgtttagctcaactgagaaatgtgttcatttgaactcttgaaccccttgctgtttgcaccaatccccaacataccccatggtttttttgagaggcagcctctctcaatggccctatatgtgtgtgagtgtgtgccttgtccctataaggtcctgcacgcctctttgtagggacactttacaaagaaagttctctcattttgctcaccttttgccttttgagtagttttctttgcattaaactagttcacaaataaatccaaaaaatggggtggggggtggaatttttttttccttcagaattcgaccattgatcattaatcaagaatgacttcaaaattttgatatttataatagatgaaaggtgaactcttttcgcaagctggtttccagcgaaatctttgcctgttttaactctactttgttgttttaaagattcagaatcgccaagacatttcttcatttcctcctctgcttcccgtcagcctcccaaaaagatatgggattatactcctggagactgctctatccttcctagagaggatagaaaggtaattccgctgtgcctcctccgttggactgtgtgtgctctctagccttggttagtgtgagtgtgttgtgggtttgtttgtttgtttgtttgttttcttaaatcacttttgaaaaaacttgatgctttttttttttttggttaggtaataaaactatgtaacaaattctctaagacatatactaatgtttagaggtttttaaagcaattacgtattcttctgacatatagtatttgtcactgtcaccacactctgaaaaaagagaaaataggcatttccttaaaggtaggtttttgtagttctccgtagcaagtagaatagctttttgaagctctgatgacttcaggatttctgctttatatgcctaatgttacattctctgttttcatgtcttcaactaatttccagtgagctcttgtgttttaatcatgctatcttggccgtatgaaagtataacactaagaaaaaaattcatttttttcaaacgtaaccttccattctttctccctttcctctaaactaaaaccttctttcccatcttttctttcttgaaccagactaatctagacaaagatctcagcctctgccagacagagttagaggcagatttagaaaaaatggagacgcttaataaagcacccagtgcaaacgtgccacaggtatttcctagtttttctcatgccatcagttccttttcaagctgtgctttgttttcttctttgttctatggtttttgatgtagttgaggtgacggatggtgatgctggctattttaggctgcatggctttctgactactgttttagactccttcccccacacctacccagttcatttttgcttggttttcttttgagcttggcatcttccttaaaggggattcttcaaatatatgcagagaggctgctgattgaaactactctcccaccttattctcttcctctgctttccaggggcgaccttttaagttcccttcctttgcctctgtctgccttctctgaattttcagggagccatttttggcagtttccatgtcttttttgcagccctgggagataccaacctcaaagatcagtttcaaaaactcagcagcagtgctttgggtaccctttctgtgcatggtgctctcagagtagtagtgtttgtcattttaaagttcagaaagttctcaatgaaaaatgcactcagaggtcagatggcctggacacacaaaaaaagtgtttgaaactgagtctgccatgatattttaaagggagctatgtcaaaatgtggtttattaaagggtatacgagagagagtaagagagagagagaaagacatcatggtaagtaggtttccaaggaggaaaaaaccaaatgttcatagaactgcctggagggctccctgacaaaacaaaagagactcttaaaaggaaaaggtatctttagagaaggtacaaaaggaggccgggcgcggtggctcacgcctgtaatcccagcaatttgggaggccgaggcaagtggatcacttgaggtcaggagttcaagaccagcgtggccaacatgatgaaacccagtctctactaaaaatacaaaaattagccaggcatggtggcaggcctctgtattcccagctatttgggaggctgaggcaggagaatcgcttgaattcgggaggcagagctgagatcacacctctgcactccagcctgggtgacagagcgagactccgtctcagg

SEQ ID NO: 314192 - DNA, 5967 bp, Homo sapiens
tgctgtagtgatctagaggatcccgatggcgggcgtcgtcccggccttgtctcccgcacagccggcacaggaaaaccaccccctgctcctcctcctgaccctcccaagctattctttgacatccgtaaagatgccgttaaccgtggcgagagtccttccctggggactcaggcttcgttcccagatgtgagaccacctgtgctaggcccccgggttacctctgatcccgaaaaccggaagagcaaagaatcttaccttttgcagccgagttatccagccaaggatgccacttcctccagtgcagcccagccggaggtaatagttgtccctctctacctggttaatactgacagagggcaagaaggcactgccagacctccaacacctctggggcctcttggctgcgtccccacaatcccagcgactgcctctgccgcctcacctctgaccttcccgactctagatgatttcattccccctcatctgcagaggtggccccaccacagccagccagcccgcgcctctggctcctttgcccccattagccagacgccaccatccttctcaccaccacctccgctggtccctcctgccccggaggacctccgcagagtctcggagcctgacctcacgggagctgtttcgagtaccgattccagtcctctactaaatgaagtttcttcttcccttattggaactgattcccaagcctttccatcagttagcaagccttcatccgcctatccctccacaacgattgtcaatcctactattgtgctcttgcaacacaatcgagaacagcaaaaacgactcagtagcctttcagatcctgtctcagaaagaagagtgggagagcaggactcagcaccaacccaggaaaaacccacctcacctggcaaggctattgaaaaaagagcaaaggatgacagtaggcgggtggtgaagagcactcaggacttaagcgatgtttccatggatgaagtgggcatcccactccggaacactgagagatcaaaagactggtacaagactatgtttaaacagatccacaaactgaacagagatgatgattcagatctgtactctcccagatactcattttctgaagacacaaaatctcccctttctgtgcctcgctcaaaaagtgagatgagctacattgatggtgagaaggtagtcaagaggtcggccacactacccctcccagcccgctcttcctcactgaagtcaagctcagaaagaaatgactgggaacccccagataagaaagtagatacaagaaaatatcgtgcagagcccaagagcatttacgaatatcagcctggcaagtcttccgttctgaccaacgaaaagatgagctcagccatcagccctactccggaaatttcttcagagactcctggatatatatattcttccaacttccatgcagtgaagagggaatcagacggggctcctggggatctcactagcttggagaatgagagacaaatttataaaagtgtcttggaaggtggtgacatccctcttcagggcctgagtgggctcaagcgaccatccagctctgcttccactaaagattcagaatcgccaagacattttataccagctgattacttggaatccacggaagaatttattcgaagacgtcatgatgataaagagaaacttttagcggaccagagacgacttaaacgcgagcaagaagaggctgatattgcagctcgacgccacacaggcgtcattccgacgcaccatcagtttatcactaatgagcgctttggggacctcctcaatatagacgatactgcaaaaaggaaatctgggtcagagatgagacctgccagagccaaatttgactttaaagctcagacactaaaggagcttcctctgcagaagggagatattgtttacatttataagcaaattgatcagaactggtatgaaggagaacaccacggccgggtgggaatcttcccacgcacctacatcgagcttcttcctcctgctgagaaggcacagcccaaaaagttgacaccagtgcaggttttggaatatggagaagctattgctaagtttaactttaatggtgatacacaagtagaaatgtccttcagaaagggtgagaggatcacactgctccggcaggtagatgagaactggtacgaagggaggatcccggggacatcccgacaaggcatcttccccatcacctacgtggatgtgatcaagcgaccactggtgaaaaaccctgtggattacatggacctgcctttctcctcctccccaagtcgcagtgccactgcaagcccacagcaacctcaagcccagcagcgaagagtcacccccgacaggagtcaaacctcacaagatttatttagctatcaagcattatatagctatataccacagaatgatgatgagttggaactccgcgatggagatatcgttgatgtcatggaaaaatgtgacgatggatggtttgttggtacttcaagaaggacaaagcagtttggtacttttccaggcaactatgtaaaacctttgtatctataagaagactgaaaaccatggagattatttttattggaggaggaagcatcattcatgaaccgatctttttagttgagtcagtaggaaaattaatacagtggataaagtaagaagcaaaagacagggacagagaagtgttgtgtttaaaacccaagcctgtctaaggttactgtgtattagacagggccgaactagtgtgctgagcaaaaagaattgaagcaaattgtatttacttagccgcttctgggagccacttcagcctttcccctcccctccacttcttgggtaatctgacctgaagcatagtccaggagcagagttagccagaaatgcctcctgctgccccagccttagagagctcccatctcaatcattgagcctgaaggcttcaagcccaagaatgcaacaagacccccagcctacatttctcagctcccctggagccagctgatcctgtaacgctgctggaggtcagtctgagctaccaagactgtccctagacaaaggtggagtcccccacactgcccaagaccaaatccctcactcaacctgctgaggtgtggatggggaaacagaggcaaaactgaggcacctgatgcattcagcctgctgtgcagcagtgccattgactgccctgatgttcagagagaaacgcacacaaggtttgcccatgagaattggggagcagatggccaagcagataggttatgtctgttttctgagtgatgaagtcaggaagccctgtggctctggaggccacttgtggttcattcttttcccatatccttggcttttagaaatggttaccttcaggacagtgcagctgcatttatcagagcactattgctaagttttcttttctggcttgtgtttttctgggacagtttagaattgggaggcctattctcatagaacaccaaaaatgatgttcagtgattcatttaacatacaccaatgtactctggctgctggggggacaaccataagcaagacatgcccagggtttgccgtggctccagatctactccctgtaggagttcaaggatcacacaaacggtagtaaccagggttgtgaatctgagtacaccctggcaaggcttctcttcagactgaagcagcaattctgccactaccagcagcaaccaggacgtctgttctttgtgggggccagatcagaagagagaggcccctgtgacgcccgggctgcttggtcacaactctgtccaattcaaggatgtttatcggcctctcttagatcctgagtgagacaaatacagaaatgacccattccctgcccaccagaaactcagaggtgattggggagactgacacaggaaaatgaacttaatcaagagagactgtgatatgtgctaagaagggtgtgagggagggagagatgaattttccctggagggatcctagaaagcattgtcatattgccatctccattagctcacttttaaacaactagggtgctggaagaacctttgtctgagggtagttcatagctggaaatacttggaatattttccagagtctctaaactctcatcttcccccacagatacacatccaagctcacaaataggagtagcaattctaggtggtagggttgtgtacggaacccctggctgtctgcatatatctcagaattaccccaggaccattgtcccaaagtctagagtctttacaggtaggcaaaatttgttttcaatgcctgtgcctcagctgctgtcacaaatacccatcttaggatcccatcagcttcccatcccccaccagacagccacagtaccctcactttctccctattgttctttcaaatcctgttctcaggaaagaaactgccactaattcattcacactaaggtgtaaatgattgataataggaatgagttacctcttcccacagacatttgtttttaagtatgacagagcagggccttaatcccaagggaaaaggttatggaactggagggggtgagctttctgggtagaaggagacttcctgaatttccttaaaacccagtaagagtaagacctgttgttttggaaggtctgctccaccatctaagagcactgtttttttttttttgttgttgttgttgttttacggtctctgagggaatatagtaaaaatgcatatgcacgtgcaatttgcacggcagcatttcaccgattgtggactgtattggctaatgtgtttcctggtctttagatgcaaaccattaataacactatcttatctcatagttttttcaggggtgcttcttgattagtagggaattttgaacacctctttaaatacagctagaaaataaaaccaatttgtaaagccacatttgcatatgatgccagcctcacgcatttgtatatctccagaaattcaggtatgcctcaccaatttgcccgtctttaataaaatcttgtgttaaaatttgcatcacgtcgccttcctatgtatgacgaaacaagaaacagagatttccaattgctcttttgtcttcagacatttagtaatataaagtacctatttttatgctgaaatgtttatacaggtttattaatagcaagtgcaactaactggcggcatgccttgcaacacattttgatatattagccatgcttccgggtaaaggcaagccccaaactccttatcttttgcagtctctctgggatcagtaaaagaaaaaaaaaataatgtgcttaagaagtgggactgtaaatatgtatatttaactttgtatagcccatgtacctaccttgtatagaaaaataattttaaaaatttgaatggaagggggtaaaggaagtcatgaagtttttttgcatttttatttaaatgaaggaattccaaataactcacctacagatttttagcacaaaaatagccattgtaaagtgttaaaatttacgataagtattctattggggaggaaaggtaactctgatctcagttacagtttttttttcctttttaatttcattattttgggtttttggtttttgcagtcctatttatctgcagtcgtattaagtcctattgctagaataggttactacaaaaaaggttatattctgaaagaaaaataactgacattatatataaccaattaatttaaagtattgccatttaaattacacactgagagcatgtcctatgcagacatagatttttctgttcatttatttttcttcattgcagtggattgatttgataaatagatgtgttgaattactacatttgctgtacatattatttaataaactttattcagaattgcgtggccaaaaaaaaaaaaaaaaaaaaaaaaacaaaaaaaaaaaaaaaaaaaaaaaaaaaaaaaaaaaaaaaaaaaaaaaaaaaaaaaaaaaaaaaaaaaaaaaaaaaaaaaaaaaaaaaaaaaaaaaaaac

SEQ ID NO: 314193 - DNA, 6773 bp, Homo sapiens
aggaggaagcatcattcatgaaccgatctttgcagacgacttgtcctgccaccaccatgagttctgaatgtgatggtggttccaaagctgtgatgaatggcttggcacctggcagcaatgggcaagacaaagcaactgccgaccctttacgcgcacgctctatttctgctgttaaaatcattcctgtgaagacagtgaaaaacgcctcaggcctagttctccctacagacatggatcctacaaaaatctgcactgggaagggagcggtgactctccgggcctcgtcttcctacagggaaaccccaagcagtagccctgcgagccctcaggaaacccggcaacacgaaagcaaaccaggtctggagccagagccttcttcagcagatgagtggaggctttcttccagtgctgatgccaatggaaatgcccagccctcttcactcgctgccaagggctacagaagtgtgcatcccaaccttccttctgacaagtcccaggttctctctcccccacgccctcctctccctcaaaaggaccgctttgcatggcagtcccccaccatccacaatacctataaggattccctctacctgagctcaccaaagccttatgtcccactcggcacccccagacagcagaacccctcacaaccccagcctatctctgtcctcctggcagctggatcggctcccaaaggtgtggtgtgccctggttccttgcttccggactccacgttccccagtgcttcatcccaaccccagcagcgctatgcagccaccaggacagtttatcataagaatgtgagctctaacccatgtcatgaggcagttgggattaaaaaggtcagcagcttatatgtaccttgtttatccaataacatttgcctggcggcgtcagaaaactcctctcgtgttgcacgtgaccctgccgaaggcactcccttggaggctgcgggcacccgagcaccggctcccggccttgtctcccgcacagccggcacaggaaaaccaccccctgctcctcctcctgaccctcccaagctattctttgacatccgtaaagatgccgttaaccgtggcgagagtccttccctggggactcaggcttcgttcccagatgtgagaccacctgtgctaggcccccgggttacctctgatcccgaaaaccggaagagcaaagaatcttaccttttgcagccgagttatccagccaaggatgccacttcctccagtgcagcccagccggaggtaatagttgtccctctctacctggttaatactgacagagggcaagaaggcactgccagacctccaacacctctggggcctcttggctgcgtccccacaatcccagcgactgcctctgccgcctcacctctgaccttcccgactctagatgatttcattccccctcatctgcagaggtggccccaccacagccagccagcccgcgcctctggctcctttgcccccattagccagacgccaccatccttctcaccaccacctccgctggtccctcctgccccggaggacctccgcagagtctcggagcctgacctcacgggagctgtttcgagtaccgattccagtcctctactaaatgaagtttcttcttcccttattggaactgattcccaagcctttccatcagttagcaagccttcatccgcctatccctccacaacgattgtcaatcctactattgtgctcttgcaacacaatcgagaacagcaaaaacgactcagtagcctttcagatcctgtctcagaaagaagagtgggagagcaggactcagcaccaacccaggaaaaacccacctcacctggcaaggctattgaaaaaagagcaaaggatgacagtaggcgggtggtgaagagcactcaggacttaagcgatgtttccatggatgaagtgggcatcccactccggaacactgagagatcaaaagactggtacaagactatgtttaaacagatccacaaactgaacagagatgatgattcagatctgtactctcccagatactcattttctgaagacacaaaatctcccctttctgtgcctcgctcaaaaagtgagatgagctacattgatggtgagaaggtagtcaagaggtcggccacactacccctcccagcccgctcttcctcactgaagtcaagctcagaaagaaatgactgggaacccccagataagaaagtagatacaagaaaatatcgtgcagagcccaagagcatttacgaatatcagcctggcaagtcttccgttctgaccaacgaaaagatgagctcagccatcagccctactccggaaatttcttcagagactcctggatatatatattcttccaacttccatgcagtgaagagggaatcagacggggctcctggggatctcactagcttggagaatgagagacaaatttataaaagtgtcttggaaggtggtgacatccctcttcagggcctgagtgggctcaagcgaccatccagctctgcttccactaaagattcagaatcgccaagacattttataccagctgattacttggaatccacggaagaatttattcgaagacgtcatgatgataaagagaaacttttagcggaccagagacgacttaaacgcgagcaagaagaggctgatattgcagctcgacgccacacaggcgtcattccgacgcaccatcagtttatcactaatgagcgctttggggacctcctcaatatagacgatactgcaaaaaggaaatctgggtcagagatgagacctgccagagccaaatttgactttaaagctcagacactaaaggagcttcctctgcagaagggagatattgtttacatttataagcaaattgatcagaactggtatgaaggagaacaccacggccgggtgggaatcttcccacgcacctacatcgagcttcttcctcctgctgagaaggcacagcccaaaaagttgacaccagtgcaggttttggaatatggagaagctattgctaagtttaactttaatggtgatacacaagtagaaatgtccttcagaaagggtgagaggatcacactgctccggcaggtagatgagaactggtacgaagggaggatcccggggacatcccgacaaggcatcttccccatcacctacgtggatgtgatcaagcgaccactggtgaaaaaccctgtggattacatggacctgcctttctcctcctccccaagtcgcagtgccactgcaagcccacagcaacctcaagcccagcagcgaagagtcacccccgacaggagtcaaacctcacaagatttatttagctatcaagcattatatagctatataccacagaatgatgatgagttggaactccgcgatggagatatcgttgatgtcatggaaaaatgtgacgatggatggtttgttggtacttcaagaaggacaaagcagtttggtacttttccaggcaactatgtaaaacctttgtatctataagaagactgaaaaccatggagattatttttattggaggaggaagcatcattcatgaaccgatctttttagttgagtcagtaggaaaattaatacagtggataaagtaagaagcaaaagacagggacagagaagtgttgtgtttaaaacccaagcctgtctaaggttactgtgtattagacagggccgaactagtgtgctgagcaaaaagaattgaagcaaattgtatttacttagccgcttctgggagccacttcagcctttcccctcccctccacttcttgggtaatctgacctgaagcatagtccaggagcagagttagccagaaatgcctcctgctgccccagccttagagagctcccatctcaatcattgagcctgaaggcttcaagcccaagaatgcaacaagacccccagcctacatttctcagctcccctggagccagctgatcctgtaacgctgctggaggtcagtctgagctaccaagactgtccctagacaaaggtggagtcccccacactgcccaagaccaaatccctcactcaacctgctgaggtgtggatggggaaacagaggcaaaactgaggcacctgatgcattcagcctgctgtgcagcagtgccattgactgccctgatgttcagagagaaacgcacacaaggtttgcccatgagaattggggagcagatggccaagcagataggttatgtctgttttctgagtgatgaagtcaggaagccctgtggctctggaggccacttgtggttcattcttttcccatatccttggcttttagaaatggttaccttcaggacagtgcagctgcatttatcagagcactattgctaagttttcttttctggcttgtgtttttctgggacagtttagaattgggaggcctattctcatagaacaccaaaaatgatgttcagtgattcatttaacatacaccaatgtactctggctgctggggggacaaccataagcaagacatgcccagggtttgccgtggctccagatctactccctgtaggagttcaaggatcacacaaacggtagtaaccagggttgtgaatctgagtacaccctggcaaggcttctcttcagactgaagcagcaattctgccactaccagcagcaaccaggacgtctgttctttgtgggggccagatcagaagagagaggcccctgtgacgcccgggctgcttggtcacaactctgtccaattcaaggatgtttatcggcctctcttagatcctgagtgagacaaatacagaaatgacccattccctgcccaccagaaactcagaggtgattggggagactgacacaggaaaatgaacttaatcaagagagactgtgatatgtgctaagaagggtgtgagggagggagagatgaattttccctggagggatcctagaaagcattgtcatattgccatctccattagctcacttttaaacaactagggtgctggaagaacctttgtctgagggtagttcatagctggaaatacttggaatattttccagagtctctaaactctcatcttcccccacagatacacatccaagctcacaaataggagtagcaattctaggtggtagggttgtgtacggaacccctggctgtctgcatatatctcagaattaccccaggaccattgtcccaaagtctagagtctttacaggtaggcaaaatttgttttcaatgcctgtgcctcagctgctgtcacaaatacccatcttaggatcccatcagcttcccatcccccaccagacagccacagtaccctcactttctccctattgttctttcaaatcctgttctcaggaaagaaactgccactaattcattcacactaaggtgtaaatgattgataataggaatgagttacctcttcccacagacatttgtttttaagtatgacagagcagggccttaatcccaagggaaaaggttatggaactggagggggtgagctttctgggtagaaggagacttcctgaatttccttaaaacccagtaagagtaagacctgttgttttggaaggtctgctccaccatctaagagcactgtttttttttttttgttgttgttgttgttttacggtctctgagggaatatagtaaaaatgcatatgcacgtgcaatttgcacggcagcatttcaccgattgtggactgtattggctaatgtgtttcctggtctttagatgcaaaccattaataacactatcttatctcatagttttttcaggggtgcttcttgattagtagggaattttgaacacctctttaaatacagctagaaaataaaaccaatttgtaaagccacatttgcatatgatgccagcctcacgcatttgtatatctccagaaattcaggtatgcctcaccaatttgcccgtctttaataaaatcttgtgttaaaatttgcatcacgtcgccttcctatgtatgacgaaacaagaaacagagatttccaattgctcttttgtcttcagacatttagtaatataaagtacctatttttatgctgaaatgtttatacaggtttattaatagcaagtgcaactaactggcggcatgccttgcaacacattttgatatattagccatgcttccgggtaaaggcaagccccaaactccttatcttttgcagtctctctgggatcagtaaaagaaaaaaaaaataatgtgcttaagaagtgggactgtaaatatgtatatttaactttgtatagcccatgtacctaccttgtatagaaaaataattttaaaaatttgaatggaagggggtaaaggaagtcatgaagtttttttgcatttttatttaaatgaaggaattccaaataactcacctacagatttttagcacaaaaatagccattgtaaagtgttaaaatttacgataagtattctattggggaggaaaggtaactctgatctcagttacagtttttttttcctttttaatttcattattttgggtttttggtttttgcagtcctatttatctgcagtcgtattaagtcctattgctagaataggttactacaaaaaaggttatattctgaaagaaaaataactgacattatatataaccaattaatttaaagtattgccatttaaattacacactgagagcatgtcctatgcagacatagatttttctgttcatttatttttcttcattgcagtggattgatttgataaatagatgtgttgaattactacatttgctgtacatattatttaataaactttattcagaattgcgtggc

SEQ ID NO: 314194 - DNA, 6757 bp, Homo sapiens
aggaggaagcatcattcatgaaccgatctttgcagacgacttgtcctgccaccaccatgagttctgaatgtgatggtggttccaaagctgtgatgaatggcttggcacctggcagcaatgggcaagacaaagcaactgccgaccctttacgcgcacgctctatttctgctgttaaaatcattcctgtgaagacagtgaaaaacgcctcaggcctagttctccctacagacatggatcctacaaaaatctgcactgggaagggagcggtgactctccgggcctcgtcttcctacagggaaaccccaagcagtagccctgcgagccctcaggaaacccggcaacacgaaagcaaaccaggtctggagccagagccttcttcagcagatgagtggaggctttcttccagtgctgatgccaatggaaatgcccagccctcttcactcgctgccaagggctacagaagtgtgcatcccaaccttccttctgacaagtcccaggttctctctcccccacgccctcctctccctcaaaaggaccgctttgcatggcagtcccccaccatccacaatacctataaggattccctctacctgagctcaccaaagccttatgtcccactcggcacccccagacagcagaacccctcacaaccccagcctatctctgtcctcctggcagctggatcggctcccaaaggtgtggtgtgccctggttccttgcttccggactccacgttccccagtgcttcatcccaaccccagcagcgctatgcagccaccaggacagtttatcataagaatgtgagctctaacccatgtcatgaggcagttgggattaaaaaggtcagcagcttatatgtaccttgtttatccaataacatttgcctggcggcgtcagaaaactcctctcgtgttgcacgtgaccctgccgaaggcactcccttggaggctgcgggcacccgagcaccggctcccggccttgtctcccgcacagccggcacaggaaaaccaccccctgctcctcctcctgaccctcccaagctattctttgacatccgtaaagatgccgttaaccgtggcgagagtccttccctggggactcaggcttcgttcccagatgtgagaccacctgtgctaggcccccgggttacctctgatcccgaaaaccggaagagcaaagaatcttaccttttgcagccgagttatccagccaaggatgccacttcctccagtgcagcccagccggaggtaatagttgtccctctctacctggttaatactgacagagggcaagaaggcactgccagacctccaacacctctggggcctcttggctgcgtccccacaatcccagcgactgcctctgccgcctcacctctgaccttcccgactctagatgatttcattccccctcatctgcagaggtggccccaccacagccagccagcccgcgcctctggctcctttgcccccattagccagacgccaccatccttctcaccaccacctccgctggtccctcctgccccggaggacctccgcagagtctcggagcctgacctcacgggagctgtttcgagtaccgattccagtcctctactaaatgaagtttcttcttcccttattggaactgattcccaagcctttccatcagttagcaagccttcatccgcctatccctccacaacgattgtcaatcctactattgtgctcttgcaacacaatcgagaacagcaaaaacgactcagtagcctttcagatcctgtctcagaaagaagagtgggagagcaggactcagcaccaacccaggaaaaacccacctcacctggcaaggctattgaaaaaagagcaaaggatgacagtaggcgggtggtgaagagcactcaggacttaagcgatgtttccatggatgaagtgggcatcccactccggaacactgagagatcaaaagactggtacaagactatgtttaaacagatccacaaactgaacagagatgatgattcagatctgtactctcccagatactcattttctgaagacacaaaatctcccctttctgtgcctcgctcaaaaagtgagatgagctacattgatggtgagaaggtagtcaagaggtcggccacactacccctcccagcccgctcttcctcactgaagtcaagctcagaaagaaatgactgggaacccccagataagaaagtagatacaagaaaatatcgtgcagagcccaagagcatttacgaatatcagcctggcaagtcttccgttctgaccaacgaaaagatgagctcagccatcagccctactccggaaatttcttcagagactcctggatatatatattcttccaacttccatgcagtgaagagggaatcagacggggctcctggggatctcactagcttggagaatgagagacaaatttataaaagtgtcttggaaggtggtgacatccctcttcagggcctgagtgggctcaagcgaccatccagctctgcttccactaaagattcagaatcgccaagacattttataccagctgattacttggaatccacggaagaatttattcgaagacgtcatgatgataaagagaaacttttagcggaccagagacgacttaaacgcgagcaagaagaggctgatattgcagctcgacgccacacaggcgtcattccgacgcaccatcagtttatcactaatgagcgctttggggacctcctcaatatagacgatactgcaaaaaggaaatctgggtcagagatgagacctgccagagccaaatttgactttaaagctcagacactaaaggagcttcctctgcagaagggagatattgtttacatttataagcaaattgatcagaactggtatgaaggagaacaccacggccgggtgggaatcttcccacgcacctacatcgagcttcttcctcctgctgagaaggcacagcccaaaaagttgacaccagtgcaggttttggaatatggagaagctattgctaagtttaactttaatggtgatacacaagtagaaatgtccttcagaaagggtgagaggatcacactgctccggcaggtagatgagaactggtacgaagggaggatcccggggacatcccgacaaggcatcttccccatcacctacgtggatgtgatcaagcgaccactggtgaaaaaccctgtggattacatggacctgcctttctcctcctccccaagtcgcagtgccactgcaagcccacagcaacctcaagcccagcagcgaagagtcacccccgacaggagtcaaacctcacaagatttatttagctatcaagcattatatagctatataccacagaatgatgatgagttggaactccgcgatggagatatcgttgatgtcatggaaaaatgtgacgatggatggtttgttggtacttcaagaaggacaaagcagtttggtacttttccaggcaactatgtaaaacctttgtatctataagaagactgaaaaccatggagattatttttattggaggaggaagcatcattcatgaaccgatctttttagttgagtcagtaggaaaattaatacagtggataaagtaagaagcaaaagacagggacagagaagtgttgtgtttaaaacccaagcctgtctaaggttactgtgtattagacagggccgaactagtgtgctgagcaaaaagaattgaagcaaattgtatttacttagccgcttctgggagccacttcagcctttcccctcccctccacttcttgggtaatctgacctgaagcatagtccaggagcagagttagccagaaatgcctcctgctgccccagccttagagagctcccatctcaatcattgagcctgaaggcttcaagcccaagaatgcaacaagacccccagcctacatttctcagctcccctggagccagctgatcctgtaacgctgctggaggtcagtctgagctaccaagactgtccctagacaaaggtggagtcccccacactgcccaagaccaaatccctcactcaacctgctgaggtgtggatggggaaacagaggcaaaactgaggcacctgatgcattcagcctgctgtgcagcagtgccattgactgccctgatgttcagagagaaacgcacacaaggtttgcccatgagaattggggagcagatggccaagcagataggttatgtctgttttctgagtgatgaagtcaggaagccctgtggctctggaggccacttgtggttcattcttttcccatatccttggcttttagaaatggttaccttcaggacagtgcagctgcatttatcagagcactattgctaagttttcttttctggcttgtgtttttctgggacagtttagaattgggaggcctattctcatagaacaccaaaaatgatgttcagtgattcatttaacatacaccaatgtactctggctgctggggggacaaccataagcaagacatgcccagggtttgccgtggctccagatctactccctgtaggagttcaaggatcacacaaacggtagtaaccagggttgtgaatctgagtacaccctggcaaggcttctcttcagactgaagcagcaattctgccactaccagcagcaaccaggacgtctgttctttgtgggggccagatcagaagagagaggcccctgtgacgcccgggctgcttggtcacaactctgtccaattcaaggatgtttatcggcctctcttagatcctgagtgagacaaatacagaaatgacccattccctgcccaccagaaactcagaggtgattggggagactgacacaggaaaatgaacttaatcaagagagactgtgatatgtgctaagaagggtgtgagggagggagagatgaattttccctggagggatcctagaaagcattgtcatattgccatctccattagctcacttttaaacaactagggtgctggaagaacctttgtctgagggtagttcatagctggaaatacttggaatattttccagagtctctaaactctcatcttcccccacagatacacatccaagctcacaaataggagtagcaattctaggtggtagggttgtgtacggaacccctggctgtctgcatatatctcagaattaccccaggaccattgtcccaaagtctagagtctttacaggtaggcaaaatttgttttcaatgcctgtgcctcagctgctgtcacaaatacccatcttaggatcccatcagcttcccatcccccaccagacagccacagtaccctcactttctccctattgttctttcaaatcctgttctcaggaaagaaactgccactaattcattcacactaaggtgtaaatgattgataataggaatgagttacctcttcccacagacatttgtttttaagtatgacagagcagggccttaatcccaagggaaaaggttatggaactggagggggtgagctttctgggtagaaggagacttcctgaatttccttaaaacccagtaagagtaagacctgttgttttggaaggtctgctccaccatctaagagcactgtttttttttttttgttgttgttgttgttttacggtctctgagggaatatagtaaaaatgcatatgcacgtgcaatttgcacggcagcatttcaccgattgtggactgtattggctaatgtgtttcctggtctttagatgcaaaccattaataacactatcttatctcatagttttttcaggggtgcttcttgattagtagggaattttgaacacctctttaaatacagctagaaaataaaaccaatttgtaaagccacatttgcatatgatgccagcctcacgcatttgtatatctccagaaattcaggtatgcctcaccaatttgcccgtctttaataaaatcttgtgttaaaatttgcatcacgtcgccttcctatgtatgacgaaacaagaaacagagatttccaattgctcttttgtcttcagacatttagtaatataaagtacctatttttatgctgaaatgtttatacaggtttattaatagcaagtgcaactaactggcggcatgccttgcaacacattttgatatattagccatgcttccgggtaaaggcaagccccaaactccttatcttttgcagtctctctgggatcagtaaaagaaaaaaaaaataatgtgcttaagaagtgggactgtaaatatgtatatttaactttgtatagcccatgtacctaccttgtatagaaaaataattttaaaaatttgaatggaagggggtaaaggaagtcatgaagtttttttgcatttttatttaaatgaaggaattccaaataactcacctacagatttttagcacaaaaatagccattgtaaagtgttaaaatttacgataagtattctattggggaggaaaggtaactctgatctcagttacagtttttttttcctttttaatttcattattttgggtttttggtttttgcagtcctatttatctgcagtcgtattaagtcctattgctagaataggttactacaaaaaaggttatattctgaaagaaaaataactgacattatatataaccaattaatttaaagtattgccatttaaattacacactgagagcatgtcctatgcagacatagatttttctgttcatttatttttcttcattgcagtggattgatttgataaatagatgtgttgaattactacatttgctgtacctcggccgcgaccacgctaa

SEQ ID NO: 314195 - DNA, 6431 bp, Homo sapiens
aggaggaagcatcattcatgaaccgatctttgcagacgacttgtcctgccaccaccatgagttctgaatgtgatggtggttccaaagctgtgatgaatggcttggcacctggcagcaatgggcaagacaaagcaactgccgaccctttacgcgcacgctctatttctgctgttaaaatcattcctgtgaagacagtgaaaaacgcctcaggcctagttctccctacagacatggatcctacaaaaatctgcactgggaagggagcggtgactctccgggcctcgtcttcctacagggaaaccccaagcagtagccctgcgagccctcaggaaacccggcaacacgaaagcaaaccaggtctggagccagagccttcttcagcagatgagtggaggctttcttccagtgctgatgccaatggaaatgcccagccctcttcactcgctgccaagggctacagaagtgtgcatcccaaccttccttctgacaagtcccaggttctctctcccccacgccctcctctccctcaaaaggaccgctttgcatggcagtcccccaccatccacaatacctataaggattccctctacctgagctcaccaaagccttatgtcccactcggcacccccagacagcagaacccctcacaaccccagcctatctctgtcctcctggcagctggatcggctcccaaaggtgtggtgtgccctggttccttgcttccggactccacgttccccagtgcttcatcccaaccccagcagcgctatgcagccaccaggacagtttatcataagaatgtgagctctaacccatgtcatgaggcagttgggattaaaaaggtcagcagcttatatgtaccttgtttatccaataacatttgcctggcggcgtcagaaaactcctctcgtgttgcacgtgaccctgccgaaggcactcccttggaggctgcgggcacccgagcaccggctcccggccttgtctcccgcacagccggcacaggaaaaccaccccctgctcctcctcctgaccctcccaagctattctttgacatccgtaaagatgccgttaaccgtggcgagagtccttccctggggactcaggcttcgttcccagatgtgagaccacctgtgctaggcccccgggttacctctgatcccgaaaaccggaagagcaaagaatcttaccttttgcagccgagttatccagccaaggatgccacttcctccagtgcagcccagccggaggtaatagttgtccctctctacctggttaatactgacagagggcaagaaggcactgccagacctccaacacctctggggcctcttggctgcgtccccacaatcccagcgactgcctctgccgcctcacctctgaccttcccgactctagatgatttcattccccctcatctgcagaggtggccccaccacagccagccagcccgcgcctctggctcctttgcccccattagccagacgccaccatccttctcaccaccacctccgctggtccctcctgccccggaggacctccgcagagtctcggagcctgacctcacgggagctgtttcgagtaccgattccagtcctctactaaatgaagtttcttcttcccttattggaactgattcccaagcctttccatcagttagcaagccttcatccgcctatccctccacaacgattgtcaatcctactattgtgctcttgcaacacaatcgagaacagcaaaaacgactcagtagcctttcagatcctgtctcagaaagaagagtgggagagcaggactcagcaccaacccaggaaaaacccacctcacctggcaaggctattgaaaaaagagcaaaggatgacagtaggcgggtggtgaagagcactcaggacttaagcgatgtttccatggatgaagtgggcatcccactccggaacactgagagatcaaaagactggtacaagactatgtttaaacagatccacaaactgaacagagatgatgattcagatctgtactctcccagatactcattttctgaagacacaaaatctcccctttctgtgcctcgctcaaaaagtgagatgagctacattgatggtgagaaggtagtcaagaggtcggccacactacccctcccagcccgctcttcctcactgaagtcaagctcagaaagaaatgactgggaacccccagataagaaagtagatacaagaaaatatcgtgcagagcccaagagcatttacgaatatcagcctggcaagtcttccgttctgaccaacgaaaagatgagctcagccatcagccctactccggaaatttcttcagagactcctggatatatatattcttccaacttccatgcagtgaagagggaatcagacggggctcctggggatctcactagcttggagaatgagagacaaatttataaaagtgtcttggaaggtggtgacatccctcttcagggcctgagtgggctcaagcgaccatccagctctgcttccactaaagattcagaatcgccaagacattttataccagctgattacttggaatccacggaagaatttattcgaagacgtcatgatgataaagagaaacttttagcggaccagagacgacttaaacgcgagcaagaagaggctgatattgcagctcgacgccacacaggcgtcattccgacgcaccatcagtttatcactaatgagcgctttggggacctcctcaatatagacgatactgcaaaaaggaaatctgggtcagagatgagacctgccagagccaaatttgactttaaagctcagacactaaaggagcttcctctgcagaagggagatattgtttacatttataagcaaattgatcagaactggtatgaaggagaacaccacggccgggtgggaatcttcccacgcacctacatcgagcttcttcctcctgctgagaaggcacagcccaaaaagttgacaccagtgcaggttttggaatatggagaagctattgctaagtttaactttaatggtgatacacaagtagaaatgtccttcagaaagggtgagaggatcacactgctccggcaggtagatgagaactggtacgaagggaggatcccggggacatcccgacaaggcatcttccccatcacctacgtggatgtgatcaagcgaccactggtgaaaaaccctgtggattacatggacctgcctttctcctcctccccaagtcgcagtgccactgcaagcccacagcaacctcaagcccagcagcgaagagtcacccccgacaggagtcaaacctcacaagatttatttagctatcaagcattatatagctatataccacagaatgatgatgagttggaactccgcgatggagatatcgttgatgtcatggaaaaatgtgacgatggatggtttgttggtacttcaagaaggacaaagcagtttggtacttttccaggcaactatgtaaaacctttgtatctataagaagactgaaaaccatggagattatttttattggaggaggaagcatcattcatgaaccgatctttttagttgagtcagtaggaaaattaatacagtggataaagtaagaagcaaaagacagggacagagaagtgttgtgtttaaaacccaagcctgtctaaggttactgtgtattagacagggccgaactagtgtgctgagcaaaaagaattgaagcaaattgtatttacttagccgcttctgggagccacttcagcctttcccctcccctccacttcttgggtaatctgacctgaagcatagtccaggagcagagttagccagaaatgcctcctgctgccccagccttagagagctcccatctcaatcattgagcctgaaggcttcaagcccaagaatgcaacaagacccccagcctacatttctcagctcccctggagccagctgatcctgtaacgctgctggaggtcagtctgagctaccaagactgtccctagacaaaggtggagtcccccacactgcccaagaccaaatccctcactcaacctgctgaggtgtggatggggaaacagaggcaaaactgaggcacctgatgcattcagcctgctgtgcagcagtgccattgactgccctgatgttcagagagaaacgcacacaaggtttgcccatgagaattggggagcagatggccaagcagataggttatgtctgttttctgagtgatgaagtcaggaagccctgtggctctggaggccacttgtggttcattcttttcccatatccttggcttttagaaatggttaccttcaggacagtgcagctgcatttatcagagcactattgctaagttttcttttctggcttgtgtttttctgggacagtttagaattgggaggcctattctcatagaacaccaaaaatgatgttcagtgattcatttaacatacaccaatgtactctggctgctggggggacaaccataagcaagacatgcccagggtttgccgtggctccagatctactccctgtaggagttcaaggatcacacaaacggtagtaaccagggttgtgaatctgagtacaccctggcaaggcttctcttcagactgaagcagcaattctgccactaccagcagcaaccaggacgtctgttctttgtgggggccagatcagaagagagaggcccctgtgacgcccgggctgcttggtcacaactctgtccaattcaaggatgtttatcggcctctcttagatcctgagtgagacaaatacagaaatgacccattccctgcccaccagaaactcagaggtgattggggagactgacacaggaaaatgaacttaatcaagagagactgtgatatgtgctaagaagggtgtgagggagggagagatgaattttccctggagggatcctagaaagcattgtcatattgccatctccattagcctcactttctccctattgttctttcaaatcctgttctcaggaaagaaactgccactaattcattcacactaaggtgtaaatgattgataataggaatgagttacctcttcccacagacatttgtttttaagtatgacagagcagggccttaatcccaagggaaaaggttatggaactggagggggtgagctttctgggtagaaggagacttcctgaatttccttaaaacccagtaagagtaagacctgttgttttggaaggtctgctccaccatctaagagcactgtttttttttttttgttgttgttgttgttttacggtctctgagggaatatagtaaaaatgcatatgcacgtgcaatttgcacggcagcatttcaccgattgtggactgtattggctaatgtgtttcctggtctttagatgcaaaccattaataacactatcttatctcatagttttttcaggggtgcttcttgattagtagggaattttgaacacctctttaaatacagctagaaaataaaaccaatttgtaaagccacatttgcatatgatgccagcctcacgcatttgtatatctccagaaattcaggtatgcctcaccaatttgcccgtctttaataaaatcttgtgttaaaatttgcatcacgtcgccttcctatgtatgacgaaacaagaaacagagatttccaattgctcttttgtcttcagacatttagtaatataaagtacctatttttatgctgaaatgtttatacaggtttattaatagcaagtgcaactaactggcggcatgccttgcaacacattttgatatattagccatgcttccgggtaaaggcaagccccaaactccttatcttttgcagtctctctgggatcagtaaaagaaaaaaaaaataatgtgcttaagaagtgggactgtaaatatgtatatttaactttgtatagcccatgtacctaccttgtatagaaaaataattttaaaaatttgaatggaagggggtaaaggaagtcatgaagtttttttgcatttttatttaaatgaaggaattccaaataactcacctacagatttttagcacaaaaatagccattgtaaagtgttaaaatttacgataagtattctattggggaggaaaggtaactctgatctcagttacagtttttttttcctttttaatttcattattttgggtttttggtttttgcagtcctatttatctgcagtcgtattaagtcctattgctagaataggttactacaaaaaaggttatattctgaaagaaaaataactgacattatatataaccaattaatttaaagtattgccatttaaattacacactgagagcatgtcctatgcagacatagatttttctgttcatttatttttcttcattgcagtggattgatttgataaatagatgtgttgaattactacatttgctgtacatattatttaataaactttattcagaattgcgtggc

SEQ ID NO: 314196 - DNA, 3115 bp, Homo sapiens
aggaggaagcatcattcatgaaccgatctttgcagacgacttgtcctgccaccaccatgagttctgaatgtgatggtggttccaaagctgtgatgaatggcttggcacctggcagcaatgggcaagacaaagcaactgccgaccctttacgcgcacgctctatttctgctgttaaaatcattcctgtgaagacagtgaaaaacgcctcaggcctagttctccctacagacatggatcctacaaaaatctgcactgggaagggagcggtgactctccgggcctcgtcttcctacagggaaaccccaagcagtagccctgcgagccctcaggaaacccggcaacacgaaagcaaaccaggtctggagccagagccttcttcagcagatgagtggaggctttcttccagtgctgatgccaatggaaatgcccagccctcttcactcgctgccaagggctacagaagtgtgcatcccaaccttccttctgacaagtcccaggttctctctcccccacgccctcctctccctcaaaaggaccgctttgcatggcagtcccccaccatccacaatacctataaggattccctctacctgagctcaccaaagccttatgtcccactcggcacccccagacagcagaacccctcacaaccccagcctatctctgtcctcctggcagctggatcggctcccaaaggtgtggtgtgccctggttccttgcttccggactccacgttccccagtgcttcatcccaaccccagcagcgctatgcagccaccaggacagtttatcataagaatgtgagctctaacccatgtcatgaggcagttgggattaaaaaggtcagcagcttatatgtaccttgtttatccaataacatttgcctggcggcgtcagaaaactcctctcgtgttgcacgtgaccctgccgaaggcactcccttggaggctgcgggcacccgagcaccggctcccggccttgtctcccgcacagccggcacaggaaaaccaccccctgctcctcctcctgaccctcccaagctattctttgacatccgtaaagatgccgttaaccgtggcgagagtccttccctggggactcaggcttcgttcccagatgtgagaccacctgtgctaggcccccgggttacctctgatcccgaaaaccggaagagcaaagaatcttaccttttgcagccgagttatccagccaaggatgccacttcctccagtgcagcccagccggaggtaatagttgtccctctctacctggttaatactgacagagggcaagaaggcactgccagacctccaacacctctggggcctcttggctgcgtccccacaatcccagcgactgcctctgccgcctcacctctgaccttcccgactctagatgatttcattccccctcatctgcagaggtggccccaccacagccagccagcccgcgcctctggctcctttgcccccattagccagacgccaccatccttctcaccaccacctccgctggtccctcctgccccggaggacctccgcagagtctcggagcctgacctcacgggagctgtttcgagtaccgattccagtcctctactaaatgaagtttcttcttcccttattggaactgattcccaagcctttccatcagttagcaagccttcatccgcctatccctccacaacgattgtcaatcctactattgtgctcttgcaacacaatcgaggtaagagaggcttgtgccccactcccagcccactggaatcaacatagctattccatgatacttgggtcagaaattctgttatttcacagaaattttcacaaatcccattgtttcccaaggccatttgccctcagtttactcactctcatggcccataaaataaatcccagcagacagacagaggcccctgatctgaggtgatatcaggtgtctgaataagtaagctgggttcgttccacttcttgggtgttcatgattgtcttcttcaaatcgtaacaccaaaaaaaaggagaaaggaaaaagtttgtgtctcttgatggtaatagagatttaacttcgaaaatctaggtacaataatacctcttttaagtagtatcttaaatgatttatttttttgacataatgaaatttagagagagcagaattttgagtatcaaatttaaaaaagaaaacatattgtgtagacaattttctggaatgtaaaacacgtttttgtaccttgaaaacagagactattgaatttttcttgaagactcactggccttcattcttgccagctgtttgtctctgtactatgtggctctaggcagctctgcttagagttttcatgtttgttttctgtagtgtctctgactgcttctggttggtttttctgcttctctgaaaagcagagaagctttgagttggggtgaagcggaagttctttgggtatatgttgacccttctgctttaaaattccagacgatgattctaaatcccaagttttcctttttggaaatccatacaggaataaactttgtctttacaaaagtcctttgcagcatgaaatgtaaagttttcaagctgtttcctcatgtagaaagggcttgttagtctgaatttctgataacagtggaggtttaattattttgttcagagctcacgtcttccttttgactctgtgctctctgacttcacagttttcctccactcctccccctcccccttcctctctgcattaatttgaatgagaatgggactggagtctatttttaattgttttccttactaaatagagtttttctgtttcctgcttctaacttgaaaagcagatgaataaaacattttctttcacttcagatctttccactaaaatcttaaggttgttttagtagttttgtattttttttcactatgtgtggctcctgtattaattttcacccatgaatctgggttcttaataaaaagggccccagctcccacacggaaccatgcaggagcccattctccttcagcggtgccatgccccttactggcagtggctctccttgcccagaaagtgtctgtaatgtgggacaaagtgaaattttgtttctctgaacttccttgtgactcatatttaaaaaaa

SEQ ID NO: 314197 - DNA, 2566 bp, Homo sapiens
aggaggaagcatcattcatgaaccgatctttgcagacgacttgtcctgccaccaccatgagttctgaatgtgatggtggttccaaagctgtgatgaatggcttggcacctggcagcaatgggcaagacaaagcaactgccgaccctttacgcgcacgctctatttctgctgttaaaatcattcctgtgaagacagtgaaaaacgcctcaggcctagttctccctacagacatggatcctacaaaaatctgcactgggaagggagcggtgactctccgggcctcgtcttcctacagggaaaccccaagcagtagccctgcgagccctcaggaaacccggcaacacgaaagcaaaccaggtctggagccagagccttcttcagcagatgagtggaggctttcttccagtgctgatgccaatggaaatgcccagccctcttcactcgctgccaagggctacagaagtgtgcatcccaaccttccttctgacaagtcccaggttctctctcccccacgccctcctctccctcaaaaggaccgctttgcatggcagtcccccaccatccacaatacctataaggattccctctacctgagctcaccaaagccttatgtcccactcggcacccccagacagcagaacccctcacaaccccagcctatctctgtcctcctggcagctggatcggctcccaaaggtgtggtgtgccctggttccttgcttccggactccacgttccccagtgcttcatcccaaccccagcagcgctatgcagccaccaggacagtttatcataagaatgtgagctctaacccatgtcatgaggcagttgggattaaaaaggtcagcagcttatatgtaccttgtttatccaataacatttgcctggcggcgtcagaaaactcctctcgtgttgcacgtgaccctgccgaaggcactcccttggaggctgcgggcacccgagcaccggctcccggccttgtctcccgcacagccggcacaggaaaaccaccccctgctcctcctcctgaccctcccaagctattctttgacatccgtaaagatgccgttaaccgtggcgagagtccttccctggggactcaggcttcgttcccagatgtgagaccacctgtgctaggcccccgggttacctctgatcccgaaaaccggaagagcaaagaatcttaccttttgcagccgagttatccagccaaggatgccacttcctccagtgcagcccagccggaggtaatagttgtccctctctacctggttaatactgacagagggcaagaaggcactgccagacctccaacacctctggggcctcttggctgcgtccccacaatcccagcgactgcctctgccgcctcacctctgaccttcccgactctagatgatttcattccccctcatctgcagaggtggccccaccacagccagccagcccgcgcctctggctcctttgcccccattagccagacgccaccatccttctcaccaccacctccgctggtccctcctgccccggaggacctccgcagagtctcggagcctgacctcacgggagctgtttcgagtaccgattccagtcctctactaaatgaagtttcttcttcccttattggaactgattcccaagcctttccatcagttagcaagccttcatccgcctatccctccacaacgattgtcaatcctactattgtgctcttgcaacacaatcgagaacagcaaaaacgactcagtagcctttcagatcctgtctcagaaagaagagtgggagagcaggactcagcaccaacccaggaaaaacccacctcacctggcaaggctattgaaaaaagagcaaaggatgacagtaggcgggtggtgaagagcactcaggacttaagcgatgtttccatggatgaagtgggcatcccactccggaacactgagagatcaaaagactggtacaagactatgtttaaacagatccacaaactgaacagagatgatgattcagatctgtactctcccagatactcattttctgaagacacaaaatctcccctttctgtgcctcgctcaaaaagtgagatgagctacattgatggtgagaaggtagtcaagaggtcggccacactacccctcccagcccgctcttcctcactgaagtcaagctcagaaagaaatgactgggaacccccagataagaaagtagatacaagaaaatatcgtgcagagcccaagagcatttacgaatatcagcctggcaagtcttccgttctgaccaacgaaaagatggtaatgtgcatattaaagttattttgtctcaccgtgcccatgttctttaatcagaatgcattgtgcagttggattacattctttccccttgagatagacttaactttgttttgaagataatgacaaaaatgaagtacttttacccttttcatttttgcaggtgttcataaaataagtcccgcgagtctgcttttaaaaaaccctcttattgtggctctgttgctttttttgtgcatggttttaactaatattaatttttctactaacataaagattga

SEQ ID NO: 314198 - DNA, 2789 bp, Homo sapiens
aggaggaagcatcattcatgaaccgatctttgcagacgacttgtcctgccaccaccatgagttctgaatgtgatggtggttccaaagctgtgatgaatggcttggcacctggcagcaatgggcaagacaaagcaactgccgaccctttacgcgcacgctctatttctgctgttaaaatcattcctgtgaagacagtgaaaaacgcctcaggcctagttctccctacagacatggatcctacaaaaatctgcactgggaagggagcggtgactctccgggcctcgtcttcctacagggaaaccccaagcagtagccctgcgagccctcaggaaacccggcaacacgaaagcaaaccaggtctggagccagagccttcttcagcagatgagtggaggctttcttccagtgctgatgccaatggaaatgcccagccctcttcactcgctgccaagggctacagaagtgtgcatcccaaccttccttctgacaagtcccaggttctctctcccccacgccctcctctccctcaaaaggaccgctttgcatggcagtcccccaccatccacaatacctataaggattccctctacctgagctcaccaaagccttatgtcccactcggcacccccagacagcagaacccctcacaaccccagcctatctctgtcctcctggcagctggatcggctcccaaaggtgtggtgtgccctggttccttgcttccggactccacgttccccagtgcttcatcccaaccccagcagcgctatgcagccaccaggacagtttatcataagaatgtgagctctaacccatgtcatgaggcagttgggattaaaaaggtcagcagcttatatgtaccttgtttatccaataacatttgcctggcggcgtcagaaaactcctctcgtgttgcacgtgaccctgccgaaggcactcccttggaggctgcgggcacccgagcaccggctcccggccttgtctcccgcacagccggcacaggaaaaccaccccctgctcctcctcctgaccctcccaagctattctttgacatccgtaaagatgccgttaaccgtggcgagagtccttccctggggactcaggcttcgttcccagatgtgagaccacctgtgctaggcccccgggttacctctgatcccgaaaaccggaagagcaaagaatcttaccttttgcagccgagttatccagccaaggatgccacttcctccagtgcagcccagccggaggtaatagttgtccctctctacctggttaatactgacagagggcaagaaggcactgccagacctccaacacctctggggcctcttggctgcgtccccacaatcccagcgactgcctctgccgcctcacctctgaccttcccgactctagatgatttcattccccctcatctgcagaggtggccccaccacagccagccagcccgcgcctctggctcctttgcccccattagccagacgccaccatccttctcaccaccacctccgctggtccctcctgccccggaggacctccgcagagtctcggagcctgacctcacgggagctgtttcgagtaccgattccagtcctctactaaatgaagtttcttcttcccttattggaactgattcccaagcctttccatcagttagcaagccttcatccgcctatccctccacaacgattgtcaatcctactattgtgctcttgcaacacaatcgagaacagcaaaaacgactcagtagcctttcagatcctgtctcagaaagaagagtgggagagcaggactcagcaccaacccaggaaaaacccacctcacctggcaaggctattgaaaaaagagcaaaggatgacagtaggcgggtggtgaagagcactcaggacttaagcgatgtttccatggatgaagtgggcatcccactccggaacactgagagatcaaaagactggtacaagactatgtttaaacagatccacaaactgaacagagatgatgattcagatctgtactctcccagatactcattttctgaagacacaaaatctcccctttctgtgcctcgctcaaaaagtgagatgagctacattgatggtgagaaggtagtcaagaggtcggccacactacccctcccagcccgctcttcctcactgaagtcaagctcagaaagaaatgactgggaacccccagataagaaagtagatacaagaaaatatcgtgcagagcccaagagcatttacgaatatcagcctggcaagtcttccgttctgaccaacgaaaagatgagctcagccatcagccctactccggaaatttcttcagagactcctggatatatatattcttccaacttccatgcagtgaagagggaatcagacggggctcctggggatctcactagcttggagaatgagagacaaatttataaaagtgtcttggaaggtggtgacatccctcttcagggcctgagtgggctcaagcgaccatccagctctgcttccactaaaggtaattaactgggtgaagcctgcaggcctctgtctcccatccacctccattcactgagcgtcggccgtggtgaacctccagcaatggggataagtcctgccttgttcagacccacattcaggcctcagagccctcttaaattccctcccctattttcttaccggccatttttctttctggttttaatagtttctgttcctttgaccccccaaccttgttctccttcaagatttctctctctctctctctctctttctctctttctctctctctctcat

SEQ ID NO: 314199 - DNA, 2039 bp, Homo sapiens
aggaggaagcatcattcatgaaccgatctttgcagacgacttgtcctgccaccaccatgagttctgaatgtgatggtggttccaaagctgtgatgaatggcttggcacctggcagcaatgggcaagacaaagcaactgccgaccctttacgcgcacgctctatttctgctgttaaaatcattcctgtgaagacagtgaaaaacgcctcaggcctagttctccctacagacatggatcctacaaaaatctgcactgggaagggagcggtgactctccgggcctcgtcttcctacagggaaaccccaagcagtagccctgcgagccctcaggaaacccggcaacacgaaagcaaaccaggtctggagccagagccttcttcagcagatgagtggaggctttcttccagtgctgatgccaatggaaatgcccagccctcttcactcgctgccaagggctacagaagtgtgcatcccaaccttccttctgacaagtcccaggttctctctcccccacgccctcctctccctcaaaaggaccgctttgcatggcagtcccccaccatccacaatacctataaggattccctctacctgagctcaccaaagccttatgtcccactcggcacccccagacagcagaacccctcacaaccccagcctatctctgtcctcctggcagctggatcggctcccaaaggtgtggtgtgccctggttccttgcttccggactccacgttccccagtgcttcatcccaaccccagcagcgctatgcagccaccaggacagtttatcataagaatgtgagctctaacccatgtcatgaggcagttgggattaaaaaggtcagcagcttatatgtaccttgtttatccaataacatttgcctggcggcgtcagaaaactcctctcgtgttgcacgtgaccctgccgaaggcactcccttggaggctgcgggcacccgagcaccggctcccggccttgtctcccgcacagccggcacaggaaaaccaccccctgctcctcctcctgaccctcccaagctattctttgacatccgtaaagatgccgttaaccgtggcgagagtccttccctggggactcaggcttcgttcccagatgtgagaccacctgtgctaggcccccgggttacctctgatcccgaaaaccggaagagcaaagaatcttaccttttgcagccgagttatccagccaaggatgccacttcctccagtgcagcccagccggaggtaatagttgtccctctctacctggttaatactgacagagggcaagaaggcactgccagacctccaacacctctggggcctcttggctgcgtccccacaatcccagcgactgcctctgccgcctcacctctgaccttcccgactctagatgatttcattccccctcatctgcagaggtggccccaccacagccagccagcccgcgcctctggctcctttgcccccattagccagacgccaccatccttctcaccaccacctccgctggtccctcctgccccggaggacctccgcagagtctcggagcctgacctcacgggagctgtttcgagtaccgtaagcttgctggactcccctcctcacggcttttctgaatgtctcctcccagcagtcacattccctttctcactgaagcactgagctctgaggacagcactggctgccgctgtgcctgtgtgatgactggagccgtgtcccctgtcactagcgtgcatgcttcccgtgtgtcttccctgggtctctcggggctgttccccatctctgcagtgcctcatctgctctgtcctgttgggaatgcacatctttctccctcagaagacaacatctgtggcctttatgttgactggccatgcttttcacaggccaggtcgggggtcgtgtggtgagctgaggaaagctaagaattatgggggaaagcaacggcaggcgtggtgggtgctacttaccagggagcggggagatctcggggaggaagcgattctctgattctcttgttgacctagtgagtaaata

SEQ ID NO: 314200 - DNA, 729 bp, Homo sapiens
tgactagcccgacaggtccccgagtagcccgacagtccgattagcccgacagtccccgactagcccgacagtccccgattagcccgacagtccccgactagcccgacagtccccgactcccaccacagccagccagcccgcgcctctggctcctttgcccccattagccagacgccaccatccttctcaccaccacctccgctggtccctcctgccccggaggacctccgcagagtctcggagcctgacctcacgggagctgtttcgagtaccgtaagcttgctggactcccctcctcacggcttttctgaatgtctcctcccagcagtcacattccctttctcactgaagcactgagctctgaggacagcactggctgccgctgtgcctgtgtgatgactggagccgtgtcccctgtcactagcgtgcatgcttcccgtgtgtcttccctgggtctctcggggctgttccccatctctgcagtgcctcatctgctctgtcctgttgggaatgcacatctttctccctcagaagacaacatctgtggcctttatgttgactggccatgcttttcacaggccaggtcgggggtcgtgtggtgagctgaggaaagctaagaattatgggggaaagcaacggcaggcgtggtgggtgctacttaccagggagcggggagatctcggggaggaagcgattctctgattctcttgttgacctagtgagtaaata

SEQ ID NO: 314201 - DNA, 206 bp, Homo sapiens
cttcacttagaattgtggatactaggaggagtctaacctgaggatgtgctgaaaaacgtgttaagaattgtttttgcttgaatcatgttatgctgtcgtttctaatgatcgtccttctttccatttcccctcctctttcttttttccctgtttgataacatatcttgaaaatattgctaaaggttctctctcccccacgccctcct

SEQ ID NO: 314202 - DNA, 408 bp, Homo sapiens
tgttttgtacatttgtcattgcaggagttggcatcctttggaagagttcgtgaaagctttctgcccagagctcctggaccaatgcatcttcccaccaccttaaaccactggtgaatatatgtgtttttttccttcttctcagtgaagggaaatgctttgttaactgtagaatgcgatttgcagagaactatgctgtcctttctattatagaaggaagtatactgggctgggcctaggcatatctgggttttggtacttacttgattctgccatttttactgtgggattgtaggtgaattctttgacctcccaggccccagacagagaaacatatcctgctgtttacaggatatgtttgctttgcagactaaaagagataatccatgcaagaagtaatgtatgcacgaa

SEQ ID NO: 314203 - DNA, 430 bp, Homo sapiens
gttttctttgcattaaactagttcacaaataaatccaaaaaatggggtggggggtggaatttttttttccttcagaattcgaccattgatcattaatcaagaatgacttcaaaattttgatatttataatagatgaaaggtgaactcttttcgcaagctggtttccagcgaaatctttgcctgttttaactctactttgttgttttaaagattcagaatcgccaagacattttataccagctgattacttggaatccacggaagaatttattcgaagacgtcatgatgataaagaggtaaatcccatcttttaaatccattagtttttgcttggaaaaatgtatgaagcaagtacagattcttgacatctatcagagaggtgacatgatctagcaattagaggcaaaaattgaggctttcacaagtgatt

SEQ ID NO: 314204 - DNA, 421 bp, Homo sapiens
aacatctcagcagcccagagtggtaatcctattaataataatagtcttataatgacataaccaccacctcagtgactatgtggctgtcattaattgagcccttgccacatacaagtttctgtgctgaatatatcactattgttatctcattttcattctcccagcagccccatgaagtaactcttcattttatcaatgaggagtatgaggttcagagagattaagtaatatatgcaagattacacagtaagtagcagaaccaggattcaaacctaggtgtttggggctccattaacacaggcttttactcaacgctgctatactgccctgcagattcctttccccttcctgactctgtgttcttgcttgtccccttcttgtccagaggctctctggtatctgactgcaggcattcagcttc

SEQ ID NO: 314205 - DNA, 2105 bp, Homo sapiens
  misc_feature (175)..(175): n is a, c, g, or t
gcggggccagctgcagcgtgtagtgcgagtggggcggacgcgcgcagcccgcccgcccggcgaccagcaagacggagtctcactctgtcgcccaggctggagtgcagcggcgtgatcttggctcactgcaaagtctgcttccctggttcaagcgattgtcctgcctcagcctccngagtagctgggattacaggagttggcatcctttggaagagttcgtgaaagctttctgcccagagctcctggaccaatgcatcttcccaccaccttaaaccactgagcagttcagagccccagttgcagacgacttgtcctgccaccaccatgagttctgaatgtgatggtggttccaaagctgtgatgaatggcttggcacctggcagcaatgggcaagacaaagacatggatcctacaaaaatctgcactgggaagggagcggtgactctccgggcctcgtcttcctacagggaaaccccaagcagtagccctgcgagccctcaggaaacccggcaacacgaaagcaaaccaggtctggagccagagccttcttcagcagatgagtggaggctttcttccagtgctgatgccaatggaaatgcccagccctcttcactcgctgccaagggctacagaagtgtgcatcccaaccttccttctgacaagtcccaggatgccacttcctccagtgcagcccagccggaggtaatagttgtccctctctacctggttaatactgacagagggcaagaaggcactgccagacctccaacacctctggggcctcttggctgcgtccccacaatcccagcgactgcctctgccgcctcacctctgaccttcccgactctagatgatttcattccccctcatctgcagaggtggccccaccacagccagccagcccgcgcctctggctcctttgcccccattagccagacgccaccatccttctcaccaccacctccgctggtccctcctgccccggaggacctccgcagagtctcggagcctgacctcacgggagctgtttcgagtaccgtaagcttgctggactcccctcctcacggcttttctgaatgtctcctcccagcagtcacattccctttctcactgaagcactgagctctgaggacagcactggctgccgctgtgcctgtgtgatgactggagccgtgtcccctgtcactagcgtgcatgcttcccgtgtgtcttccctgggtctctcggggctgttccccatctctgcagtgcctcatctgctctgtcctgttgggaatgcacatctttctccctcagaagacaacatctgtggcctttatgttgactggccatgcttttcacaggccaggtcgggggtcgtgtggtgagctgaggaaagctaagaattatgggggaaagcaacggcaggcgtggtgggtgctacttaccagggagcggggagatctcggggaggaagcgattctctgattctttttcattctcccagcagccccatgaagtaactcttcattttatcaatgaggagtatgaggttcagagagattaagtaatatatgcaagattacacagtaagtagcagaaccaggattcaaacctaggtgtttggggctccattaacacaggcttttactcaacgctgctatactgccctgcagattcctttccccttcctgactctgtgttcttgcttgtccccttcttgtccagaggctctctggtatctgactgcaggcattcagcttcccctgagtcagtcctgcctcagtctgctaagccagtacctcccagatggtgcctggaaatatatagttagggacccagcacggtggctcatgcctgtaatttcagcactttgggaggccgaggtgggcagatcacctgaggtcaagagttcgagaccagcctggccaacatagtgaaaccctgtctttactaaaaatacaaaaaaaaaaattagccagtgggcgtgatggcaggcgcctgtaatcccagctacttgggaggctgaggcaagagaatcacttgaatctgggatgcagaggttgcagtgagccgagatcgcaccactgcactccaccatgggcaacagagtgagtctctgtctc

SEQ ID NO: 314206 - DNA, 6899 bp, Homo sapiens
aggaggaagcatcattcatgaaccgatctttgcagacgacttgtcctgccaccaccatgagttctgaatgtgatggtggttccaaagctgtgatgaatggcttggcacctggcagcaatgggcaagacaaagcaactgccgaccctttacgcgcacgctctatttctgctgttaaaatcattcctgtgaagacagtgaaaaacgcctcaggcctagttctccctacagacatggatcctacaaaaatctgcactgggaagggagcggtgactctccgggcctcgtcttcctacagggaaaccccaagcagtagccctgcgagccctcaggaaacccggcaacacgaaagcaaaccaggtctggagccagagccttcttcagcagatgagtggaggctttcttccagtgctgatgccaatggaaatgcccagccctcttcactcgctgccaagggctacagaagtgtgcatcccaaccttccttctgacaagtcccaggttctctctcccccacgccctcctctccctcaaaaggaccgctttgcatggcagtcccccaccatccacaatacctataaggattccctctacctgagctcaccaaagccttatgtcccactcggcacccccagacagcagaacccctcacaaccccagcctatctctgtcctcctggcagctggatcggctcccaaaggtgtggtgtgccctggttccttgcttccggactccacgttccccagtgcttcatcccaaccccagcagcgctatgcagccaccaggacagtttatcataagaatgtgagctctaacccatgtcatgaggcagttgggattaaaaaggtcagcagcttatatgtaccttgtttatccaataacatttgcctggcggcgtcagaaaactcctctcgtgttgcacgtgaccctgccgaaggcactcccttggaggctgcgggcacccgagcaccggctcccggccttgtctcccgcacagccggcacaggaaaaccaccccctgctcctcctcctgaccctcccaagctattctttgacatccgtaaagatgccgttaaccgtggcgagagtccttccctggggactcaggcttcgttcccagatgtgagaccacctgtgctaggcccccgggttacctctgatcccgaaaaccggaagagcaaagaatcttaccttttgcagccgagttatccagccaaggatgccacttcctccagtgcagcccagccggaggtaatagttgtccctctctacctggttaatactgacagagggcaagaaggcactgccagacctccaacacctctggggcctcttggctgcgtccccacaatcccagcgactgcctctgccgcctcacctctgaccttcccgactctagatgatttcattccccctcatctgcagaggtggccccaccacagccagccagcccgcgcctctggctcctttgcccccattagccagacgccaccatccttctcaccaccacctccgctggtccctcctgccccggaggacctccgcagagtctcggagcctgacctcacgggagctgtttcgagtaccgattccagtcctctactaaatgaagtttcttcttcccttattggaactgattcccaagcctttccatcagttagcaagccttcatccgcctatccctccacaacgattgtcaatcctactattgtgctcttgcaacacaatcgagaacagcaaaaacgactcagtagcctttcagatcctgtctcagaaagaagagtgggagagcaggactcagcaccaacccaggaaaaacccacctcacctggcaaggctattgaaaaaagagcaaaggatgacagtaggcgggtggtgaagagcactcaggacttaagcgatgtttccatggatgaagtgggcatcccactccggaacactgagagatcaaaagactggtacaagactatgtttaaacagatccacaaactgaacagagatgatgattcagatctgtactctcccagatactcattttctgaagacacaaaatctcccctttctgtgcctcgctcaaaaagtgagatgagctacattgatggtgagaaggtagtcaagaggtcggccacactacccctcccagcccgctcttcctcactgaagtcaagctcagaaagaaatgactgggaacccccagataagaaagtagatacaagaaaatatcgtgcagagcccaagagcatttacgaatatcagcctggcaagtcttccgttctgaccaacgaaaagatgagctcagccatcagccctactccggaaatttcttcagagactcctggatatatatattcttccaacttccatgcagtgaagagggaatcagacggggctcctggggatctcactagcttggagaatgagagacaaatttataaaagtgtcttggaaggtggtgacatccctcttcagggcctgagtgggctcaagcgaccatccagctctgcttccactaaagattcagaatcgccaagacattttataccagctgattacttggaatccacggaagaatttattcgaagacgtcatgatgataaagagaaacttttagcggaccagagacgacttaaacgcgagcaagaagaggctgatattgcagctcgacgccacacaggcgtcattccgacgcaccatcagtttatcactaatgagcgctttggggacctcctcaatatagacgatactgcaaaaaggaaatctgggtcagagatgagacctgccagagccaaatttgactttaaagctcagacactaaaggagcttcctctgcagaagggagatattgtttacatttataagcaaattgatcagaactggtatgaaggagaacaccacggccgggtgggaatcttcccacgcacctacatcgagcttcttcctcctgctgagaaggcacagcccaaaaagttgacaccagtgcaggttttggaatatggagaagctattgctaagtttaactttaatggtgatacacaagtagaaatgtccttcagaaagggtgagaggatcacactgctccggcaggtagatgagaactggtacgaagggaggatcccggggacatcccgacaaggcatcttccccatcacctacgtggatgtgatcaagcgaccactggtgaaaaaccctgtggattacatggacctgcctttctcctcctccccaagtcgcagtgccactgcaagcccacagcaacctcaagcccagcagcgaagagtcacccccgacaggagtcaaacctcacaagatttatttagctatcaagcattatatagctatataccacagaatgatgatgagttggaactccgcgatggagatatcgttgatgtcatggaaaaatgtgacgatggatggtttgttggtacttcaagaaggacaaagcagtttggtacttttccaggcaactatgtaaaacctttgtatctataagaagactgaaaaccatggagattatttttattggaggaggaagcatcattcatgaaccgatctttttagttgagtcagtaggaaaattaatacagtggataaagtaagaagcaaaagacagggacagagaagtgttgtgtttaaaacccaagcctgtctaaggttactgtgtattagacagggccgaactagtgtgctgagcaaaaagaattgaagcaaattgtatttacttagccgcttctgggagccacttcagcctttcccctcccctccacttcttgggtaatctgacctgaagcatagtccaggagcagagttagccagaaatgcctcctgctgccccagccttagagagctcccatctcaatcattgagcctgaaggcttcaagcccaagaatgcaacaagacccccagcctacatttctcagctcccctggagccagctgatcctgtaacgctgctggaggtcagtctgagctaccaagactgtccctagacaaaggtggagtcccccacactgcccaagaccaaatccctcactcaacctgctgaggtgtggatggggaaacagaggcaaaactgaggcacctgatgcattcagcctgctgtgcagcagtgccattgactgccctgatgttcagagagaaacgcacacaaggtttgcccatgagaattggggagcagatggccaagcagataggttatgtctgttttctgagtgatgaagtcaggaagccctgtggctctggaggccacttgtggttcattcttttcccatatccttggcttttagaaatggttaccttcaggacagtgcagctgcatttatcagagcactattgctaagttttcttttctggcttgtgtttttctgggacagtttagaattgggaggcctattctcatagaacaccaaaaatgatgttcagtgattcatttaacatacaccaatgtactctggctgctggggggacaaccataagcaagacatgcccagggtttgccgtggctccagatctactccctgtaggagttcaaggatcacacaaacggtagtaaccagggttgtgaatctgagtacaccctggcaaggcttctcttcagactgaagcagcaattctgccactaccagcagcaaccaggacgtctgttctttgtgggggccagatcagaagagagaggcccctgtgacgcccgggctgcttggtcacaactctgtccaattcaaggatgtttatcggcctctcttagatcctgagtgagacaaatacagaaatgacccattccctgcccaccagaaactcagaggtgattggggagactgacacaggaaaatgaacttaatcaagagagactgtgatatgtgctaagaagggtgtgagggagggagagatgaattttccctggagggatcctagaaagcattgtcatattgccatctccattagctcacttttaaacaactagggtgctggaagaacctttgtctgagggtagttcatagctggaaatacttggaatattttccagagtctctaaactctcatcttcccccacagatacacatccaagctcacaaataggagtagcaattctaggtggtagggttgtgtacggaacccctggctgtctgcatatatctcagaattaccccaggaccattgtcccaaagtctagagtctttacaggtaggcaaaatttgttttcaatgcctgtgcctcagctgctgtcacaaatacccatcttaggatcccatcagcttcccatcccccaccagacagccacagtaccctcactttctccctattgttctttcaaatcctgttctcaggaaagaaactgccactaattcattcacactaaggtgtaaatgattgataataggaatgagttacctcttcccacagacatttgtttttaagtatgacagagcagggccttaatcccaagggaaaaggttatggaactggagggggtgagctttctgggtagaaggagacttcctgaatttccttaaaacccagtaagagtaagacctgttgttttggaaggtctgctccaccatctaagagcactgtttttttttttttgttgttgttgttgttttacggtctctgagggaatatagtaaaaatgcatatgcacgtgcaatttgcacggcagcatttcaccgattgtggactgtattggctaatgtgtttcctggtctttagatgcaaaccattaataacactatcttatctcatagttttttcaggggtgcttcttgattagtagggaattttgaacacctctttaaatacagctagaaaataaaaccaatttgtaaagccacatttgcatatgatgccagcctcacgcatttgtatatctccagaaattcaggtatgcctcaccaatttgcccgtctttaataaaatcttgtgttaaaatttgcatcacgtcgccttcctatgtatgacgaaacaagaaacagagatttccaattgctcttttgtcttcagacatttagtaatataaagtacctatttttatgctgaaatgtttatacaggtttattaatagcaagtgcaactaactggcggcatgccttgcaacacattttgatatattagccatgcttccgggtaaaggcaagccccaaactccttatcttttgcagtctctctgggatcagtaaaagaaaaaaaaaataatgtgcttaagaagtgggactgtaaatatgtatatttaactttgtatagcccatgtacctaccttgtatagaaaaataattttaaaaatttgaatggaagggggtaaaggaagtcatgaagtttttttgcatttttatttaaatgaaggaattccaaataactcacctacagatttttagcacaaaaatagccattgtaaagtgttaaaatttacgataagtattctattggggaggaaaggtaactctgatctcagttacagtttttttttcctttttaatttcattattttgggtttttggtttttgcagtcctatttatctgcagtcgtattaagtcctattgctagaataggttactacaaaaaaggttatattctgaaagaaaaataactgacattatatataaccaattaatttaaagtattgccatttaaattacacactgagagcatgtcctatgcagacatagatttttctgttcatttatttttcttcattgcagtggattgatttgataaatagatgtgttgaattactacatttgctgtacatattatttaataaactttattcagaattgcgtggccaaaaaaaaaaaaaaaaaaaaaaaaacaaaaaaaaaaaaaaaaaaaaaaaaaaaaaaaaaaaaaaaaaaaaaaaaaaaaaaaaaaaaaaaaaaaaaaaaaaaaaaaaaaaaaaaaaaaaaaaaaac

SEQ ID NO: 314207 - DNA, 6530 bp, Homo sapiens
aggaggaagcatcattcatgaaccgatctttgcagacgacttgtcctgccaccaccatgagttctgaatgtgatggtggttccaaagctgtgatgaatggcttggcacctggcagcaatgggcaagacaaagcaactgccgaccctttacgcgcacgctctatttctgctgttaaaatcattcctgtgaagacagtgaaaaacgcctcaggcctagttctccctacagacatggatcctacaaaaatctgcactgggaagggagcggtgactctccgggcctcgtcttcctacagggaaaccccaagcagtagccctgcgagccctcaggaaacccggcaacacgaaagcaaaccaggtctggagccagagccttcttcagcagatgagtggaggctttcttccagtgctgatgccaatggaaatgcccagccctcttcactcgctgccaagggctacagaagtgtgcatcccaaccttccttctgacaagtcccaggttctctctcccccacgccctcctctccctcaaaaggaccgctttgcatggcagtcccccaccatccacaatacctataaggattccctctacctgagctcaccaaagccttatgtcccactcggcacccccagacagcagaacccctcacaaccccagcctatctctgtcctcctggcagctggatcggctcccaaaggtgtggtgtgccctggttccttgcttccggactccacgttccccagtgcttcatcccaaccccagcagcgctatgcagccaccaggacagtttatcataagaatgtgagctctaacccatgtcatgaggcagttgggattaaaaaggtcagcagcttatatgtaccttgtttatccaataacatttgcctggcggcgtcagaaaactcctctcgtgttgcacgtgaccctgccgaaggcactcccttggaggctgcgggcacccgagcaccggctcccggccttgtctcccgcacagccggcacaggaaaaccaccccctgctcctcctcctgaccctcccaagctattctttgacatccgtaaagatgccgttaaccgtggcgagagtccttccctggggactcaggcttcgttcccagatgtgagaccacctgtgctaggcccccgggttacctctgatcccgaaaaccggaagagcaaagaatcttaccttttgcagccgagttatccagccaaggattccagtcctctactaaatgaagtttcttcttcccttattggaactgattcccaagcctttccatcagttagcaagccttcatccgcctatccctccacaacgattgtcaatcctactattgtgctcttgcaacacaatcgagaacagcaaaaacgactcagtagcctttcagatcctgtctcagaaagaagagtgggagagcaggactcagcaccaacccaggaaaaacccacctcacctggcaaggctattgaaaaaagagcaaaggatgacagtaggcgggtggtgaagagcactcaggacttaagcgatgtttccatggatgaagtgggcatcccactccggaacactgagagatcaaaagactggtacaagactatgtttaaacagatccacaaactgaacagagatgatgattcagatctgtactctcccagatactcattttctgaagacacaaaatctcccctttctgtgcctcgctcaaaaagtgagatgagctacattgatggtgagaaggtagtcaagaggtcggccacactacccctcccagcccgctcttcctcactgaagtcaagctcagaaagaaatgactgggaacccccagataagaaagtagatacaagaaaatatcgtgcagagcccaagagcatttacgaatatcagcctggcaagtcttccgttctgaccaacgaaaagatgagctcagccatcagccctactccggaaatttcttcagagactcctggatatatatattcttccaacttccatgcagtgaagagggaatcagacggggctcctggggatctcactagcttggagaatgagagacaaatttataaaagtgtcttggaaggtggtgacatccctcttcagggcctgagtgggctcaagcgaccatccagctctgcttccactaaagattcagaatcgccaagacattttataccagctgattacttggaatccacggaagaatttattcgaagacgtcatgatgataaagagaaacttttagcggaccagagacgacttaaacgcgagcaagaagaggctgatattgcagctcgacgccacacaggcgtcattccgacgcaccatcagtttatcactaatgagcgctttggggacctcctcaatatagacgatactgcaaaaaggaaatctgggtcagagatgagacctgccagagccaaatttgactttaaagctcagacactaaaggagcttcctctgcagaagggagatattgtttacatttataagcaaattgatcagaactggtatgaaggagaacaccacggccgggtgggaatcttcccacgcacctacatcgagcttcttcctcctgctgagaaggcacagcccaaaaagttgacaccagtgcaggttttggaatatggagaagctattgctaagtttaactttaatggtgatacacaagtagaaatgtccttcagaaagggtgagaggatcacactgctccggcaggtagatgagaactggtacgaagggaggatcccggggacatcccgacaaggcatcttccccatcacctacgtggatgtgatcaagcgaccactggtgaaaaaccctgtggattacatggacctgcctttctcctcctccccaagtcgcagtgccactgcaagcccacagcaacctcaagcccagcagcgaagagtcacccccgacaggagtcaaacctcacaagatttatttagctatcaagcattatatagctatataccacagaatgatgatgagttggaactccgcgatggagatatcgttgatgtcatggaaaaatgtgacgatggatggtttgttggtacttcaagaaggacaaagcagtttggtacttttccaggcaactatgtaaaacctttgtatctataagaagactgaaaaccatggagattatttttattggaggaggaagcatcattcatgaaccgatctttttagttgagtcagtaggaaaattaatacagtggataaagtaagaagcaaaagacagggacagagaagtgttgtgtttaaaacccaagcctgtctaaggttactgtgtattagacagggccgaactagtgtgctgagcaaaaagaattgaagcaaattgtatttacttagccgcttctgggagccacttcagcctttcccctcccctccacttcttgggtaatctgacctgaagcatagtccaggagcagagttagccagaaatgcctcctgctgccccagccttagagagctcccatctcaatcattgagcctgaaggcttcaagcccaagaatgcaacaagacccccagcctacatttctcagctcccctggagccagctgatcctgtaacgctgctggaggtcagtctgagctaccaagactgtccctagacaaaggtggagtcccccacactgcccaagaccaaatccctcactcaacctgctgaggtgtggatggggaaacagaggcaaaactgaggcacctgatgcattcagcctgctgtgcagcagtgccattgactgccctgatgttcagagagaaacgcacacaaggtttgcccatgagaattggggagcagatggccaagcagataggttatgtctgttttctgagtgatgaagtcaggaagccctgtggctctggaggccacttgtggttcattcttttcccatatccttggcttttagaaatggttaccttcaggacagtgcagctgcatttatcagagcactattgctaagttttcttttctggcttgtgtttttctgggacagtttagaattgggaggcctattctcatagaacaccaaaaatgatgttcagtgattcatttaacatacaccaatgtactctggctgctggggggacaaccataagcaagacatgcccagggtttgccgtggctccagatctactccctgtaggagttcaaggatcacacaaacggtagtaaccagggttgtgaatctgagtacaccctggcaaggcttctcttcagactgaagcagcaattctgccactaccagcagcaaccaggacgtctgttctttgtgggggccagatcagaagagagaggcccctgtgacgcccgggctgcttggtcacaactctgtccaattcaaggatgtttatcggcctctcttagatcctgagtgagacaaatacagaaatgacccattccctgcccaccagaaactcagaggtgattggggagactgacacaggaaaatgaacttaatcaagagagactgtgatatgtgctaagaagggtgtgagggagggagagatgaattttccctggagggatcctagaaagcattgtcatattgccatctccattagctcacttttaaacaactagggtgctggaagaacctttgtctgagggtagttcatagctggaaatacttggaatattttccagagtctctaaactctcatcttcccccacagatacacatccaagctcacaaataggagtagcaattctaggtggtagggttgtgtacggaacccctggctgtctgcatatatctcagaattaccccaggaccattgtcccaaagtctagagtctttacaggtaggcaaaatttgttttcaatgcctgtgcctcagctgctgtcacaaatacccatcttaggatcccatcagcttcccatcccccaccagacagccacagtaccctcactttctccctattgttctttcaaatcctgttctcaggaaagaaactgccactaattcattcacactaaggtgtaaatgattgataataggaatgagttacctcttcccacagacatttgtttttaagtatgacagagcagggccttaatcccaagggaaaaggttatggaactggagggggtgagctttctgggtagaaggagacttcctgaatttccttaaaacccagtaagagtaagacctgttgttttggaaggtctgctccaccatctaagagcactgtttttttttttttgttgttgttgttgttttacggtctctgagggaatatagtaaaaatgcatatgcacgtgcaatttgcacggcagcatttcaccgattgtggactgtattggctaatgtgtttcctggtctttagatgcaaaccattaataacactatcttatctcatagttttttcaggggtgcttcttgattagtagggaattttgaacacctctttaaatacagctagaaaataaaaccaatttgtaaagccacatttgcatatgatgccagcctcacgcatttgtatatctccagaaattcaggtatgcctcaccaatttgcccgtctttaataaaatcttgtgttaaaatttgcatcacgtcgccttcctatgtatgacgaaacaagaaacagagatttccaattgctcttttgtcttcagacatttagtaatataaagtacctatttttatgctgaaatgtttatacaggtttattaatagcaagtgcaactaactggcggcatgccttgcaacacattttgatatattagccatgcttccgggtaaaggcaagccccaaactccttatcttttgcagtctctctgggatcagtaaaagaaaaaaaaaataatgtgcttaagaagtgggactgtaaatatgtatatttaactttgtatagcccatgtacctaccttgtatagaaaaataattttaaaaatttgaatggaagggggtaaaggaagtcatgaagtttttttgcatttttatttaaatgaaggaattccaaataactcacctacagatttttagcacaaaaatagccattgtaaagtgttaaaatttacgataagtattctattggggaggaaaggtaactctgatctcagttacagtttttttttcctttttaatttcattattttgggtttttggtttttgcagtcctatttatctgcagtcgtattaagtcctattgctagaataggttactacaaaaaaggttatattctgaaagaaaaataactgacattatatataaccaattaatttaaagtattgccatttaaattacacactgagagcatgtcctatgcagacatagatttttctgttcatttatttttcttcattgcagtggattgatttgataaatagatgtgttgaattactacatttgctgtacatattatttaataaactttattcagaattgcgtggccaaaaaaaaaaaaaaaaaaaaaaaaacaaaaaaaaaaaaaaaaaaaaaaaaaaaaaaaaaaaaaaaaaaaaaaaaaaaaaaaaaaaaaaaaaaaaaaaaaaaaaaaaaaaaaaaaaaaaaaaaaac

SEQ ID NO: 314208 - DNA, 6719 bp, Homo sapiens
aggaggaagcatcattcatgaaccgatctttgcagacgacttgtcctgccaccaccatgagttctgaatgtgatggtggttccaaagctgtgatgaatggcttggcacctggcagcaatgggcaagacaaagcaactgccgaccctttacgcgcacgctctatttctgctgttaaaatcattcctgtgaagacagtgaaaaacgcctcaggcctagttctccctacagacatggatcctacaaaaatctgcactgggaagggagcggtgactctccgggcctcgtcttcctacagggaaaccccaagcagtagccctgcgagccctcaggaaacccggcaacacgaaagcaaaccaggtctggagccagagccttcttcagcagatgagtggaggctttcttccagtgctgatgccaatggaaatgcccagccctcttcactcgctgccaagggctacagaagtgtgcatcccaaccttccttctgacaagtcccaggttctctctcccccacgccctcctctccctcaaaaggaccgctttgcatggcagtcccccaccatccacaatacctataaggattccctctacctgagctcaccaaagccttatgtcccactcggcacccccagacagcagaacccctcacaaccccagcctatctctgtcctcctggcagctggatcggctcccaaaggtgtggtgtgccctggttccttgcttccggactccacgttccccagtgcttcatcccaaccccagcagcgctatgcagccaccaggacagtttatcataagaatgtgagctctaacccatgtcatgaggcagttgggattaaaaaggtcagcagcttatatgtaccttgtttatccaataacatttgcctggcggcgtcagaaaactcctctcgtgttgcacgtgaccctgccgaaggcactcccttggaggctgcgggcacccgagcaccggctcccggccttgtctcccgcacagccggcacaggaaaaccaccccctgctcctcctcctgaccctcccaagctattctttgacatccgtaaagatgccgttaaccgtggcgagagtccttccctggggactcaggcttcgttcccagatgtgagaccacctgtgctaggcccccgggttacctctgatcccgaaaaccggaagagcaaagaatcttaccttttgcagccgagttatccagccaaggatgccacttcctccagtgcagcccagccggaggtaatagttgtccctctctacctggttaatactgacagagggcaagaaggcactgccagacctccaacacctctggggcctcttggctgcgtccccacaatcccagcgactgcctctgccgcctcacctctgaccttcccgactctagatgatttcattccccctcatctgcagaggtggccccaccacagccagccagcccgcgcctctggctcctttgcccccattagccagacgccaccatccttctcaccaccacctccgctggtccctcctgccccggaggacctccgcagagtctcggagcctgacctcacgggagctgtttcgagtaccgattccagtcctctactaaatgaagtttcttcttcccttattggaactgattcccaagcctttccatcagttagcaagccttcatccgcctatccctccacaacgattgtcaatcctactattgtgctcttgcaacacaatcgagaacagcaaaaacgactcagtagcctttcagatcctgtctcagaaagaagagtgggagagcaggactcagcaccaacccaggaaaaacccacctcacctggcaaggctattgaaaaaagagcaaaggatgacagtaggcgggtggtgaagagcactcaggacttaagcgatgtttccatggatgaagtgggcatcccactccggaacactgagagatcaaaagactggtacaagactatgtttaaacagatccacaaactgaacagagatgatgattcagatctgtactctcccagatactcattttctgaagacacaaaatctcccctttctgtgcctcgctcaaaaagtgagatgagctacattgatggtgagaaggtagtcaagaggtcggccacactacccctcccagcccgctcttcctcactgaagtcaagctcagaaagaaatgactgggaacccccagataagaaagtagatacaagaaaatatcgtgcagagcccaagagcatttacgaatatcagcctggcaagtcttccgttctgaccaacgaaaagatgagctcagccatcagccctactccggaaatttcttcagagactcctggatatatatattcttccaacttccatgcagtgaagagggaatcagacggggctcctggggatctcactagcttggagaatgagagacaaatttataaaagtgtcttggaaggtggtgacatccctcttcagggcctgagtgggctcaagcgaccatccagctctgcttccactaaagattcagaatcgccaagacattttataccagctgattacttggaatccacggaagaatttattcgaagacgtcatgatgataaagagaaacttttagcggaccagagacgacttaaacgcgagcaagaagaggctgatattgcagctcgacgccacacaggcgtcattccgacgcaccatcagtttatcactaatgagcgctttggggacctcctcaatatagacgatactgcaaaaaggaaatctgggtcagagatgagacctgccagagccaaatttgactttaaagctcagacactaaaggagcttcctctgcagaagggagatattgtttacatttataagcaaattgatcagaactggtatgaaggagaacaccacggccgggtgggaatcttcccacgcacctacatcgagcttcttcctcctgctgagaaggcacagcccaaaaagttgacaccagtgcaggttttggaatatggagaagctattgctaagtttaactttaatggtgatacacaagtagaaatgtccttcagaaagggtgagaggatcacactgctccggcaggtagatgagaactggtacgaagggaggatcccggggacatcccgacaaggcatcttccccatcacctacgtggatgtgatcaagcgaccactggtgaaaaaccctgtggattacatggacctgcctttctcctcctccccaagtcgcagtgccactgcaagcccacagcaacctcaagcccagcagcgaagagtcacccccgacaggagtcaaacctcacaagatttatttagctatcaagcattatatagctatataccacagaatgatgatgagttggaactccgcgatggagatatcgttgatgtcatggaaaaatgtgacgatggatggtttgttggtacttcaagaaggacaaagcagtttggtacttttccaggcaactatgtaaaacctttgtatctataagaagactgaaaaccatggagattatttttattggaggaggaagcatcattcatgaaccgatctttttagttgagtcagtaggaaaattaatacagtggataaagtaagaagcaaaagacagggacagagaagtgttgtgtttaaaacccaagcctgtctaaggttactgtgtattagacagggccgaactagtgtgctgagcaaaaagaattgaagcaaattgtatttacttagccgcttctgggagccacttcagcctttcccctcccctccacttcttgggtaatctgacctgaagcatagtccaggagcagagttagccagaaatgcctcctgctgccccagccttagagagctcccatctcaatcattgagcctgaaggcttcaagcccaagaatgcaacaagacccccagcctacatttctcagctcccctggagccagctgatcctgtaacgctgctggaggtcagtctgagctaccaagactgtccctagacaaaggtggagtcccccacactgcccaagaccaaatccctcactcaacctgctgaggtgtggatggggaaacagaggcaaaactgaggcacctgatgcattcagcctgctgtgcagcagtgccattgactgccctgatgttcagagagaaacgcacacaaggtttgcccatgagaattggggagcagatggccaagcagataggttatgtctgttttctgagtgatgaagtcaggaagccctgtggctctggaggccacttgtggttcattcttttcccatatccttggcttttagaaatggttaccttcaggacagtgcagctgcatttatcagagcactattgctaagttttcttttctggcttgtgtttttctgggacagtttagaattgggaggcctattctcatagaacaccaaaaatgatgttcagtgattcatttaacatacaccaatgtactctggctgctggggggacaaccataagcaagacatgcccagggtttgccgtggctccagatctactccctgtaggagttcaaggatcacacaaacggtagtaaccagggttgtgaatctgagtacaccctggcaaggcttctcttcagactgaagcagcaattctgccactaccagcagcaaccaggacgtctgttctttgtgggggccagatcagaagagagaggcccctgtgacgcccgggctgcttggtcacaactctgtccaattcaaggatgtttatcggcctctcttagatcctgagtgagacaaatacagaaatgacccattccctgcccaccagaaactcagaggtgattggggagactgacacaggaaaatgaacttaatcaagagagactgtgatatgtgctaagaagggtgtgagggagggagagatgaattttccctggagggatcctagaaagcattgtcatattgccatctccattagctcacttttaaacaactagggtgctggaagaacctttgtctgagggtagttcatagctggaaatacttggaatattttccagagtctctaaactctcatcttcccccacagatacacatccaagctcacaaataggagtagcaattctaggtggtagggttgtgtacggaacccctggctgtctgcatatatctcagaattaccccaggaccattgtcccaaagtctagagtctttacaggtaggcgatcccatcagcttcccatcccccaccagacagccacagtaccctcactttctccctattgttctttcaaatcctgttctcaggaaagaaactgccactaattcattcacactaaggtgtaaatgattgataataggaatgagttacctcttcccacagacatttgtttttaagtatgacagagcagggccttaatcccaagggaaaaggttatggaactggagggggtgagctttctgggtagaaggagacttcctgaatttccttaaaacccagtaagagtaagacctgttgttttggaaggtctgctccaccatctaagagcactgtttttttttttttgttgttgttgttgttttacggtctctgagggaatatagtaaaaatgcatatgcacgtgcaatttgcacggcagcatttcaccgattgtggactgtattggctaatgtgtttcctggtctttagatgcaaaccattaataacactatcttatctcatagttttttcaggggtgcttcttgattagtagggaattttgaacacctctttaaatacagctagaaaataaaaccaatttgtaaagccacatttgcatatgatgccagcctcacgcatttgtatatctccagaaattcaggtatgcctcaccaatttgcccgtctttaataaaatcttgtgttaaaatttgcatcacgtcgccttcctatgtatgacgaaacaagaaacagagatttccaattgctcttttgtcttcagacatttagtaatataaagtacctatttttatgctgaaatgtttatacaggtttattaatagcaagtgcaactaactggcggcatgccttgcaacacattttgatatattagccatgcttccgggtaaaggcaagccccaaactccttatcttttgcagtctctctgggatcagtaaaagaaaaaaaaaataatgtgcttaagaagtgggactgtaaatatgtatatttaactttgtatagcccatgtacctaccttgtatagaaaaataattttaaaaatttgaatggaagggggtaaaggaagtcatgaagtttttttgcatttttatttaaatgaaggaattccaaataactcacctacagatttttagcacaaaaatagccattgtaaagtgttaaaatttacgataagtattctattggggaggaaaggtaactctgatctcagttacagtttttttttcctttttaatttcattattttgggtttttggtttttgcagtcctatttatctgcagtcgtattaagtcctattgctagaataggttactacaaaaaaggttatattctgaaagaaaaataactgacattatatataaccaattaatttaaagtattgccatttaaattacacactgagagcatgtcctatgcagacatagatttttctgttcatttatttttcttcattgcagtggattgatttgataaatagatgtgttgaattactacatttgctgtacatattatttaataaactttattcagaattgcgtggc

SEQ ID NO: 314209 - DNA, 5878 bp, Homo sapiens
aggaggaagcatcattcatgaaccgatctttgcagacgacttgtcctgccaccaccatgagttctgaatgtgatggtggttccaaagctgtgatgaatggcttggcacctggcagcaatgggcaagacaaagcaactgccgaccctttacgcgcacgctctatttctgctgttaaaatcattcctgtgaagacagtgaaaaacgcctcaggcctagttctccctacagacatggatcctacaaaaatctgcactgggaagggagcggtgactctccgggcctcgtcttcctacagggaaaccccaagcagtagccctgcgagccctcaggaaacccggcaacacgaaagcaaaccaggtctggagccagagccttcttcagcagatgagtggaggctttcttccagtgctgatgccaatggaaatgcccagccctcttcactcgctgccaagggctacagaagtgtgcatcccaaccttccttctgacaagtcccaggttctctctcccccacgccctcctctccctcaaaaggaccgctttgcatggcagtcccccaccatccacaatacctataaggattccctctacctgagctcaccaaagccttatgtcccactcggcacccccagacagcagaacccctcacaaccccagcctatctctgtcctcctggcagctggatcggctcccaaaggtgtggtgtgccctggttccttgcttccggactccacgttccccagtgcttcatcccaaccccagcagcgctatgcagccaccaggacagtttatcataagaatgtgagctctaacccatgtcatgaggcagttgggattaaaaaggtcagcagcttatatgtaccttgtttatccaataacatttgcctggcggcgtcagaaaactcctctcgtgttgcacgtgaccctgccgaaggcactcccttggaggctgcgggcacccgagcaccggctcccggccttgtctcccgcacagccggcacaggaaaaccaccccctgctcctcctcctgaccctcccaagctattctttgacatccgtaaagatgccgttaaccgtggcgagagtccttccctggggactcaggcttcgttcccagatgtgagaccacctgtgctaggcccccgggttacctctgatcccgaaaaccggaagagcaaagaatcttaccttttgcagccgagttatccagccaaggatgccacttcctccagtgcagcccagccggaggtaatagttgtccctctctacctggttaatactgacagagggcaagaaggcactgccagacctccaacacctctggggcctcttggctgcgtccccacaatcccagcgactgcctctgccgcctcacctctgaccttcccgactctagatgatttcattccccctcatctgcagaggtggccccaccacagccagccagcccgcgcctctggctcctttgcccccattagccagacgccaccatccttctcaccaccacctccgctggtccctcctgccccggaggacctccgcagagtctcggagcctgacctcacgggagctgtttcgagtaccgattccagtcctctactaaatgaagtttcttcttcccttattggaactgattcccaagcctttccatcagttagcaagccttcatccgcctatccctccacaacgattgtcaatcctactattgtgctcttgcaacacaatcgagaacagcaaaaacgactcagtagcctttcagatcctgtctcagaaagaagagtgggagagcaggactcagcaccaacccaggaaaaacccacctcacctggcaaggctattgaaaaaagagcaaaggatgacagtaggcgggtggtgaagagcactcaggacttaagcgatgtttccatggatgaagtgggcatcccactccggaacactgagagatcaaaagactggtacaagactatgtttaaacagatccacaaactgaacagagatgatgattcagatctgtactctcccagatactcattttctgaagacacaaaatctcccctttctgtgcctcgctcaaaaagtgagatgagctacattgatggtgagaaggtagtcaagaggtcggccacactacccctcccagcccgctcttcctcactgaagtcaagctcagaaagaaatgactgggaacccccagataagaaagtagatacaagaaaatatcgtgcagagcccaagagcatttacgaatatcagcctggcaagtcttccgttctgaccaacgaaaagatgagctcagccatcagccctactccggaaatttcttcagagactcctggatatatatattcttccaacttccatgcagtgaagagggaatcagacggggctcctggggatctcactagcttggagaatgagagacaaatttataaaagtgtcttggaaggtggtgacatccctcttcagggcctgagtgggctcaagcgaccatccagctctgcttccactaaagattcagaatcgccaagacattttataccagctgattacttggaatccacggaagaatttattcgaagacgtcatgatgataaagagaaacttttagcggaccagagacgacttaaacgcgagcaagaagaggctgatattgcagctcgacgccacacaggcgtcattccgacgcaccatcagtttatcactaatgagcgctttggggacctcctcaatatagacgatactgcaaaaaggaaatctgggtcagagatgagacctgccagagccaaatttgactttaaagctcagacactaaaggagcttcctctgcagaagggagatattgtttacatttataagcaaattgatcagaactggtatgaaggagaacaccacggccgggtgggaatcttcccacgcacctacatcgagcttcttcctcctgctgagaaggcacagcccaaaaagttgacaccagtgcaggttttggaatatggagaagctattgctaagtttaactttaatggtgatacacaagtagaaatgtccttcagaaagggtgagaggatcacactgctccggcaggtagatgagaactggtacgaagggaggatcccggggacatcccgacaaggcatcttccccatcacctacgtggatgtgatcaagcgaccactggtgaaaaaccctgtggattacatggacctgcctttctcctcctccccaagtcgcagtgccactgcaagcccacagcaacctcaagcccagcagcgaagagtcacccccgacaggagtcaaacctcacaagatttatttagctatcaagcattatatagctatataccacagaatgatgatgagttggaactccgcgatggagatatcgttgatgtcatggaaaaatgtgacgatggatggtttgttggtacttcaagaaggacaaagcagtttggtacttttccaggcaactatgtaaaacctttgtatctataagaagactgaaaaccatggagattatttttattggaggaggaagcatcattcatgaaccgatctttttagttgagtcagtaggaaaattaatacagtggataaagtaagaagcaaaagacagggacagagaagtgttgtgtttaaaacccaagcctgtctaaggttactgtgtattagacagggccgaactagtgtgctgagcaaaaagaattgaagcaaattgtatttacttagccgcttctgggagccacttcagcctttcccctcccctccacttcttgggtaatctgacctgaagcatagtccaggagcagagttagccagaaatgcctcctgctgccccagccttagagagctcccatctcaatcattgagcctgaaggcttcaagcccaagaatgcaacaagacccccagcctacatttctcagctcccctggagccagctgatcctgtaacgctgctggaggtcagtctgagctaccaagactgtccctagacaaaggtggagtcccccacactgcccaagaccaaatccctcactcaacctgctgaggtgtggatggggaaacagaggcaaaactgaggcacctgatgcattcagcctgctgtgcagcagtgccattgactgccctgatgttcagagagaaacgcacacaaggtttgcccatgagaattggggagcagatggccaagcagataggttatgtctgttttctgagtgatgaagtcaggaagccctgtggctctggaggccacttgtggttcattcttttcccatatccttggcttttagaaatggttaccttcaggacagtgcagctgcatttatcagagcactattgctaagttttcttttctggcttgtgtttttctgggacagtttagaattgggaggcctattctcatagaacaccaaaaatgatgttcagtgattcatttaacatacaccaatgtactctggctgctggggggacaaccataagcaagacatgcccagggtttgccgtggctccagatctactccctgtaggagttcaaggatcacacaaacggtagtaaccagggttgtgaatctgagtacaccctggcaaggcttctcttcagactgaagcagcaattctgccactaccagcagcaaccaggacgtctgttctttgtgggggccagatcagaagagagaggcccctgtgacgcccgggctgcttggtcacaactctgtccaattcaaggatgtttatcggcctctcttagatcctgagtgagacaaatacagaaatgacccattccctgcccaccagaaactcagaggtgattggggagactgacacaggaaaatgaacttaatcaagagagactgtgatatgtgctaagaagggtgtgagggagggagagatgaattttccctggagggatcctagaaagcattgtcatattgccatctccattagctcacttttaaacaactagggtgctggaagaacctttgtctgagggtagttcatagctggaaatacttggaatattttccagagtctctaaactctcatcttcccccacagatacacatccaagctcacaaataggagtagcaattctaggtggtagggttgtgtacggaacccctggctgtctgcatatatctcagaattaccccaggaccattgtcccaaagtctagagtctttacaggtaggcaaaatttgttttcaatgcctgtgcctcagctgctgtcacaaatacccatcttaggatcccatcagcttcccatcccccaccagacagccacagtaccctcactttctccctattgttctttcaaatcctgttctcaggaaagaaactgccactaattcattcacactaaggtgtaaatgattgataataggaatgagttacctcttcccacagacatttgtttttaagtatgacagagcagggccttaatcccaagggaaaaggttatggaactggagggggtgagctttctgggtagaaggagacttcctgaatttccttaaaacccagtaagagtaagacctgttgttttggaaggtctgctccaccatctaagagcactgtttttttttttttgttgttgttgttgttttacggtctctgagggaatatagtaaaaatgcatatgcacgtgcaatttgcacggcagcatttcaccgattgtggactgtattggctaatgtgtttcctggtctttagatgcaaaccattaataacactatcttatctcatagttttttcaggggtgcttcttgattagtagggaattttgaacacctctttaaatacagctagaaaataaaacagtgctctaagatggtggagcagaccttccaaaacaacaggtcttactcttacggggtttaaaggaaaat

SEQ ID NO: 314210 - DNA, 2788 bp, Homo sapiens
aggaggaagcatcattcatgaaccgatctttgcagacgacttgtcctgccaccaccatgagttctgaatgtgatggtggttccaaagctgtgatgaatggcttggcacctggcagcaatgggcaagacaaagcaactgccgaccctttacgcgcacgctctatttctgctgttaaaatcattcctgtgaagacagtgaaaaacgcctcaggcctagttctccctacagacatggatcctacaaaaatctgcactgggaagggagcggtgactctccgggcctcgtcttcctacagggaaaccccaagcagtagccctgcgagccctcaggaaacccggcaacacgaaagcaaaccaggtctggagccagagccttcttcagcagatgagtggaggctttcttccagtgctgatgccaatggaaatgcccagccctcttcactcgctgccaagggctacagaagtgtgcatcccaaccttccttctgacaagtcccaggttctctctcccccacgccctcctctccctcaaaaggaccgctttgcatggcagtcccccaccatccacaatacctataaggattccctctacctgagctcaccaaagccttatgtcccactcggcacccccagacagcagaacccctcacaaccccagcctatctctgtcctcctggcagctggatcggctcccaaaggtgtggtgtgccctggttccttgcttccggactccacgttccccagtgcttcatcccaaccccagcagcgctatgcagccaccaggacagtttatcataagaatgtgagctctaacccatgtcatgaggcagttgggattaaaaaggtcagcagcttatatgtaccttgtttatccaataacatttgcctggcggcgtcagaaaactcctctcgtgttgcacgtgaccctgccgaaggcactcccttggaggctgcgggcacccgagcaccggctcccggccttgtctcccgcacagccggcacaggaaaaccaccccctgctcctcctcctgaccctcccaagctattctttgacatccgtaaagatgccgttaaccgtggcgagagtccttccctggggactcaggcttcgttcccagatgtgagaccacctgtgctaggcccccgggttacctctgatcccgaaaaccggaagagcaaagaatcttaccttttgcagccgagttatccagccaaggatgccacttcctccagtgcagcccagccggaggtaatagttgtccctctctacctggttaatactgacagagggcaagaaggcactgccagacctccaacacctctggggcctcttggctgcgtccccacaatcccagcgactgcctctgccgcctcacctctgaccttcccgactctagatgatttcattccccctcatctgcagaggtggccccaccacagccagccagcccgcgcctctggctcctttgcccccattagccagacgccaccatccttctcaccaccacctccgctggtccctcctgccccggaggacctccgcagagtctcggagcctgacctcacgggagctgtttcgagtaccgattccagtcctctactaaatgaagtttcttcttcccttattggaactgattcccaagcctttccatcagttagcaagccttcatccgcctatccctccacaacgattgtcaatcctactattgtgctcttgcaacacaatcgagaacagcaaaaacgactcagtagcctttcagatcctgtctcagaaagaagagtgggagagcaggactcagcaccaacccaggaaaaacccacctcacctggcaaggctattgaaaaaagagcaaaggatgacagtaggcgggtggtgaagagcactcaggacttaagcgatgtttccatggatgaagtgggcatcccactccggaacactgagagatcaaaagactggtacaagactatgtttaaacagatccacaaactgaacagagatgatgattcagatctgtactctcccagatactcattttctgaagacacaaaatctcccctttctgtgcctcgctcaaaaagtgagatgagctacattgatggtgagaaggtagtcaagaggtcggccacactacccctcccagcccgctcttcctcactgaagtcaagctcagaaagaaatgactgggaacccccagataagaaagtagatacaagaaaatatcgtgcagagcccaagagcatttacgaatatcagcctggcaagtcttccgttctgaccaacgaaaagatgagctcagccatcagccctactccggaaatttcttcagagactcctggatatatatattcttccaacttccatgcagtgaagagggaatcagacggggctcctggggatctcactagcttggagaatgagagacaaatttataaaagtgtcttggaaggtggtgacatccctcttcagggcctgagtgggctcaagcgaccatccagctctgcttccactaaagattcagaatcgccaagacattttataccagctgattacttggaatccacggaagaatttattcgaagacgtcatgatgataaagagaaacttttagcggaccagagacgacttaaacgcgagcaagaagaggctgatattgcagctcgacgccacacaggcgtcattccgacgcaccatcagtttatcactaatgagcgctttggggacctcctcaatatagacgatactgcaaaaaggaaatctgggtcagagaaaaaaaaaaaaaaaaaaaaaac

SEQ ID NO: 314211 - DNA, 2460 bp, Homo sapiens
aggaggaagcatcattcatgaaccgatctttgcagacgacttgtcctgccaccaccatgagttctgaatgtgatggtggttccaaagctgtgatgaatggcttggcacctggcagcaatgggcaagacaaagcaactgccgaccctttacgcgcacgctctatttctgctgttaaaatcattcctgtgaagacagtgaaaaacgcctcaggcctagttctccctacagacatggatcctacaaaaatctgcactgggaagggagcggtgactctccgggcctcgtcttcctacagggaaaccccaagcagtagccctgcgagccctcaggaaacccggcaacacgaaagcaaaccaggtctggagccagagccttcttcagcagatgagtggaggctttcttccagtgctgatgccaatggaaatgcccagccctcttcactcgctgccaagggctacagaagtgtgcatcccaaccttccttctgacaagtcccaggttctctctcccccacgccctcctctccctcaaaaggaccgctttgcatggcagtcccccaccatccacaatacctataaggattccctctacctgagctcaccaaagccttatgtcccactcggcacccccagacagcagaacccctcacaaccccagcctatctctgtcctcctggcagctggatcggctcccaaaggtgtggtgtgccctggttccttgcttccggactccacgttccccagtgcttcatcccaaccccagcagcgctatgcagccaccaggacagtttatcataagaatgtgagctctaacccatgtcatgaggcagttgggattaaaaaggtcagcagcttatatgtaccttgtttatccaataacatttgcctggcggcgtcagaaaactcctctcgtgttgcacgtgaccctgccgaaggcactcccttggaggctgcgggcacccgagcaccggctcccggccttgtctcccgcacagccggcacaggaaaaccaccccctgctcctcctcctgaccctcccaagctattctttgacatccgtaaagatgccgttaaccgtggcgagagtccttccctggggactcaggcttcgttcccagatgtgagaccacctgtgctaggcccccgggttacctctgatcccgaaaaccggaagagcaaagaatcttaccttttgcagccgagttatccagccaaggatgccacttcctccagtgcagcccagccggaggtaatagttgtccctctctacctggttaatactgacagagggcaagaaggcactgccagacctccaacacctctggggcctcttggctgcgtccccacaatcccagcgactgcctctgccgcctcacctctgaccttcccgactctagatgatttcattccccctcatctgcagaggtggccccaccacagccagccagcccgcgcctctggctcctttgcccccattagccagacgccaccatccttctcaccaccacctccgctggtccctcctgccccggaggacctccgcagagtctcggagcctgacctcacgggagctgtttcgagtaccgattccagtcctctactaaatgaagtttcttcttcccttattggaactgattcccaagcctttccatcagttagcaagccttcatccgcctatccctccacaacgattgtcaatcctactattgtgctcttgcaacacaatcgagaacagcaaaaacgactcagtagcctttcagatcctgtctcagaaagaagagtgggagagcaggactcagcaccaacccaggaaaaacccacctcacctggcaaggctattgaaaaaagagcaaaggatgacagtaggcgggtggtgaagagcactcaggacttaagcgatgtttccatggatgaagtgggcatcccactccggaacactgagagatcaaaagactggtacaagactatgtttaaacagatccacaaactgaacagagatgatgattcagatctgtactctcccagatactcattttctgaagacacaaaatctcccctttctgtgcctcgctcaaaaagtgagatgagctacattgatggtgagaaggtagtcaagaggtcggccacactacccctcccagcccgctcttcctcactgaagtcaagctcagaaagaaatgactgggaacccccagataagaaagtagatacaagaaaatatcgtgcagagcccaagagcatttacgaatatcagcctggcaagtcttccgttctgaccaacgaaaagatgagctcagccatcagccctactccggaaatttcttcagagactcctggatatatatattcttccaacttccatgcagtgaagagggtttccatttatggagaaagaaaaaaatggcagagggtagaagagtgatgtggaagaaaaattagaaaatataacttgatactttttg

SEQ ID NO: 314212 - DNA, 2650 bp, Homo sapiens
aggaggaagcatcattcatgaaccgatctttgcagacgacttgtcctgccaccaccatgagttctgaatgtgatggtggttccaaagctgtgatgaatggcttggcacctggcagcaatgggcaagacaaagcaactgccgaccctttacgcgcacgctctatttctgctgttaaaatcattcctgtgaagacagtgaaaaacgcctcaggcctagttctccctacagacatggatcctacaaaaatctgcactgggaagggagcggtgactctccgggcctcgtcttcctacagggaaaccccaagcagtagccctgcgagccctcaggaaacccggcaacacgaaagcaaaccaggtctggagccagagccttcttcagcagatgagtggaggctttcttccagtgctgatgccaatggaaatgcccagccctcttcactcgctgccaagggctacagaagtgtgcatcccaaccttccttctgacaagtcccaggttctctctcccccacgccctcctctccctcaaaaggaccgctttgcatggcagtcccccaccatccacaatacctataaggattccctctacctgagctcaccaaagccttatgtcccactcggcacccccagacagcagaacccctcacaaccccagcctatctctgtcctcctggcagctggatcggctcccaaaggtgtggtgtgccctggttccttgcttccggactccacgttccccagtgcttcatcccaaccccagcagcgctatgcagccaccaggacagtttatcataagaatgtgagctctaacccatgtcatgaggcagttgggattaaaaaggtcagcagcttatatgtaccttgtttatccaataacatttgcctggcggcgtcagaaaactcctctcgtgttgcacgtgaccctgccgaaggcactcccttggaggctgcgggcacccgagcaccggctcccggccttgtctcccgcacagccggcacaggaaaaccaccccctgctcctcctcctgaccctcccaagctattctttgacatccgtaaagatgccgttaaccgtggcgagagtccttccctggggactcaggcttcgttcccagatgtgagaccacctgtgctaggcccccgggttacctctgatcccgaaaaccggaagagcaaagaatcttaccttttgcagccgagttatccagccaaggatgccacttcctccagtgcagcccagccggaggtaatagttgtccctctctacctggttaatactgacagagggcaagaaggcactgccagacctccaacacctctggggcctcttggctgcgtccccacaatcccagcgactgcctctgccgcctcacctctgaccttcccgactctagatgatttcattccccctcatctgcagaggtggccccaccacagccagccagcccgcgcctctggctcctttgcccccattagccagacgccaccatccttctcaccaccacctccgctggtccctcctgccccggaggacctccgcagagtctcggagcctgacctcacgggagctgtttcgagtaccgtaagcttgctggactcccctcctcacggcttttctgaatgtctcctcccagcagtcacattccctttctcactgaagcactgagctctgaggacagcactggctgccgctgtgcctgtgtgatgactggagccgtgtcccctgtcactagcgtgcatgcttcccgtgtgtcttccctgggtctctcggggctgttccccatctctgcagtgcctcatctgctctgtcctgttgggaatgcacatctttctccctcagaagacaacatctgtggcctttatgttgactggccatgcttttcacaggccaggtcgggggtcgtgtggtgagctgaggaaagctaagaattatgggggaaagcaacggcaggcgtggtgggtgctacttaccagggagcggggagatctcggggaggaagcgattctctgattctttttcattctcccagcagccccatgaagtaactcttcattttatcaatgaggagtatgaggttcagagagattaagtaatatatgcaagattacacagtaagtagcagaaccaggattcaaacctaggtgtttggggctccattaacacaggcttttactcaacgctgctatactgccctgcagattcctttccccttcctgactctgtgttcttgcttgtccccttcttgtccagaggctctctggtatctgactgcaggcattcagcttcccctgagtcagtcctgcctcagtctgctaagccagtacctcccagatggtgcctggaaatatatagttagggacccagcacggtggctcatgcctgtaatttcagcactttgggaggccgaggtgggcagatcacctgaggtcaagagttcgagaccagcctggccaacatagtgaaaccctgtctttactaaaaatacaaaaaaaaaaattagccagtgggcgtgatggcaggcgcctgtaatcccagctacttgggaggctgaggcaagagaatcacttgaatctgggatgcagaggttgcagtgagccgagatcgcaccactgcactccaccatgggcaacagagtgagtctctgtctc

SEQ ID NO: 314213 - DNA, 1335 bp, Homo sapiens
aggaggaagcatcattcatgaaccgatctttgcagacgacttgtcctgccaccaccatgagttctgaatgtgatggtggttccaaagctgtgatgaatggcttggcacctggcagcaatgggcaagacaaagcaactgccgaccctttacgcgcacgctctatttctgctgttaaaatcattcctgtgaagacagtgaaaaacgcctcaggcctagttctccctacagacatggatcctacaaaaatctgcactgggaagggagcggtgactctccgggcctcgtcttcctacagggaaaccccaagcagtagccctgcgagccctcaggaaacccggcaacacgaaagcaaaccaggtctggagccagagccttcttcagcagatgagtggaggctttcttccagtgctgatgccaatggaaatgcccagccctcttcactcgctgccaagggctacagaagtgtgcatcccaaccttccttctgacaagtcccaggttctctctcccccacgccctcctctccctcaaaaggaccgctttgcatggcagtcccccaccatccacaatacctataaggattccctctacctgagctcaccaaagccttatgtcccactcggcacccccagacagcagaacccctcacaaccccagcctatctctgtcctcctggcagctggatcggctcccaaaggtgtggtgtgccctggttccttgcttccggactccacgttccccagtgcttcatcccaaccccagcagcgctatgcagccaccaggacagtttatcataagaatgtgagctctaacccatgtcatgaggcagttgggattaaaaaggtcagcagcttatatgtaccttgtttatccaataacatttgcctggcggcgtcagaaaactcctctcgtgttgcacgtgaccctgccgaaggcactcccttggaggctgcgggcacccgagcaccggctcccggccttgtctcccgcacagccggcacaggaaaaccaccccctgctcctcctcctgaccctcccaagctattctttgacatccgtaaagatgccgttaaccgtggcgagagtccttccctggggactcaggcttcgttcccagatgtgagaccacctgtgctaggcccccgggttacctctgatcccgaaaaccggaagagcaaagaatcttaccttttgcagccgagttatccagccaaggatgccacttcctccagtgcagcccagccggaggtaatagttgtccctctctacctggttaatactgacagagggcaagaaggcagagcagtcgctgggattgtgggcacgcagccaagag

SEQ ID NO: 314214 - DNA, 839 bp, Homo sapiens
gagcgcggccccgccccgggacggcagcctgcgcgcccggccgccgcctgccctctccgctggccacctgctgccgcccgcgccatggctggcaaagcacacaggctgagcgctgaggagagggaccagctgctgccaaacctgagggctgtggggtggaatgagctggaaggccgtgatgccatcttcaagcagtttcatttcaaagacttcaacagggcctttgggttcatgacaagagtggccctgcaggctgagaaactggaccaccatcctgaatggtttaacgtgtacaacaaggtccacatcacgctgagcacccatgagtgtgccggcctttcagaacgggacataaacctggccagcttcatcgaacaagtagcagtgtccatgacatagaccctgcccttcctctttgaattcttccgggggaaagggtgactgaactgggagtccagggagggagctgaggagcccttaccctcccaccactcccctcccaagacccagccgccgccgttgagggctgagtccttgctgtgggatgtgccagtgtccccaccaacaccaggaatttagaccttttccctgcaccactctcttcatcctgggggctctgttacactaatttgaataaactctcccctttctttgcaacttcccagcaacaataatgattttcttgccaggccgtctcttgctccctaattcatttcccaggaagctgtgatacagggtgaaataaagtcttgtcttagaaaccaggaccctaaaccccacactatgtaatagaaacacatgtgtttttatgtctcaaataaaactattatatcacttgg

SEQ ID NO: 314215 - DNA, 722 bp, Homo sapiens
acattggtcttttcctgctttcggacttaaactgaaacatccactctccttaggtctcaaggctacaagcctccggtgtgcaacaataccatctgctttcctggttctccagcttgccaactacagatcttgggacttgtcagcctccataatcacatgagccaattccttataagaaatctctttgtgtgtattggttctgtttctctggagaatcataatacacaggcctatcatatcagatatggcagatcccaaatcctgatggtctcttcagtttcttaaaatcttagcaaagttcttagggcttgcctggtttactccacaagagagaagacacaggcagcttaggacctggcaggctatttattactggagcagttaagagatggtttgcacagtcagttccccagccaggaactctctaggacagaatattcccacgctgtcatgaagaagggggcactaagagcagcctcatctctacccccacgagaatgccacacaaattttacctcacatatgtcactatgcagagactgggaagccttcttcctaatagttctcacctgtgtctcctaactcaagtactaagctgacttgtaaatgccggggtcacttggaacaggaatctagccatgtcacaactcagtctgaatgagttggtcccccagcaaaggccaggaaaggggcagaggctggaggttgagaaataagcgtat

SEQ ID NO: 314216 - DNA, 1075 bp, Homo sapiens
gagcgcggccccgccccgggacggcagcctgcgcgcccggccgccgcctgccctctccgctggccacctgctgccgcccgcgccatggctggcaaagcacacaggctgagcgctgaggagagggaccagctgctgccaaacctgagggctgtggggtggaatgagctggaaggccgtgatgccatcttcaagcagtttcatttcaaagacttcaacagggcctttgggttcatgacaagagtggccctgcaggctgagaaactggaccaccatcctgaatggtttaacgtgtacaacaaggtccacatcacgctgagcacccatgagtgtgccggcctttcagaacgggacataaacctggccagcttcatcgaacaagtagcagtgtccatgacatagaccctgcccttcctctttgaattcttccgggggaaagggtgactgaactgggagtccagggagggagctgaggagcccttaccctcccaccactcccctcccaagacccagccgccgccgttgagggctgagtccttgctgtgggatgtgccagtgtccccaccaacaccaggaatttagaccttttccctgcaccactctcttcatcctgggggctctgttacactaatttgaataaactctcccctttctttgcaacttcccagcaacaataatgattttcttgccaggccgtctcttgctccctaattcatttcccaggaagctgtgatacagggtgaaataaagtcttgtcttagaaaccaggaccctaaaccccacactatgtaatagaaacacatgtgtttttatgtctcaaataaaactattatatcacttggaaaaaaaaaaaaaaaaaaaaaaactaaaaaaaaaaaaaaaaaaactgctggaaggcataattttgggggggggtggaggagaggaagaggtgtagatagaaaggtggcgcagtgggtatatagcggtgtgttctcgagacccatgtttttgctgtacaagggggtgaaaatttaggggggctcccaatagagagggccggaatatttcgaaaaagccgtgttaccgtgttaagagg

SEQ ID NO: 314217 - DNA, 969 bp, Homo sapiens
gacctgagggcctatcggcagacgagcctggaccccacctcctgggcagggtgccacccttgaggcctcccagcctattgctcaaagacctgctgccctttggtcacccacgtccaaagcagccagtggaagctaagttcccctaaaggttggagcccctctgttttgacctataaagagaaatgcccttgggcctctgtttttttccctcttctaggctggcaaagcacacaggctgagcgctgaggagagggaccagctgctgccaaacctgagggctgtggggtggaatgagctggaaggccgtgatgccatcttcaagcagtttcatttcaaagacttcaacagggcctttgggttcatgacaagagtggccctgcaggctgagaaactggaccaccatcctgaatggtttaacgtgtacaacaaggtccacatcacgctgagcacccatgagtgtgccggcctttcagaacgggacataaacctggccagcttcatcgaacaagtagcagtgtccatgacatagaccctgcccttcctctttgaattcttccgggggaaagggtgactgaactgggagtccagggagggagctgaggagcccttaccctcccaccactcccctcccaagacccagccgccgccgttgagggctgagtccttgctgtgggatgtgccagtgtccccaccaacaccaggaatttagaccttttccctgcaccactctcttcatcctgggggctctgttacactaatttgaataaactctcccctttctttgcaacttcccagcaacaataatgattttcttgccaggccgtctcttgctccctaattcatttcccaggaagctgtgatacagggtgaaataaagtcttgtcttagaaaccaggaccctaaaccccacactatgtaatagaaacacatgtgtttttatgtctcaaataaaactattatatcacttgg

SEQ ID NO: 314218 - DNA, 969 bp, Homo sapiens
gagcgcggccccgccccgggacggcagcctgcgcgcccggccgccgcctgccctctccgctggccacctgctgccgcccgcgccatggctggcaaagcacacaggctgagcgctgaggagagggaccagctgctgccaaacctgagggctgtggggtggaatgagctggaaggccgtgatgccatcttcaagcagtttcatttcaaagacttcaacagggcctttgggttcatgacaagagtggccctgcaggctgagaaactggaccaccatcctgaatggtttaacgtgtacaacaaggtctcaaggctacaagcctccggtgtgcaacaataccatctgctttcctggttctccagcttgccaactacagatcttgggacttgtcagcctccataatcacatgagccaattccttataagaaatctctttgtgtgtattggttctgtttctctggagaatcataatacacaggcctatcatatcagatatggcagatcccaaatcctgatggtctcttcagtttcttaaaatcttagcaaagttcttagggcttgcctggtttactccacaagagagaagacacaggcagcttaggacctggcaggctatttattactggagcagttaagagatggtttgcacagtcagttccccagccaggaactctctaggacagaatattcccacgctgtcatgaagaagggggcactaagagcagcctcatctctacccccacgagaatgccacacaaattttacctcacatatgtcactatgcagagactgggaagccttcttcctaatagttctcacctgtgtctcctaactcaagtactaagctgacttgtaaatgccggggtcacttggaacaggaatctagccatgtcacaactcagtctgaatgagttggtcccccagcaaaggccaggaaaggggcagaggctggaggttgagaaataagcgtat

SEQ ID NO: 314219 - DNA, 474 bp, Homo sapiens
ccccacctcctgggcagggtgccacccttgaggcctcccagcctattgctcaaagacctgctgccctttggtcacccacgtccaaagcagccagtggaagctaagttcccctaaaggttggagcccctctgttttgacctataaagagaaatgcccttgggcctctgtttttttccctcttctaggctggcaaagcacacaggctgagcgctgaggagagggaccagctgctgccaaacctgagggctgtggggtggaatgagctggaaggccgtgatgccatcttcaagcagtttcatttcaaagacttcaacagggtatggcaccagggtgggacagagttttctgagacgggctgatggggtcaccttacaaagcatgttctctcccttcacgtcttgttagccaagactctcagacaccacactcatccagttatttgggcactgtgccagtggggaaattaattttcct

SEQ ID NO: 314220 - DNA, 859 bp, Homo sapiens
gagcgcggccccgccccgggacggcagcctgcgcgcccggccgccgcctgccctctccgctggccacctgctgccgcccgcgccatggctggcaaagcacacaggctgagcgctgaggagagggaccagctgctgccaaacctgagggctgtggggtggaatgagctggaaggccgtgatgccatcttcaagcagtttcatttcaaagacttcaacagggcctttgggttcatgacaagagtggccctgcaggctgagaaactggaccaccatcctgaatggtttaacgtgtacaacaaggtccacatcacgctgagcacccatgagtgtgccggcctttcagaacgggacataaacctggccagcttcatcgaacaagtagcagtgtccatgacatagaccctgcccttcctctttgaattcttccgggggaaagggtgactgaactgggagtccagggagggagctgaggagcccttaccctcccaccactcccctcccaagacccagccgccgccgttgagggctgagtccttgctgtgggatgtgccagtgtccccaccaacaccaggaatttagaccttttccctgcaccactctcttcatcctgggggctctgttacactaatttgaataaactctcccctttctttgcaacttcccagcaacaataatgattttcttgccaggccgtctcttgctccctaattcatttcccaggaagctgtgatacagggtgaaataaagtcttgtcttagaaaccaggaccctaaaccccacactatgtaatagaaacacatgtgtttttatgtctcaaataaaactattatatcacttggaaaaaacaggctctagaaac

SEQ ID NO: 314221 - DNA, 1160 bp, Homo sapiens
gggggcggggcctacgaccttcctgggccggggaagacagtcgtggaggagtccacggatctcgtccccttggtggcccgattctgctttatactggggtgggagcgagagggaggctgagtttgcgcgctcgtgtgcgtgcctgtccgctgccccttcccgctggcactctgggtacggggtctgcctgggactcacgctctgcgccggtatgctggccccagagccagtccccgcgccggcttgaggcccgtgccaggccacgggggcttggtggcgctggagcagccctcctcccgtgagcttcccccacccacccccggggcgggggcgggggcggggcccttgctctgctgtaagctcgcgagcttcatcagaccatttctggtccacaggccttcggagcaggctggcaaagcacacaggctgagcgctgaggagagggaccagctgctgccaaacctgagggctgtggggtggaatgagctggaaggccgtgatgccatcttcaagcagtttcatttcaaagacttcaacagggcctttgggttcatgacaagagtggccctgcaggctgagaaactggaccaccatcctgaatggtttaacgtgtacaacaaggtccacatcacgctgagcacccatgagtgtgccggcctttcagaacgggacataaacctggccagcttcatcgaacaagtagcagtgtccatgacatagaccctgcccttcctctttgaattcttccgggggaaagggtgactgaactgggagtccagggagggagctgaggagcccttaccctcccaccactcccctcccaagacccagccgccgccgttgagggctgagtccttgctgtgggatgtgccagtgtccccaccaacaccaggaatttagaccttttccctgcaccactctcttcatcctgggggctctgttacactaatttgaataaactctcccctttctttgcaacttcccagcaacaataatgattttcttgccaggccgtctcttgctccctaattcatttcccaggaagctgtgatacagggtgaaataaagtcttgtcttagaaaccaggaccctaaaccccacactatgtaatagaaacacatgtgtttttatgtctcaaataaaactattatatcacttgg

SEQ ID NO: 314222 - DNA, 1420 bp, Homo sapiens
gccccgccgagagcgtgaactatcgctgcggaggggcagacctggaccggtggaaggccgggcggaagtgcgcgcctggggccgccttggttaccgcgttttccgctcctcgctacgtcatcgttgtgagcccgctatcagcggccagcgcgggcgcggccggagaccgtggggcccccggttgccgccccctcgggagccaccatgttggtgataccccccggactgagcgaggaagaggaggctctgcagaagaaattcaacaagctcaagaaaaagaaaaaggcattgctggctctgaagaagcaaagtagcagcagcacaaccagccaaggtggtgtcaaacgctcactatcagagcagcctgtcatggacacagccacagcaacagagcaggcaaagcagctggtgaagtcaggagccatcagtgccatcaaggctgagaccaagaactcaggcttcaagcgttctcgaacccttgaggggaagttaaaggaccccgagaagggaccagtccccactttccagccgttccagaggagcatatctgctgatgatgacctgcaagagtcatccagacgtccccagaggaaatctctgtatgagagctttgtgtcttctagtgatcgacttcgagaactaggaccagatggagaagaggcagagggcccaggggctggtgatggtccccctcgaagctttgactggggctatgaagaacgcagtggtgcccactcctcagcctcccctccccgaagccgcagccgggaccgcagccatgagaggaaccgggacagagaccgagatcgggagcgggatcgagaccgggatcgagacagagacagagagcgggacagggatcgggatcgggatcgagatcgagaccgggaacgggacagggatcgggagcgggatcgagaccgagaccgagagggtcctttccgcaggtcggattcattccctgaacggcgagcccctaggaaagggaatactctctatgtatatggagaagacatgacacccacccttctccgtggggccttctctccttttggaaacatcattgacctctccatggacccacccagaaactgtgccttcgtcacctatgaaaagatggagtcagcagatcaggccgttgctgagctcaacgggacccaggtggagtctgtacagctcaaagtcaacatagcccgaaaacagcccatgctggatgccgctactggcaagtctgtctggggctccctcgctgtccagaacagccctaagggttgccaccgggacaagaggacccagattgtctacagtgatgacgtctacaaggaaaaccttgtggatggcttctagggaacagagctggattccttgtgcctcatatgccccaatgctggtctcagtaaaacactgaggtggaagctta

SEQ ID NO: 314223 - DNA, 1825 bp, Homo sapiens
gccccgccgagagcgtgaactatcgctgcggaggggcagacctggaccggtggaaggccgggcggaagtgcgcgcctggggccgccttggttaccgcgttttccgctcctcgctacgtcatcgttgtgagcccgctatcagcggccagcgcgggcgcggccggagaccgtggggcccccggttgccgccccctcgggagccaccatgttggtgataccccccggactgagcgaggaagaggaggctctgcagaagaaattcaacaagctcaagaaaaagaaaaaggcattgctggctctgaagaagcaaagtagcagcagcacaaccagccaaggtggtgtcaaacgctcactatcagagcagcctgtcatggacacagccacagcaacagagcaggcaaagcagctggtgaagtcaggagccatcagtgccatcaaggctgagaccaagaactcaggcttcaagcgttctcgaacccttgaggggaagttaaaggaccccgagaagggaccagtccccactttccagccgttccagaggagcatatctgctgatgatgacctgcaagagtcatccagacgtccccagaggaaatctctgtatgagagctttgtgtcttctagtgatcgacttcgagaactaggaccagatggagaagaggcagagggcccaggggctggtgatggtccccctcgaagctttgactggggctatgaagaacgcagtggtgcccactcctcagcctcccctccccgaagccgcagccgggaccgcagccatgagaggaaccgggacagagaccgagatcgggagcgggatcgagaccgggatcgagacagagacagagagcgggacagggatcgggatcgggatcgagatcgagaccgggaacgggacagggatcgggagcgggatcgagaccgagaccgagagggtcctttccgcaggtcggattcattccctgaacggcgagcccctaggaaagggaatactctctatgtatatggagaagacatgacacccacccttctccgtggggccttctctccttttggaaacatcattgacctctccatggacccacccagaaactgtgccttcgtcacctatgaaaagatggagtcagcagatcaggccgttgctgagctcaacgggacccaggtggagtctgtacagctcaaagtcaacatagcccgaaaacagcccatgctggatgccgctactggcaagtctgtctggggctccctcgctgtccagaacagccctaagggttgccaccgggacaagaggacccagattgtctacagtgatgacgtctacaaggaaaaccttgtggatggcttctagggaacagagctggattccttgtgcctcatatgccccaatgctggtctcagtaaaacactgaggtggaagcttaaaaaaaaaaaaaaaaaaaaaaaaaaaaaaaaaaaaagggggggggggcaaaagttttccccggggggcccaattttgcggtccccgttttttggaaagggggcgccaagaggagagcggaatataaaaggcaaggccggggcgcccgcgtataaccaagcgtctcgcgttggagaacccgccgctggggcctggcaaggacccttccttcggcgggtggcacttgggcccactcctaggatataggccaggaaactaacttcgggtagggaacccccattgctggtggagttggtccgttgttaatacgcgcgccgctgaacaacacaggaaatcgtgagccaagcagagcacgcaaataaccgaacagtagcacatcacacaagactcatcaacactcatcccc

SEQ ID NO: 314224 - DNA, 1857 bp, Homo sapiens
gccccgccgagagcgtgaactatcgctgcggaggggcagacctggaccggtggaaggccgggcggaagtgcgcgcctggggccgccttggttaccgcgttttccgctcctcgctacgtcatcgttgtgagcccgctatcagcggccagcgcgggcgcggccggagaccgtggggcccccggttgccgccccctcgggtaaggccctctgcttctcactcttcggccctttttctcatagccgtttctctgttcttcctctttgcgttgctctgcgggcgctacgctggctccaccgccttctctgccgttcaaaccccgcggttgtccttaccctagcgagggtaggggggtcgggtgccatcgtctttccgacggagtggatatttgtccctccttgaaccacatggtacctaaaggtgctggtgtctgtgatccctggagacaggagggaatgctggatgatcccgaccagcgggagcttggacagcagcctggtttaagcaaggggtagggaaagccaaagacaagagtaggcagacctgaaggggtggggttgggtacagtgtggacggcgtgtgaaccccgggtggtaacagtggagaaagatgtcttgggccctgcccctgaactaggagccaccatgttggtgataccccccggactgagcgaggaagaggaggctctgcagaagaaattcaacaagctcaagaaaaagaaaaaggcattgctggctctgaagaagcaaagtagcagcagcacaaccagccaaggtggtgtcaaacgctcactatcagagcagcctgtcatggacacagccacagcaacagagcaggcaaagcagctggtgaagtcaggagccatcagtgccatcaaggctgagaccaagaactcaggcttcaagcgttctcgaacccttgaggggaagttaaaggaccccgagaagggaccagtccccactttccagccgttccagaggagcatatctgctgatgatgacctgcaagagtcatccagacgtccccagaggaaatctctgtatgagagctttgtgtcttctagtgatcgacttcgagaactaggaccagatggagaagaggcagagggcccaggggctggtgatggtccccctcgaagctttgactggggctatgaagaacgcagtggtgcccactcctcagcctcccctccccgaagccgcagccgggaccgcagccatgagaggaaccgggacagagaccgagatcgggagcgggatcgagaccgggatcgagacagagacagagagcgggacagggatcgggatcgggatcgagatcgagaccgggaacgggacagggatcgggagcgggatcgagaccgagaccgagagggtcctttccgcaggtcggattcattccctgaacggcgagcccctaggaaagggaatactctctatgtatatggagaagacatgacacccacccttctccgtggggccttctctccttttggaaacatcattgacctctccatggacccacccagaaactgtgccttcgtcacctatgaaaagatggagtcagcagatcaggccgttgctgagctcaacgggacccaggtggagtctgtacagctcaaagtcaacatagcccgaaaacagcccatgctggatgccgctactggcaagtctgtctggggctccctcgctgtccagaacagccctaagggttgccaccgggacaagaggacccagattgtctacagtgatgacgtctacaaggaaaaccttgtggatggcttctagggaacagagctggattccttgtgcctcatatgccccaatgctggtctcagtaaaacactgaggtggaagctta

SEQ ID NO: 314225 - DNA, 1668 bp, Homo sapiens
gccccgccgagagcgtgaactatcgctgcggaggggcagacctggaccggtggaaggccgggcggaagtgcgcgcctggggccgccttggttaccgcgttttccgctcctcgctacgtcatcgttgtgagcccgctatcagcggccagcgcgggcgcggccggagaccgtggggcccccggttgccgccccctcgggagccaccatgttggtgataccccccggactgagcgaggaagaggaggctctgcagaagaaattcaacaagctcaagaaaaagaaaaaggcattgctggctctgaagaagcaaagtagcagcagcacaaccagccaaggtggtgtcaaacgctcactatcagagcagcctgtcatggacacagccacagcaacagagcaggcaaagcagctggtgaagtcaggagccatcagtgccatcaaggctgagaccaagaactcaggcttcaagcgttctcgaacccttgaggggaagttaaaggaccccgagaagggaccagtccccactttccagccgttccagaggagcatatctgctgatgatgacctgcaagagtcatccagacgtccccagaggaaatctctgtatgagagctttgtgtcttctagtgatcgacttcgagaactaggaccagatggagaagaggcagagggcccaggggctggtgatggtccccctcgaagctttgactggggctatgaagaacgcagtggtgcccactcctcagcctcccctccccgaagccgcagccgggaccgcagccatgagaggaaccgggacagagaccgagatcgggagcgggatcgagaccgggatcgagacagagacagagagcgggacagggatcgggatcgggatcgagatcgagaccgggaacgggacagggatcgggagcgggatcgagaccgagaccgagagggtcctttccgcaggtcggattcattccctgaacggcgagcccctaggaaagggaatactctctatgtatatggagaagacatgacacccacccttctccgtggggccttctctccttttggaaacatcattgacctctccatggacccacccagaaactgtgccttcgtcacctatgaaaagatggagtcagcagatcaggccgttgctgaggttggaacttcccaaatctgttcttcccatcgcttctgctgttctcatgtgttctcctcaaaatactagatgccaggaagaagttggttcctcttgataaagaaagcctctccctattcacacagaaaaactcacattctcagattccttattcagtctcctcctaggatagcaactcctggaataacttctttggtttatctgtaatgttttcctccccatcctctgcctcccctcttctgcttcagctcaacgggacccaggtggagtctgtacagctcaaagtcaacatagcccgaaaacagcccatgctggatgccgctactggcaagtctgtctggggctccctcgctgtccagaacagccctaagggttgccaccgggacaagaggacccagattgtctacagtgatgacgtctacaaggaaaaccttgtggatggcttctagggaacagagctggattccttgtgcctcatatgccccaatgctggtctcagtaaaacactgaggtggaagctta

SEQ ID NO: 314226 - DNA, 1591 bp, Homo sapiens
gccccgccgagagcgtgaactatcgctgcggaggggcagacctggaccggtggaaggccgggcggaagtgcgcgcctggggccgccttggttaccgcgttttccgctcctcgctacgtcatcgttgtgagcccgctatcagcggccagcgcgggcgcggccggagaccgtggggcccccggttgccgccccctcgggagccaccatgttggtgataccccccggactgagcgaggaagaggaggctctgcagaagaaattcaacaagctcaagaaaaagaaaaaggcattgctggctctgaagaagcaaagtagcagcagcacaaccagccaaggtggtgtcaaacgctcactatcagagcagcctgtcatggacacagccacagcaacagagcaggcaaagcagctggtgaagtcaggagccatcagtgccatcaaggctgagaccaagaactcaggcttcaagcgttctcgaacccttgaggggaagttaaaggaccccgagaagggaccagtccccactttccagccgttccagaggagcatatctgctgatgatgacctgcaagagtcatccagacgtccccagaggaaatctctgtatgagaggttagagagtagagataaggctgggcccatttggtggagttgattgcctgagtccttgggaggtttgggctgtaggagctgggctatagagggaatattgagtctccacagggtctgaggggagaaggtaaaacccccctttgatcttcagtctgcatctccccagctttgctttgtgtcttctagtgatcgacttcgagaactaggaccagatggagaagaggcagagggcccaggggctggtgatggtccccctcgaagctttgactggggctatgaagaacgcagtggtgcccactcctcagcctcccctccccgaagccgcagccgggaccgcagccatgagaggaaccgggacagagaccgagatcgggagcgggatcgagaccgggatcgagacagagacagagagcgggacagggatcgggatcgggatcgagatcgagaccgggaacgggacagggatcgggagcgggatcgagaccgagaccgagagggtcctttccgcaggtcggattcattccctgaacggcgagcccctaggaaagggaatactctctatgtatatggagaagacatgacacccacccttctccgtggggccttctctccttttggaaacatcattgacctctccatggacccacccagaaactgtgccttcgtcacctatgaaaagatggagtcagcagatcaggccgttgctgagctcaacgggacccaggtggagtctgtacagctcaaagtcaacatagcccgaaaacagcccatgctggatgccgctactggcaagtctgtctggggctccctcgctgtccagaacagccctaagggttgccaccgggacaagaggacccagattgtctacagtgatgacgtctacaaggaaaaccttgtggatggcttctagggaacagagctggattccttgtgcctcatatgccccaatgctggtctcagtaaaacactgaggtggaagctta

SEQ ID NO: 314227 - DNA, 1322 bp, Homo sapiens
gccccgccgagagcgtgaactatcgctgcggaggggcagacctggaccggtggaaggccgggcggaagtgcgcgcctggggccgccttggttaccgcgttttccgctcctcgctacgtcatcgttgtgagcccgctatcagcggccagcgcgggcgcggccggagaccgtggggcccccggttgccgccccctcgggagccaccatgttggtgataccccccggactgagcgaggaagaggaggctctgcagaagaaattcaacaagctcaagaaaaagaaaaaggcattgctggctctgaagaagcaaagtagcagcagcacaaccagccaaggtggtgtcaaacgctcactatcagagcagcctgtcatggacacagccacagcaacagagcaggcaaagcagctggtgaagtcaggagccatcagtgccatcaaggctgagaccaagaactcaggcttcaagcgttctcgaacccttgaggggaagttaaaggaccccgagaagggaccagtccccactttccagccgttccagaggagcatatctgctgatgatgacctgcaagagtcatccagacgtccccagaggaaatctctgtatgagagctttgtgtcttctagtgatcgacttcgagaactaggaccagatggagaagaggcagagggcccaggggctggtgatggtccccctcgaagctttgactggggctatgaagaacgcagtggtgcccactcctcagcctcccctccccgaagccgcagccgggaccgcagccatgagaggaaccgggacagagaccgagatcgggcgggatcgagaccgagaccgagagggtcctttccgcaggtcggattcattccctgaacggcgagcccctaggaaagggaatactctctatgtatatggagaagacatgacacccacccttctccgtggggccttctctccttttggaaacatcattgacctctccatggacccacccagaaactgtgccttcgtcacctatgaaaagatggagtcagcagatcaggccgttgctgagctcaacgggacccaggtggagtctgtacagctcaaagtcaacatagcccgaaaacagcccatgctggatgccgctactggcaagtctgtctggggctccctcgctgtccagaacagccctaagggttgccaccgggacaagaggacccagattgtctacagtgatgacgtctacaaggaaaaccttgtggatggcttctagggaacagagctggattccttgtgcctcatatgccccaatgctggtctcagtaaaacactgaggtggaagctta

SEQ ID NO: 314228 - DNA, 1422 bp, Homo sapiens
gccccgccgagagcgtgaactatcgctgcggaggggcagacctggaccggtggaaggccgggcggaagtgcgcgcctggggccgccttggttaccgcgttttccgctcctcgctacgtcatcgttgtgagcccgctatcagcggccagcgcgggcgcggccggagaccgtggggcccccggttgccgccccctcgggagccaccatgttggtgataccccccggactgagcgaggaagaggaggctctgcagaagaaattcaacaagctcaagaaaaagaaaaaggcattgctggctctgaagaagcaaagtagcagcagcacaaccagccaaggtggtgtcaaacgctcactatcagagcagcctgtcatggacacagccacagcaacagagcaggcaaagcagctggtgaagtcaggagccatcagtgccatcaaggctgagaccaagaactcaggcttcaagcgttctcgaacccttgaggggaagttaaaggaccccgagaagggaccagtccccactttccagccgttccagaggagcatatctgctgatgatgacctgcaagagtcatccagacgtccccagaggaaatctctgtatgagagctttgtgtcttctagtgatcgacttcgagaactaggaccagatggagaagaggcagagggcccaggggctggtgatggtccccctcgaagctttgactggggctatgaagaacgcagtggtgcccactcctcagcctcccctccccgaagccgcagccgggaccgcagccatgagaggaaccgggacagagaccgagatcgggagcgggatcgagaccgggatcgagacagtgagtgattttggctggaggtcaaggtgaccttaactgaggtttatgtgggtcctactaagtgaaatgtggcatgggctatgtcttgtgactatgatttgtgctcccaaggtcggattcattccctgaacggcgagcccctaggaaagggaatactctctatgtatatggagaagacatgacacccacccttctccgtggggccttctctccttttggaaacatcattgacctctccatggacccacccagaaactgtgccttcgtcacctatgaaaagatggagtcagcagatcaggccgttgctgagctcaacgggacccaggtggagtctgtacagctcaaagtcaacatagcccgaaaacagcccatgctggatgccgctactggcaagtctgtctggggctccctcgctgtccagaacagccctaagggttgccaccgggacaagaggacccagattgtctacagtgatgacgtctacaaggaaaaccttgtggatggcttctagggaacagagctggattccttgtgcctcatatgccccaatgctggtctcagtaaaacactgaggtggaagctta

SEQ ID NO: 314229 - DNA, 779 bp, Homo sapiens
gccccgccgagagcgtgaactatcgctgcggaggggcagacctggaccggtggaaggccgggcggaagtgcgcgcctggggccgccttggttaccgcgttttccgctcctcgctacgtcatcgttgtgagcccgctatcagcggccagcgcgggcgcggccggagaccgtggggcccccggttgccgccccctcgggagccaccatgttggtgataccccccggactgagcgaggaagaggaggctctgcagaagaaattcaacaagctcaagaaaaagaaaaaggcattgctggctctgaagaagcaaagtagcagcagcacaaccagccaaggtggtgtcaaacgctcactatcagagcagcctgtcatggacacagccacagcaacagagcaggcaaagcagctggtgaagtcaggagccatcagtgccatcaaggctgagaccaagaactcaggcttcaagcgttctcgaacccttgaggggaagttaaaggaccccgagaagggaccagtccccactttccagccgttccagaggagcatatctgctgatgatgacctgcaagagtcatccagacgtccccagaggaaatctctgtatgagagctgtccagaacagccctaagggttgccaccgggacaagaggacccagattgtctacagtgatgacgtctacaaggaaaaccttgtggatggcttctagggaacagagctggattccttgtgcctcatatgccccaatgctggtctcagtaaaacactgaggtggaagctta

SEQ ID NO: 314230 - DNA, 2464 bp, Homo sapiens
ggcacgaggggttgccgccccctcgggagccaccatgttggtgataccccccggactgagcgaggaagaggaggctctgcagaagaaattcaacaagctcaagaaaaagaaaaaggcattgctggctctgaagaagcaaagtagcagcagcacaaccagccaaggtggtgtcaaacgctcactatcagagcagcctgtcatggacacagccacagcaacagagcaggcaaagcagctggtgaagtcaggagccatcagtgccatcaaggctgagaccaagaactcaggcttcaagcgttctcgaacccttgaggggaagttaaaggaccccgagaagggaccagtccccactttccagccgttccagaggagcatatctgctgatgatgacctgcaagagtcatccagacgtccccagaggaaatctctgtatgagagctttgtgtcttctagtgatcgacttcgagaactaggaccagatggagaagaggcagagggcccaggggctggtgatggtccccctcgaagctttgactggggctatgaagaacgcagtggtgcccactcctcagcctcccctccccgaagccgcagccgggaccgcagccatgagaggaaccgggacagagaccgagatcgggggtcggattcattccctgaacggcgagcccctaggaaagggaatactctctatgtatatggagaagacatgacacccacccttctccgtggggccttctctccttttggaaacatcattgacctctccatggacccacccagaaactgtgccttcgtcacctatgaaaagatggagtcagcagatcaggccgttgctgagctcaacgggacccaggtggagtctgtacagctcaaagtcaacatagcccgaaaacagcccatgctggatgccgctactggcaagtctgtctggggctccctcgctgtccagaacagccctaagggttgccaccgggacaagaggacccagattgtctacagtgatgacgtctacaaggaaaaccttgtggatggcttctagggaacagagctggattccttgtgcctcatatgccccaatgctggtctcagtaaaacactgaggtggaagcttaaaaaaaaaggagcgtctctgcccggcctccccgtctgagaagtgaggaaaccctctgcctggcaaccgccccgtctgagaagtgaggagcccctccgtccggcagccaccccgtctgggaagtgaggagcgtctccgcccggcagccaccccgaccgggagggaggtggggggggggggtcagccccccgcccggccagccgccccgtccgggaggtgaggggctcctctgcccggccgcccctactgggaagtgaggagcccctctgcccggccagccgccccgtccgggagggaggtggggggatcagccccccgcctggccagccgccccgtccgggaggtgaggggcgcctctgcccggccgcccctactgggaagtgaggagcccctctgcccggccagccgccccgtccgggagggaggtgggggggtcagccccccgcccggccagccgccccatccgggagggaggtgggggggtcagccctccgcccggccagccgccccgtccgggagggaggtggggggggtcagccccccgcccggccagccgccccgtccgggagggaggtggggggatcagccccccgcctggccagccaccccgtccgggaggtgaggggcgcctctgcccggccgcccctactgggaagtgaggacccctctgcctggccagccgccccgtccgggagggttgggggggggtcagccccccgcccggccagccgccccatccgggaggtgaggggcgcttctgcccggccgcccctactgggaaatgaggagcccctctgcccggccacgaccccgtctgggaggtgtgcccagcggctcattggggatgggccatgatgacaatggcggttttgtggaatagaaaggcgggaagagtggggaaaaaattgagaaatcggatggttgccgggtctctgtggatagaagtagacatgggagacttttcattttgttctgtactaagaaaaattcttctgccttgggatcctgttgatctgtgaccttatccccaaccctgtgctctctgaaacatgtgctgtgtccactcagggttaaatggattaagggcggtgcaagatgtgctttgttaaacagatgcttgaaggcagcatgctcgttaagagtcatcaccactccctaatcttaagtacccagggacacaaacactgcggaaggccgcagggtcctctgcctaggaaaaccagagacctttgttcacttgtttatctactgaccttccctccactattgtcctatgaccctgccaaatccccctctgcgagaaacacccaagaatgatcaataaaataaataaataaataaataaataat

SEQ ID NO: 314231 - DNA, 1966 bp, Homo sapiens
gccccgccgagagcgtgaactatcgctgcggaggggcagacctggaccggtggaaggccgggcggaagtgcgcgcctggggccgccttggttaccgcgttttccgctcctcgctacgtcatcgttgtgagcccgctatcagcggccagcgcgggcgcggccggagaccgtggggcccccggttgccgccccctcgggagccaccatgttggtgataccccccggactgagcgaggaagaggaggctctgcagaagaaattcaacaagctcaagaaaaagaaaaaggcattgctggctctgaagaagcaaagtagcagcagcacaaccagccaaggtggtgtcaaacgctcactatcagagcagcctgtcatggacacagccacagcaacagagcaggcaaagcagctggtgaagtcaggagccatcagtgccatcaaggctgagaccaagaactcaggcttcaagcgttctcgaacccttgaggggaagttaaaggaccccgagaagggaccagtccccactttccagccgttccagaggagcatatctgctgatgatgacctgcaagagtcatccagacgtccccagaggaaatctctgtatgagagctttgtgtcttctagtgatcgacttcgagaactaggaccagatggagaagaggcagagggcccaggggctggtgatggtccccctcgaagctttgactggggctatgaagaacgcagtggtgcccactcctcagcctcccctccccgaagccgcagccgggaccgcagccatgagaggaaccgggacagagaccgagatcgggagcgggatcgagaccgggatcgagacagagacagagagcgggacagggatcgggatcgggatcgagatcgagaccgggaacgggacagggatcgggagcgggatcgagaccgagaccgagagggtcctttccgcaggtcggattcattccctgaacggcgagcccctaggaaagggaatactctctatgtatatggagaagacatgacacccacccttctccgtggggccttctctccttttggaaacatcattgacctctccatggacccacccagaaactgtgccttcgtcacctatgaaaagatggagtcagcagatcaggccgttgctgagctcaacgggacccaggtggagtctgtacagctcaaagtcaacatagcccgaaaacagcccatgctggatgccgctactggcaagtctgtctggggctccctcgctgtccagaacagccctaagggttgccaccgggacaagaggacccagattgtctacagtgatgacgtctacaaggaaaaccttgtggatggcttctagggaacagagctggattccttgtgcctcatatgccccaatgctggtctcagtaaaacactgaggtggaagcttacacatctccctcagcctctggtttttcagcacttgggattggggttaaacctttaaaaacggctgtcaggtttgatctcagtgtaacaacatggccagtgcctgttccccactcccttgccccaaaaggatctggaacacaaaaaaaaaaaaaaaaaaaaaaaaaaaaaaaaaaaaagggggggggggcaaaagttttccccggggggcccaattttgcggtccccgttttttggaaagggggcgccaagaggagagcggaatataaaaggcaaggccggggcgcccgcgtataaccaagcgtctcgcgttggagaacccgccgctggggcctggcaaggacccttccttcggcgggtggcacttgggcccactcctaggatataggccaggaaactaacttcgggtagggaacccccattgctggtggagttggtccgttgttaatacgcgcgccgctgaacaacacaggaaatcgtgagccaagcagagcacgcaaataaccgaacagtagcacatcacacaagactcatcaacactcatcccc

SEQ ID NO: 314232 - DNA, 1732 bp, Homo sapiens
gccccgccgagagcgtgaactatcgctgcggaggggcagacctggaccggtggaaggccgggcggaagtgcgcgcctggggccgccttggttaccgcgttttccgctcctcgctacgtcatcgttgtgagcccgctatcagcggccagcgcgggcgcggccggagaccgtggggcccccggttgccgccccctcgggtaaggccctctgcttctcactcttcggccctttttctcatagccgtttctctgttcttcctctttgcgttgctctgcgggcgctacgctggctccaccgccttctctgccgttcaaaccccgcggttgtccttaccctagcgagggtaggggggtcgggtgccatcgtctttccgacggagtggatatttgtccctccttgaaccacatggtacctaaaggtgctggtgtctgtgatccctggagacaggagggaatgctggatgatcccgaccagcgggagcttggacagcagcctggtttaagcaaggggagccaccatgttggtgataccccccggactgagcgaggaagaggaggctctgcagaagaaattcaacaagctcaagaaaaagaaaaaggcattgctggctctgaagaagcaaagtagcagcagcacaaccagccaaggtggtgtcaaacgctcactatcagagcagcctgtcatggacacagccacagcaacagagcaggcaaagcagctggtgaagtcaggagccatcagtgccatcaaggctgagaccaagaactcaggcttcaagcgttctcgaacccttgaggggaagttaaaggaccccgagaagggaccagtccccactttccagccgttccagaggagcatatctgctgatgatgacctgcaagagtcatccagacgtccccagaggaaatctctgtatgagagctttgtgtcttctagtgatcgacttcgagaactaggaccagatggagaagaggcagagggcccaggggctggtgatggtccccctcgaagctttgactggggctatgaagaacgcagtggtgcccactcctcagcctcccctccccgaagccgcagccgggaccgcagccatgagaggaaccgggacagagaccgagatcgggagcgggatcgagaccgggatcgagacagagacagagagcgggacagggatcgggatcgggatcgagatcgagaccgggaacgggacagggatcgggagcgggatcgagaccgagaccgagagggtcctttccgcaggtcggattcattccctgaacggcgagcccctaggaaagggaatactctctatgtatatggagaagacatgacacccacccttctccgtggggccttctctccttttggaaacatcattgacctctccatggacccacccagaaactgtgccttcgtcacctatgaaaagatggagtcagcagatcaggccgttgctgagctcaacgggacccaggtggagtctgtacagctcaaagtcaacatagcccgaaaacagcccatgctggatgccgctactggcaagtctgtctggggctccctcgctgtccagaacagccctaagggttgccaccgggacaagaggacccagattgtctacagtgatgacgtctacaaggaaaaccttgtggatggcttctagggaacagagctggattccttgtgcctcatatgccccaatgctggtctcagtaaaacactgaggtggaagctta

SEQ ID NO: 314233 - DNA, 1754 bp, Homo sapiens
gccccgccgagagcgtgaactatcgctgcggaggggcagacctggaccggtggaaggccgggcggaagtgcgcgcctggggccgccttggttaccgcgttttccgctcctcgctacgtcatcgttgtgagcccgctatcagcggccagcgcgggcgcggccggagaccgtggggcccccggttgccgccccctcgggagccaccatgttggtgataccccccggactgagcgaggaagaggaggctctgcagaagaaattcaacaagctcaagaaaaagaaaaaggcattgctggctctgaagaagcaaagtagcagcagcacaaccagccaaggtggtgtcaaacgctcactatcagagcagcctgtcatggacacagccacagcaacagagcaggcaaagcagctggtgaagtcaggagccatcagtgccatcaaggctgagaccaagaactcaggcttcaagcgttctcgaacccttgaggggaagttaaaggaccccgagaagggaccagtccccactttccagccgttccagaggagcatatctgctgatgatgacctgcaagagtcatccagacgtccccagaggaaatctctgtatgagagctttgtgtcttctagtgatcgacttcgagaactaggaccagatggagaagaggcagagggcccaggggctggtgatggtccccctcgaagctttgactggggctatgaagaacgcagtggtgcccactcctcagcctcccctccccgaagccgcagccgggaccgcagccatgagaggaaccgggacagagaccgagatcgggagcgggatcgagaccgggatcgagacagagacagagagcgggacagggatcgggatcgggatcgagatcgagaccgggaacgggacagggatcgggagcgggatcgagaccgagaccgagagggtcctttccgcaggtcggattcattccctgaacggcgagcccctaggaaagggaatactctctatgtatatggagaagacatgacacccacccttctccgtggggccttctctccttttggaaacatcattgacctctccatggacccacccagaaactgtgccttcgtcacctatgaaaagatggagtcagcagatcaggccgttgctgaggttggaacttcccaaatctgttcttcccatcgcttctgctgttctcatgtgttctcctcaaaatactagatgccaggaagaagttggttcctcttgataaagaaagcctctcccatcgcttctgctgttctcatgtgttctcctcaaaatactagatgccaggaagaagttggttcctcttgataaagaaagcctctccctattcacacagaaaaactcacattctcagattccttattcagtctcctcctaggatagcaactcctggaataacttctttggtttatctgtaatgttttcctccccatcctctgcctcccctcttctgcttcagctcaacgggacccaggtggagtctgtacagctcaaagtcaacatagcccgaaaacagcccatgctggatgccgctactggcaagtctgtctggggctccctcgctgtccagaacagccctaagggttgccaccgggacaagaggacccagattgtctacagtgatgacgtctacaaggaaaaccttgtggatggcttctagggaacagagctggattccttgtgcctcatatgccccaatgctggtctcagtaaaacactgaggtggaagctta

SEQ ID NO: 314234 - DNA, 2028 bp, Homo sapiens
gccccgccgagagcgtgaactatcgctgcggaggggcagacctggaccggtggaaggccgggcggaagtgcgcgcctggggccgccttggttaccgcgttttccgctcctcgctacgtcatcgttgtgagcccgctatcagcggccagcgcgggcgcggccggagaccgtggggcccccggttgccgccccctcgggtaaggccctctgcttctcactcttcggccctttttctcatagccgtttctctgttcttcctctttgcgttgctctgcgggcgctacgctggctccaccgccttctctgccgttcaaaccccgcggttgtccttaccctagcgagggtaggggggtcgggtgccatcgtctttccgacggagtggatatttgtccctccttgaaccacatggtacctaaaggtgctggtgtctgtgatccctggagacaggagggaatgctggatgatcccgaccagcgggagcttggacagcagcctggtttaagcaaggggtagggaaagccaaagacaagagtaggcagacctgaaggggtggggttgggtacagtgtggacggcgtgtgaaccccgggtggtaacagtggagaaagatgtcttgggccctgcccctgaactaggagccaccatgttggtgataccccccggactgagcgaggaagaggaggctctgcagaagaaattcaacaagctcaagaaaaagaaaaaggcattgctggctctgaagaagcaaagtagcagcagcacaaccagccaaggtggtgtcaaacgctcactatcagagcagcctgtcatggacacagccacagcaacagagcaggcaaagcagctggtgaagtcaggagccatcagtgccatcaaggctgagaccaagaactcaggcttcaagcgttctcgaacccttgaggggaagttaaaggaccccgagaagggaccagtccccactttccagccgttccagaggagcatatctgctgatgatgacctgcaagagtcatccagacgtccccagaggaaatctctgtatgagaggttagagagtagagataaggctgggcccatttggtggagttgattgcctgagtccttgggaggtttgggctgtaggagctgggctatagagggaatattgagtctccacagggtctgaggggagaaggtaaaacccccctttgatcttcagtctgcatctccccagctttgctttgtgtcttctagtgatcgacttcgagaactaggaccagatggagaagaggcagagggcccaggggctggtgatggtccccctcgaagctttgactggggctatgaagaacgcagtggtgcccactcctcagcctcccctccccgaagccgcagccgggaccgcagccatgagaggaaccgggacagagaccgagatcgggagcgggatcgagaccgggatcgagacagagacagagagcgggacagggatcgggatcgggatcgagatcgagaccgggaacgggacagggatcgggagcgggatcgagaccgagaccgagagggtcctttccgcaggtcggattcattccctgaacggcgagcccctaggaaagggaatactctctatgtatatggagaagacatgacacccacccttctccgtggggccttctctccttttggaaacatcattgacctctccatggacccacccagaaactgtgccttcgtcacctatgaaaagatggagtcagcagatcaggccgttgctgagctcaacgggacccaggtggagtctgtacagctcaaagtcaacatagcccgaaaacagcccatgctggatgccgctactggcaagtctgtctggggctccctcgctgtccagaacagccctaagggttgccaccgggacaagaggacccagattgtctacagtgatgacgtctacaaggaaaaccttgtggatggcttctagggaacagagctggattccttgtgcctcatatgccccaatgctggtctcagtaaaacactgaggtggaagctta

SEQ ID NO: 314235 - DNA, 1164 bp, Homo sapiens
gccccgccgagagcgtgaactatcgctgcggaggggcagacctggaccggtggaaggccgggcggaagtgcgcgcctggggccgccttggttaccgcgttttccgctcctcgctacgtcatcgttgtgagcccgctatcagcggccagcgcgggcgcggccggagaccgtggggcccccggttgccgccccctcgggagccaccatgttggtgataccccccggactgagcgaggaagaggaggctctgcagaagaaattcaacaagctcaagaaaaagaaaaaggcattgctggctctgaagaagcaaagtagcagcagcacaaccagccaaggtggtgtcaaacgctcactatcagagcagcctgtcatggacacagccacagcaacagagcaggcaaagcagctggtgaagtcaggagccatcagtgccatcaaggctgagaccaagaactcaggcttcaagcgttctcgaacccttgaggggaagttaaaggaccccgagaagggaccagtccccactttccagccgttccagaggagcatatctgctgatgatgacctgcaagagtcatccagacgtccccagaggaaatctctgtatgagagctttgtgtcttctagtgatcgacttcgagaactaggaccagatggagaagaggcagagggcccaggggctggtgatggtccccctcgaagctttgactggggctatgaagaacgcagtggtgcccactcctcagcctcccctccccgaagccgcagccgggaccgcagccatgagaggaaccgggacagagaccgagatcgggagcgggatcgagaccgggatcgagacagtgagtgattttggctggaggtcaaggtgaccttaactgaggtttatgtgggtcctactaagtgaaatgtggcatgggctatgtcttgtgactatgatttgtgctcccaaggtcggattcattccctgaacggcgagcccctaggaaagggaatactctctatgtatatggagaagacatgacacccacccttctccgtggggccttctctccttttggaaacatcattgacctctccatggacccacccagaaagtaaggatgacaacagggcatgatgagaagtcctgggagaatcctggggtgtgagacctgagggaagaagc

SEQ ID NO: 314236 - DNA, 1056 bp, Homo sapiens
tgacatgcctgatcctctcttttctgcagttcaagggaaagacgagatcttgcacaaggcactctgcttctgcccttggctggggaagggtggcatggagcctctccggctgctcatcttactctttgtcacagagctgtccggagcccacaacaccacagtgttccagggcgtggcgggccagtccctgcaggtgtcttgcccctatgactccatgaagcactgggggaggcgcaaggcctggtgccgccagctgggagagaagggcccatgccagcgtgtggtcagcacgcacaacttgtggctgctgtccttcctgaggaggtggaatgggagcacagccatcacagacgataccctgggtggcactctcaccattacgctgcggaatctacaaccccatgatgcgggtctctaccagtgccagagcctccatggcagtgaggctgacaccctcaggaaggtcctggtggaggtgctggcagaccccctggatcaccgggatgctggagatctctggttccccggggagtctgagagcttcgaggatgcccatgtggagcacagcatctccaggagcctcttggaaggagaaatccccttcccacccacttccatccttctcctcctggcctgcatctttctcatcaagattctagcagccagcgccctctgggctgcagcctggcatggacagaagccagggacacatccacccagtgaactggactgtggccatgacccagggtatcagctccaaactctgccagggctgagagacacgtgaaggaagatgatgggaggaaaagcccaggagaagtcccaccagggaccagcccagcctgcatacttgccacttggccaccaggactccttgttctgctctggcaagagactactctgcctgaacactgcttctcctggaccctggaagcagggactggttgagggagtggggaggtggtaagaacacctgacaacttctgaatattggacattttaaacacttacaaataaatccaagactgtcatatttagctggatagttttgggcat

SEQ ID NO: 314237 - DNA, 539 bp, Homo sapiens
caagctttagagatttaccaatatggaggaaaggatattcgggcgcctagggcaaaaaagagcctcttggaaggagaaatccccttcccacccacttccatccttctcctcctggcctgcatctttctcatcaagattctagcagccagcgccctctgggctgcagcctggcatggacagaagccagggacacatccacccagtgaactggactgtggccatgacccagggtatcagctccaaactctgccagggctgagagacacgtgaaggaagatgatgggaggaaaagcccaggagaagtcccaccagggaccagcccagcctgcatacttgccacttggccaccaggactccttgttctgctctggcaagagactactctgcctgaacactgcttctcctggaccctggaagcagggactggttgagggagtggggaggtggtaagaacacctgacaacttctgaatattggacattttaaacacttacaaataaatccaagactgtcatatttagctggatagttttgggcat

SEQ ID NO: 314238 - DNA, 1104 bp, Homo sapiens
tgacatgcctgatcctctcttttctgcagttcaagggaaagacgagatcttgcacaaggcactctgcttctgcccttggctggggaagggtggcatggagcctctccggctgctcatcttactctttgtcacagagctgtccggagcccacaacaccacagtgttccagggcgtggcgggccagtccctgcaggtgtcttgcccctatgactccatgaagcactgggggaggcgcaaggcctggtgccgccagctgggagagaagggcccatgccagcgtgtggtcagcacgcacaacttgtggctgctgtccttcctgaggaggtggaatgggagcacagccatcacagacgataccctgggtggcactctcaccattacgctgcggaatctacaaccccatgatgcgggtctctaccagtgccagagcctccatggcagtgaggctgacaccctcaggaaggtcctggtggaggtgctggcagaccccctggatcaccgggatgctggagatctctggttccccggggagtctgagagcttcgaggatgcccatgtggagcacagcatctccaggccatctcaaggctcccatctgccttcttgtctctccaaggagcctctgagcctcttggaaggagaaatccccttcccacccacttccatccttctcctcctggcctgcatctttctcatcaagattctagcagccagcgccctctgggctgcagcctggcatggacagaagccagggacacatccacccagtgaactggactgtggccatgacccagggtatcagctccaaactctgccagggctgagagacacgtgaaggaagatgatgggaggaaaagcccaggagaagtcccaccagggaccagcccagcctgcatacttgccacttggccaccaggactccttgttctgctctggcaagagactactctgcctgaacactgcttctcctggaccctggaagcagggactggttgagggagtggggaggtggtaagaacacctgacaacttctgaatattggacattttaaacacttacaaataaatccaagactgtcatatttagctggatagttttgggcat

SEQ ID NO: 314239 - DNA, 862 bp, Homo sapiens
tgacatgcctgatcctctcttttctgcagttcaagggaaagacgagatcttgcacaaggcactctgcttctgcccttggctggggaagggtggcatggagcctctccggctgctcatcttactctttgtcacagagctgtccggagcccacaacaccacagtgttccagggcgtggcgggccagtccctgcaggtgtcttgcccctatgactccatgaagcactgggggaggcgcaaggcctggtgccgccagctgggagagaagggcccatgccagcgtgtggtcagcacgcacaacttgtggctgctgtccttcctgaggaggtggaatgggagcacagccatcacagacgataccctgggtggcactctcaccattacgctgcggaatctacaaccccatgatgcgggtctctaccagtgccagagcctccatggcagtgaggctgacaccctcaggaaggtcctggtggaggtgctggcagaccccctggatcaccgggatgctggagatctctggttccccggggagtctgagagcttcgaggatgcccatgtggagcacagcatctccagggctgagagacacgtgaaggaagatgatgggaggaaaagcccaggagaagtcccaccagggaccagcccagcctgcatacttgccacttggccaccaggactccttgttctgctctggcaagagactactctgcctgaacactgcttctcctggaccctggaagcagggactggttgagggagtggggaggtggtaagaacacctgacaacttctgaatattggacattttaaacacttacaaataaatccaagactgtcatatttagctggatagttttgggcat

SEQ ID NO: 314240 - DNA, 467 bp, Homo sapiens
tagcagccagcgccctctgggctgcagcctggcatggacagaagccagggacacatccacccagtgaactggactgtggccatgacccagggtatcagctccaaactctgccaggtgggcttggagagcacagccatcaagggtggactgggcagggatgggaggcggtgccgagaggggccacatgagtccttggactattgcagggctgagagacacgtgaaggaagatgatgggaggaaaagcccaggagaagtcccaccagggaccagcccagcctgcatacttgccacttggccaccaggactccttgttctgctctggcaagagactactctgcctgaacactgcttctcctggaccctggaagcagggactggttgagggagtggggaggtggtaagaacacctgacaacttctgaatattggacattttaaacacttacaaataaatccaagactgtca

SEQ ID NO: 314241 - DNA, 846 bp, Homo sapiens
gactgtccctctgagcagctactgttggacccttttacagatgtatcccccatatctcccgttccctccgccctatggaccccaggggccttaccgataccccactcctgatgggcccaggtgagcaatccaggtctgggtttgtggctgggggcaggggaagcttattgggggaggagatggttttctagccaggaggctcagtctaggatcagtctcgcatgtggttatacaacatgccatatttcattttcttttttgtgtacagccgttttccccgtgtggcgggcccccgaggctcagggccaccaatgcgcttagtagagcctgtgggtcgtccctctattctcaaagaggataatctcaaagagtttgatcagttggatcaggagaatgatgatggttgggcaggtaagtggatattaagggtcaagaatttggatcttgaaaggcaaaacctaatgaggaaaaaaaaatacagggttatgtgggtgaaaggcagacattgaagtgtaggaagaccaggcccaatggctcacatctgtaatcccagtgctttgggagtgttaggtgagaggatcgcttgaagccaggagttcaagaccagcctgggcaacacagcaagaccccccacctctacaaaaaaaaaaaaattttttagttgggtgtggactgtgcatctgtggtcccagctactctggaggttgtggtgggaggatcagttgagcccaggagttggaggtcacagtgagctatgatcgtgccactgaactccatcctgggcaacagagcgagacttttaaaaggaaaaaaaaaaaagagtaggggaggatggatggggaatac

SEQ ID NO: 314242 - DNA, 362 bp, Homo sapiens
gtggattcgaactcctgcaatcatctactctgttcacaccatgacaaccttaattccgatactctccacatttctgtttgaggatttctccaaagccagtggtttcaagggacaaagacctgagacttcgttgcttcaggtacgccaggatctgccatccccttcggatttttattctactcctctgcagcctggtggccaaagtggctttctcccttcaggggctcctgcccagcagatgcttctacccatggtagactcacagctgcctgtggtgaactttggctccctgccgccagcaccacctcctgacgtagacacacgagcatatttcacctccgctaccataatcatcgctagca

SEQ ID NO: 314243 - DNA, 399 bp, Homo sapiens
ggagctagagatgagacgtgagattcctggggtgttcatggagtgtctattgttggactagatcactctgttgtgttttttccgatgcagtggaaccacaactgccctcaaaagagggtcctgaaccaccagaagaggttcctcctcctaccacacccccagttccaaaggtggaacccaagggtgatgggattggtcccacccgccagccccctagtcagggcttgggctaccccaaatatcagaagtcgttgcctcctcgtttccagcggcagcagcaggtgaaatcaagttgtttaccctctaagggctgcttttcttcctggcttcggtccctaattctcttcataagttaccttctgggtccctttgcttctttgtccagttgtctccattgtc

SEQ ID NO: 314244 - DNA, 938 bp, Homo sapiens
gggctcagccgcggagtgagcgagggagacgggaggagccgaacccggcgccatccgccgccatcctcccccgccccaccgccatcccgtcccggggagcccctaggcccgggtcccggatccccgcgcacccggccaggggacagagactgagacacttgctgtctggcccacaggctctggcacgttttgggggaggtgcctgcaggacccaacatactcaatgagcttccagcgcaatgtccgatcgctcggggccgactgccaagggaaaggatggaaagaagtattcctcgctcaacctgtttgatacgtataagggcaagtccttagagatccagaaacccgctgttgcccctcgccatggcctgcagagtctcgggaaagttgccattgcccggcgtatgccacctccaagcagctgttacatttggaaaacatagtaactttattaacatcaaagaaaagctcttgaattcagtgccacgtgtttaagacgaattgaacgagacacacatcgtagggggcgcggtctgctggaagtagaggatttcctccctcacagggggcccccactcatgtgtatgatttggcccaacgccctttgttttggataccaacgagggggtgccgccccataagcgtgggtcggtctacttgtcagaacactgttggccgtcccgcacacgtttctaaaacagcagccttcagtgctgtcggatacaacaacgcgtcttaggaccaaccctggggagacggacaccacattcattcgggggggcgagcaacatacgtcgggcgaaaacctcccccagagggattgttaacgcccccagggggaacaaccagccgacacgtgttttagcgggtgtacaccgcgcctcacattgtggcggctcagcaaggttcgccaccagcaatatttggagagatttacg

SEQ ID NO: 314245 - DNA, 6912 bp, Homo sapiens
cgagccggcccggttcgagctgcaggtactcaggtgcgagctgctaactcaggggcgagctgctaactcaggggcgagctgctaactcaggcgcgagctgccaagggaaaggatggaaagaagtattcctcgctcaacctgtttgatacgtataagggcaagtccttagagatccagaaacccgctgttgcccctcgccatggcctgcagagtctcgggaaagttgccattgcccggcgtatgccacctccagccaaccttccaagcctgaaagccgagaacaaaggcaatgaccccaatgtctcactagtgccaaaagacggaacaggatgggcaagcaaacaggagcagtccgaccccaagagttccgatgcctcaaccgctcagccgccggaatcgcagccactgccggcttcacagacgcctgcctccaaccagccgaaacgacccccagcagcccccgagaacactcctttggttccaagcggggtaaagtcctgggcacaagccagcgtcacccatggagcacatggagatggtggaagggcatcaagcctactgtcacgattctctcgagaggaatttccgaccctgcaggcggctggcgaccaggacaaggctgccaaggaaagggagtctgccgaacagtcgtctgggcccggaccaagcctccgcccccaaaattctacaacttggagggacggaggtgggcgtggccctgatgagctggagggcccggactccaaacttcatcatggtcatgatccccggggtgggctacagccttcaggcccaccccagttccctccctaccgcggaatgatgccgcctttcatgtatcccccatatctcccgttccctccgccctatggaccccaggggccttaccgataccccactcctgatgggcccaggtgagcaatccaggtctgggtttgtggctgggggcaggggaagcttattgggggaggagatggttttctagccaggaggctcagtctaggatcagtctcgcatgtggttatacaacatgccatatttcattttcttttttgtgtacagccgttttccccgtgtggcgggcccccgaggctcagggccaccaatgcgcttagtagagcctgtgggtcgtccctctattctcaaagaggataatctcaaagagtttgatcagttggatcaggagaatgatgatggttgggcaggggcccatgaagaggttgactacactgaaaagctcaagttcagcgatgaggaagatgggcgagactctgatgaggagggagctgagggccacagggattcccaatcagcttctggtgaggaacggccccctgaagcagatggcaaaaagggcaactcccccaacagcgaaccgcccactcctaagacggcctgggcagaaacctctcggcctccagagacagagccgggacctcctgccccaaagcctcccctacccccacctcaccggggccccgccgggaactggggcccccctggggactacccagatcgtgggggtcctccctgcaagcccccagcacctgaagatgaggatgaggcatggcggcagcgacgaaagcagtcgtcatctgagatttccctggcagtggagcgggcccggcgacggcgagaagaagaggagcggcgcatgcaagaagagcgccgggcagcctgtgctgagaagctcaagcgactcgatgaaaagtttggggcacctgacaagcggctcaaagcagagcctgctgccccacctgctgccccttctaccccagctccaccacctgcagtccctaaagaactccctgcacctccagctccacctccagcatcagccccaacaccagagaaagaacctgaagagccagcacaggcccctcctgcccaatctactcctactccaggtgtggctgcggctcccactctgtggaaccacaactgccctcaaaagagggtcctgaaccaccagaagaggttcctcctcctaccacacccccagttccaaaggtggaacccaagggtgatgggattggtcccacccgccagccccctagtcagggcttgggctaccccaaatatcagaagtcgttgcctcctcgtttccagcggcagcagcaggagcagctcctgaagcagcagcagcagcaccagtggcagcagcatcaacagggctctgcccctcctaccccagtgcccccatcaccaccacagcctgtgaccctgggggctgtgccagctccacaggctccacccccgccccccaaggccctgtacccaggtgctctgggccggcccccacccatgcccccaatgaactttgatccccgatggatgatgattcctccttatgtggacccccggctcctccagggtcgtccccctctagacttctaccctcctggtgtgcatccctctggcctagttccccgagagcgttcagacagtgggggctcaagctcagagccatttgaccgtcatgcacctgctatgttacgggaacggggcactccaccggtggatccaaagttggcctgggtaggagatgtcttcaccgccacacccgctgaaccccgcccacttacctcacctctgcgccaggctgcggatgaggatgacaaggggatgaggagcgagactcctccagtacctcccccaccaccctatctggccagttatccaggctttcctgagaatggagcccctgggcccccaatctctcgctttcctctggaggaaccagggccccgtccactcccctggcccccaggcagtgatgaagtggccaagatacaaactccaccacccaagaaggagccccctaaggaggagactgcacagctgacggggccagaagcaggccgaaagcctgcccgcggagtcgggagtggaggccagggccccccaccaccacgcagagagagtcgcacagagacccgctggggccctcgtccagggagcagtcgtcgtggaatccctccagaggagccaggggccccaccccgccgggctgggcctataaagaaacctccaccacctacaaaagtagaagagctgcctcccaagcccctcgaacagggggatgaaacccccaaacccccaaagccagacccactcaagataaccaaggggaagctagggggccccaaggagaccccacccaatggaaatctttcccctgccccaaggcttcggagggactattcgtatgaaagagtgggtcctacctcttgccggggtcggggccgaggcgagtattttgccagagggaggggttttcgggggacctatgggggacgagggcggggagcccgaagccgggaattccgcagttaccgagagtttcgaggagatgatgggcgtggaggtgggacagggggaccaaaccaccctcctgctccccgaggccgcactgccagcgagacacggagcgagggttcagagtatgaggaaatccccaagcggcgccggcagcggggctcagaaacaggcagcgagacccatgagagtgatctggctccttcagacaaggaggctcccacacccaaggagggaacactcacccaggtccctctcgctcccccaccaccaggagccccaccttcaccagccccagcccgcttcactgcccggggtgggcgagtcttcactcccagaggggtgccatctcgccggggccgaggaggagggaggccccctcctcaagtttgcccaggctggagccctccagccaagtctctggctcccaagaaacctcccacaggccctttgccaccaagtaaggagcctttgaaagagaagttgatcccagggcctctgtcccctgtggcgcgcggaggcagcaatggaggtagcaatgtgggcatggaagatggggagcgaccccgaaggaggcgacatgggagggctcagcagcaggataaaccgcctcgtttccggaggctgaagcaggaacgggagaatgccgcaagggggtctgagggcaagccctccctaacccttccagcctccgctcctggacctgaggaggccctcacaacagtcacagtggccccagcacctcgccgggcagctgccaagtctcctgatctgtcaaaccagaactcagaccaagccaatgaggaatgggagactgcatcagagagcagtgacttcaccagtgagcgccgaggggacaaagaggcacccccaccagtactgctgacacccaaggctgtgggaactcctgggggaggtggaggtggagccgtaccaggtatttcagccatgtcccgcggagatctgagccagagagccaaggatttgagtaaacggagcttctcaagtcagcggccaggcatggaacggcagaatcggcgccctggcccagggggcaaggctggcagcagtggcagcagcagtggaggaggcggtgggggtcctggaggaaggaccgggccaggacgaggcgacaagaggagctggccctctcccaagaaccgaagtcgtcctccagaggagcgtcccccggggcttcccctgcctcccccacctcccagcagttctgctgtcttccgcctggaccaagttatccacagcaaccctgctggcatccaacaggctctggcccagcttagtagccgtcaagggagtgtaactgcaccagggggtcatccaaggcacaagcctgggcctccccaagcccctcagggcccctctcctaggcccccaacccgatacgagccccagagggtcaacagcggcctcagttctgacccccactttgaggagccggggccaatggtgagaggggtgggtgggactcctcgggactctgccggggttagtccctttccccctaaacgtcgggagcggcctcccagaaaaccagagctgctacaggaggaatctttgccacctcctcatagctctggattcttgggctctaagcctgagggcccaggccctcaggcagagtccagagatacaggcacagaggccctgacccctcacatctggaaccgtttacatactgccactagccgaaagagttaccggcccagctccatggagccttggatggagcccctgagtccttttgaggatgtggctggcacagaaatgagtcagtctgacagtggggtggacctgagtggggattctcaggtgtcatcaggtccctgcagccagcgaagttcccctgatggaggactcaagggggcagcagagggaccccccaagaggcctggaggctcctcacccctgaatgctgttccttgtgagggtccacctggctctgaacctcctaggagaccaccacctgccccccacgatggggacagaaaggagctgccccgggagcagcctctgccccctggccccattggcacagaacgatcacagcgtacagaccgaggcacagagcctggccccattcggccatcccatcgacctggtcccccagtccagtttggcactagtgacaaggactcagacttacgcctagtggtaggagacagcttgaaagcagagaaggagctaacagcatcagtcactgaggccattcctgtatcacgagactgggagctgcttcccagtgctgctgcctctgctgagccacaatccaagaacctggattctgggcactgtgtcccggagcccagctcctcaggccagcgcctgtatcctgaggttttctatggcagtgctgggccttccagttctcagatctctgggggagccatggactctcaattacatccaaacagtggaggcttccgccctgggacaccctcactgcacccttacagatcacagcccctatacctaccccccggcccagcccctccctcagcactgctctctggggtagctctcaagggccagtttctggatttctccacaatgcaagctacagagctggggaagttgccggctggaggagttctctaccctccaccttccttcctctactctccggctttctgccccagtcctttgcctgacacatcgttgcttcaggtacgccaggatctgccatccccttcggatttttattctactcctctgcagcctggtggccaaagtggctttctcccttcaggggctcctgcccagcagatgcttctacccatggtagactcacagctgcctgtggtgaactttggctccctgccgccagcaccacctcctgccccacctcccctttctctgttacctgtgggccctgctctgcagccccccagcctggctgtgcggcccccacctgctcctgctactcgggtgctgccttcacctgccaggcccttccccgctagcttggggcgagcagagctgcatccagtggaactaaagccgttccaggattatcaaaaactgagcagcaaccttgggggacctggatcatcacggactcccccaactggaaggtccttctctggcctcaattcccgtctcaaggccacgccttccacctacagtggagtcttccgcacccagcgcgtcgacctttaccagcaggcctccccaccagatgccctgcgctggatacctaagccttgggagcggacagggccgccacctcgagaagggccctcccgacgggcagaggagcctgggtcccgaggggacaaggagcctgggttgcccccaccccgctgagggagttcctcttgccccctacccccggggcttgtatatagattataaatatataagggggaaaggggtgggcggggaggggttgtggggctggggcctcacttcccctcctcccccttcccctggtcccctgtccctggggctgtttgttaaaaaagagtaataaaaggatttaaaaaaaaaaacaaacacaacaaaaaaccaaaagccaaacacaaaccacaaaaataaaaaaaccatcaatcccacaaaaaaaacaaacacaaccaatag

SEQ ID NO: 314246 - DNA, 7165 bp, Homo sapiens
cgagccggcccggttcgagctgcaggtactcaggtgcgagctgctaactcaggggcgagctgctaactcaggggcgagctgctaactcaggcgcgagctgccaagggaaaggatggaaagaagtattcctcgctcaacctgtttgatacgtataagggcaagtccttagagatccagaaacccgctgttgcccctcgccatggcctgcagagtctcgggaaagttgccattgcccggcgtatgccacctccagccaaccttccaagcctgaaagccgagaacaaaggcaatgaccccaatgtctcactagtgccaaaagacggaacaggatgggcaagcaaacaggagcagtccgaccccaagagttccgatgcctcaaccgctcagccgccggaatcgcagccactgccggcttcacagacgcctgcctccaaccagccgaaacgacccccagcagcccccgagaacactcctttggttccaagcggggtaaagtcctgggcacaagccagcgtcacccatggagcacatggagatggtggaagggcatcaagcctactgtcacgattctctcgagaggaatttccgaccctgcaggcggctggcgaccaggacaaggctgccaaggaaagggagtctgccgaacagtcgtctgggcccggaccaagcctccgcccccaaaattctacaacttggagggacggaggtgggcgtggccctgatgagctggagggcccggactccaaacttcatcatggtcatgatccccggggtgggctacagccttcaggcccaccccagttccctccctaccgcggaatgatgccgcctttcatgtatcccccatatctcccgttccctccgccctatggaccccaggggccttaccgataccccactcctgatgggcccaggtgagcaatccaggtctgggtttgtggctgggggcaggggaagcttattgggggaggagatggttttctagccaggaggctcagtctaggatcagtctcgcatgtggttatacaacatgccatatttcattttcttttttgtgtacagccgttttccccgtgtggcgggcccccgaggctcagggccaccaatgcgcttagtagagcctgtgggtcgtccctctattctcaaagaggataatctcaaagagtttgatcagttggatcaggagaatgatgatggttgggcaggggcccatgaagaggttgactacactgaaaagctcaagttcagcgatgaggaagatgggcgagactctgatgaggagggagctgagggccacagggattcccaatcagcttctggtgaggaacggccccctgaagcagatggcaaaaagggcaactcccccaacagcgaaccgcccactcctaagacggcctgggcagaaacctctcggcctccagagacagagccgggacctcctgccccaaagcctcccctacccccacctcaccggggccccgccgggaactggggcccccctggggactacccagatcgtgggggtcctccctgcaagcccccagcacctgaagatgaggatgaggcatggcggcagcgacgaaagcagtcgtcatctgagatttccctggcagtggagcgggcccggcgacggcgagaagaagaggagcggcgcatgcaagaagagcgccgggcagcctgtgctgagaagctcaagcgactcgatgaaaagtttggggcacctgacaagcggctcaaagcagagcctgctgccccacctgctgccccttctaccccagctccaccacctgcagtccctaaagaactccctgcacctccagctccacctccagcatcagccccaacaccagagaaagaacctgaagagccagcacaggcccctcctgcccaatctactcctactccaggtgtggctgcggctcccactctggtgagtggtggtggcagtaccagtagcaccagcagtggcagcttcgaagccagcccagtggaaccacaactgccctcaaaagagggtcctgaaccaccagaagaggttcctcctcctaccacacccccagttccaaaggtggaacccaagggtgatgggattggtcccacccgccagccccctagtcagggcttgggctaccccaaatatcagaagtcgttgcctcctcgtttccagcggcagcagcaggagcagctcctgaagcagcagcagcagcaccagtggcagcagcatcaacagggctctgcccctcctaccccagtgcccccatcaccaccacagcctgtgaccctgggggctgtgccagctccacaggctccacccccgccccccaaggccctgtacccaggtgctctgggccggcccccacccatgcccccaatgaactttgatccccgatggatgatgattcctccttatgtggacccccggctcctccagggtcgtccccctctagacttctaccctcctggtgtgcatccctctggcctagttccccgagagcgttcagacagtgggggctcaagctcagagccatttgaccgtcatgcacctgctatgttacgggaacggggcactccaccggtggatccaaagttggcctgggtaggagatgtcttcaccgccacacccgctgaaccccgcccacttacctcacctctgcgccaggctgcggatgaggatgacaaggggatgaggagcgagactcctccagtacctcccccaccaccctatctggccagttatccaggctttcctgagaatggagcccctgggcccccaatctctcgctttcctctggaggaaccagggccccgtccactcccctggcccccaggcagtgatgaagtggccaagatacaaactccaccacccaagaaggagccccctaaggaggagactgcacagctgacggggccagaagcaggccgaaagcctgcccgcggagtcgggagtggaggccagggccccccaccaccacgcagagagagtcgcacagagacccgctggggccctcgtccagggagcagtcgtcgtggaatccctccagaggagccaggggccccaccccgccgggctgggcctataaagaaacctccaccacctacaaaagtagaagagctgcctcccaagcccctcgaacagggggatgaaacccccaaacccccaaagccagacccactcaagataaccaaggggaagctagggggccccaaggagaccccacccaatggaaatctttcccctgccccaaggcttcggagggactattcgtatgaaagagtgggtcctacctcttgccggggtcggggccgaggcgagtattttgccagagggaggggttttcgggggacctatgggggacgagggcggggagcccgaagccgggaattccgcagttaccgagagtttcgaggagatgatgggcgtggaggtgggacagggggaccaaaccaccctcctgctccccgaggccgcactgccagcgagacacggagcgagggttcagagtatgaggaaatccccaagcggcgccggcagcggggctcagaaacaggcagcgagacccatgagagtgatctggctccttcagacaaggaggctcccacacccaaggagggaacactcacccaggtccctctcgctcccccaccaccaggagccccaccttcaccagccccagcccgcttcactgcccggggtgggcgagtcttcactcccagaggggtgccatctcgccggggccgaggaggagggaggccccctcctcaagtttgcccaggctggagccctccagccaagtctctggctcccaagaaacctcccacaggccctttgccaccaagtaaggagcctttgaaagagaagttgatcccagggcctctgtcccctgtggcgcgcggaggcagcaatggaggtagcaatgtgggcatggaagatggggagcgaccccgaaggaggcgacatgggagggctcagcagcaggataaaccgcctcgtttccggaggctgaagcaggaacgggagaatgccgcaagggggtctgagggcaagccctccctaacccttccagcctccgctcctggacctgaggaggccctcacaacagtcacagtggccccagcacctcgccgggcagctgccaagtctcctgatctgtcaaaccagaactcagaccaagccaatgaggaatgggagactgcatcagagagcagtgacttcaccagtgagcgccgaggggacaaagaggcacccccaccagtactgctgacacccaaggctgtgggaactcctgggggaggtggaggtggagccgtaccaggtatttcagccatgtcccgcggagatctgagccagagagccaaggatttgagtaaacggagcttctcaagtcagcggccaggcatggaacggcagaatcggcgccctggcccagggggcaaggctggcagcagtggcagcagcagtggaggaggcggtgggggtcctggaggaaggaccgggccaggacgaggcgacaagaggagctggccctctcccaagaaccgaagtcgtcctccagaggagcgtcccccggggcttcccctgcctcccccacctcccagcagttctgctgtcttccgcctggaccaagttatccacagcaaccctgctggcatccaacaggctctggcccagcttagtagccgtcaagggagtgtaactgcaccagggggtcatccaaggcacaagcctgggcctccccaagcccctcagggcccctctcctaggcccccaacccgatacgagccccagagggtcaacagcggcctcagttctgacccccactttgaggagccggggccaatggtgagaggggtgggtgggactcctcgggactctgccggggttagtccctttccccctaaacgtcgggagcggcctcccagaaaaccagagctgctacaggaggaatctttgccacctcctcatagctctggattcttgggctctaagcctgagggcccaggccctcaggcagagtccagagatacaggcacagaggccctgacccctcacatctggaaccgtttacatactgccactagccgaaagagttaccggcccagctccatggagccttggatggagcccctgagtccttttgaggatgtggctggcacagaagtgagtgagggtgggagggtgtgtctgagctgggacttttttgagcactggtcataccccccacctgctctgggttgagtctggagctgttctctcacttggctgtcccctttctgcagtttgtatgtgtgcatcagtcaggtattggggtgctttctaccctgacttaactagctccttctccactcctctcagatgagtcagtctgacagtggggtggacctgagtggggattctcaggtgtcatcaggtccctgcagccagcgaagttcccctgatggaggactcaagggggcagcagagggaccccccaagaggcctggaggctcctcacccctgaatgctgttccttgtgagggtccacctggctctgaacctcctaggagaccaccacctgccccccacgatggggacagaaaggagctgccccgggagcagcctctgccccctggccccattggcacagaacgatcacagcgtacagaccgaggcacagagcctggccccattcggccatcccatcgacctggtcccccagtccagtttggcactagtgacaaggactcagacttacgcctagtggtaggagacagcttgaaagcagagaaggagctaacagcatcagtcactgaggccattcctgtatcacgagactgggagctgcttcccagtgctgctgcctctgctgagccacaatccaagaacctggattctgggcactgtgtcccggagcccagctcctcaggccagcgcctgtatcctgaggttttctatggcagtgctgggccttccagttctcagatctctgggggagccatggactctcaattacatccaaacagtggaggcttccgccctgggacaccctcactgcacccttacagatcacagcccctatacctaccccccggcccagcccctccctcagcactgctctctggggtagctctcaagggccagtttctggatttctccacaatgcaagctacagagctggggaagttgccggctggaggagttctctaccctccaccttccttcctctactctccggctttctgccccagtcctttgcctgacacatcgttgcttcaggtacgccaggatctgccatccccttcggatttttattctactcctctgcagcctggtggccaaagtggctttctcccttcaggggctcctgcccagcagatgcttctacccatggtagactcacagctgcctgtggtgaactttggctccctgccgccagcaccacctcctgccccacctcccctttctctgttacctgtgggccctgctctgcagccccccagcctggctgtgcggcccccacctgctcctgctactcgggtgctgccttcacctgccaggcccttccccgctagcttggggcgagcagagctgcatccagtggaactaaagccgttccaggattatcaaaaactgagcagcaaccttgggggacctggatcatcacggactcccccaactggaaggtccttctctggcctcaattcccgtctcaaggccacgccttccacctacagtggagtcttccgcacccagcgcgtcgacctttaccagcaggcctccccaccagatgccctgcgctggatacctaagccttgggagcggacagggccgccacctcgagaagggccctcccgacgggcagaggagcctgggtcccgaggggacaaggagcctgggttgcccccaccccgctgagggagttcctcttgccccctacccccggggcttgtatatagattataaatatataagggggaaaggggtgggcggggaggggttgtggggctggggcctcacttcccctcctcccccttcccctggtcccctgtccctggggctgtttgttaaaaaagagtaataaaaggatttaaaaaaaaaaacaaacacaacaaaaaaccaaaagccaaacacaaaccacaaaaataaaaaaaccatcaatcccacaaaaaaaacaaacacaaccaatag

SEQ ID NO: 314247 - DNA, 6925 bp, Homo sapiens
cgagccggcccggttcgagctgcaggtactcaggtgcgagctgctaactcaggggcgagctgctaactcaggggcgagctgctaactcaggcgcgagctgccaagggaaaggatggaaagaagtattcctcgctcaacctgtttgatacgtataagggcaagtccttagagatccagaaacccgctgttgcccctcgccatggcctgcagagtctcgggaaagttgccattgcccggcgtatgccacctccagccaaccttccaagcctgaaagccgagaacaaaggcaatgaccccaatgtctcactagtgccaaaagacggaacaggatgggcaagcaaacaggagcagtccgaccccaagagttccgatgcctcaaccgctcagccgccggaatcgcagccactgccggcttcacagacgcctgcctccaaccagccgaaacgacccccagcagcccccgagaacactcctttggttccaagcggggtaaagtcctgggcacaagccagcgtcacccatggagcacatggagatggtggaagggcatcaagcctactgtcacgattctctcgagaggaatttccgaccctgcaggcggctggcgaccaggacaaggctgccaaggaaagggagtctgccgaacagtcgtctgggcccggaccaagcctccgcccccaaaattctacaacttggagggacggaggtgggcgtggccctgatgagctggagggcccggactccaaacttcatcatggtcatgatccccggggtgggctacagccttcaggcccaccccagttccctccctaccgcggaatgatgccgcctttcatgtatcccccatatctcccgttccctccgccctatggaccccaggggccttaccgataccccactcctgatgggcccaggtgagcaatccaggtctgggtttgtggctgggggcaggggaagcttattgggggaggagatggttttctagccaggaggctcagtctaggatcagtctcgcatgtggttatacaacatgccatatttcattttcttttttgtgtacagccgttttccccgtgtggcgggcccccgaggctcagggccaccaatgcgcttagtagagcctgtgggtcgtccctctattctcaaagaggataatctcaaagagtttgatcagttggatcaggagaatgatgatggttgggcaggggcccatgaagaggttgactacactgaaaagctcaagttcagcgatgaggaagatgggcgagactctgatgaggagggagctgagggccacagggattcccaatcagcttctggtgaggaacggccccctgaagcagatggcaaaaagggcaactcccccaacagcgaaccgcccactcctaagacggcctgggcagaaacctctcggcctccagagacagagccgggacctcctgccccaaagcctcccctacccccacctcaccggggccccgccgggaactggggcccccctggggactacccagatcgtgggggtcctccctgcaagcccccagcacctgaagatgaggatgaggcatggcggcagcgacgaaagcagtcgtcatctgagatttccctggcagtggagcgggcccggcgacggcgagaagaagaggagcggcgcatgcaagaagagcgccgggcagcctgtgctgagaagctcaagcgactcgatgaaaagtttggggcacctgacaagcggctcaaagcagagcctgctgccccacctgctgccccttctaccccagctccaccacctgcagtccctaaagaactccctgcacctccagctccacctccagcatcagccccaacaccagagaaagaacctgaagagccagcacaggcccctcctgcccaatctactcctactccaggtgtggctgcggctcccactctggtgagtggtggtggcagtaccagtagcaccagcagtggcagcttcgaagccagcccagtggaaccacaactgccctcaaaagagggtcctgaaccaccagaagaggttcctcctcctaccacacccccagttccaaaggtggaacccaagggtgatgggattggtcccacccgccagccccctagtcagggcttgggctaccccaaatatcagaagtcgttgcctcctcgtttccagcggcagcagcaggagcagctcctgaagcagcagcagcagcaccagtggcagcagcatcaacagggctctgcccctcctaccccagtgcccccatcaccaccacagcctgtgaccctgggggctgtgccagctccacaggctccacccccgccccccaaggccctgtacccaggtgctctgggccggcccccacccatgcccccaatgaactttgatccccgatggatgatgattcctccttatgtggacccccggctcctccagggtcgtccccctctagacttctaccctcctggtgtgcatccctctggcctagttccccgagagcgttcagacagtgggggctcaagctcagagccatttgaccgtcatgcacctgctatgttacgggaacggggcactccaccggtggatccaaagttggcctgggtaggagatgtcttcaccgccacacccgctgaaccccgcccacttacctcacctctgcgccaggctgcggatgaggatgacaaggggatgaggagcgagactcctccagtacctcccccaccaccctatctggccagttatccaggctttcctgagaatggagcccctgggcccccaatctctcgctttcctctggaggaaccagggccccgtccactcccctggcccccaggcagtgatgaagtggccaagatacaaactccaccacccaagaaggagccccctaaggaggagactgcacagctgacggggccagaagcaggccgaaagcctgcccgcggagtcgggagtggaggccagggccccccaccaccacgcagagagagtcgcacagagacccgctggggccctcgtccagggagcagtcgtcgtggaatccctccagaggagccaggggccccaccccgccgggctgggcctataaagaaacctccaccacctacaaaagtagaagagctgcctcccaagcccctcgaacagggggatgaaacccccaaacccccaaagccagacccactcaagataaccaaggggaagctagggggccccaaggagaccccacccaatggaaatctttcccctgccccaaggcttcggagggactattcgtatgaaagagtgggtcctacctcttgccggggtcggggccgaggcgagtattttgccagagggaggggttttcgggggacctatgggggacgagggcggggagcccgaagccgggaattccgcagttaccgagagtttcgaggagatgatgggcgtggaggtgggacagggggaccaaaccaccctcctgctccccgaggccgcactgccagcgagacacggagcgagggttcagagtatgaggaaatccccaagcggcgccggcagcggggctcagaaacaggcagcgagacccatgagagtgatctggctccttcagacaaggaggctcccacacccaaggagggaacactcacccaggtccctctcgctcccccaccaccaggagccccaccttcaccagccccagcccgcttcactgcccggggtgggcgagtcttcactcccagaggggtgccatctcgccggggccgaggaggagggaggccccctcctcaagtttgcccaggctggagccctccagccaagtctctggctcccaagaaacctcccacaggccctttgccaccaagtaaggagcctttgaaagagaagttgatcccagggcctctgtcccctgtggcgcgcggaggcagcaatggaggtagcaatgtgggcatggaagatggggagcgaccccgaaggaggcgacatgggagggctcagcagcaggataaaccgcctcgtttccggaggctgaagcaggaacgggagaatgccgcaagggggtctgagggcaagccctccctaacccttccagcctccgctcctggacctgaggaggccctcacaacagtcacagtggccccagcacctcgccgggcagctgccaagtctcctgatctgtcaaaccagaactcagaccaagccaatgaggaatgggagactgcatcagagagcagtgacttcaccagtgagcgccgaggggacaaagaggcacccccaccagtactgctgacacccaaggctgtgggaactcctgggggaggtggaggtggagccgtaccaggtatttcagccatgtcccgcggagatctgagccagagagccaaggatttgagtaaacggagcttctcaagtcagcggccaggcatggaacggcagaatcggcgccctggcccagggggcaaggctggcagcagtggcagcagcagtggaggaggcggtgggggtcctggaggaaggaccgggccaggacgaggcgacaagaggagctggccctctcccaagaaccgaagtcgtcctccagaggagcgtcccccggggcttcccctgcctcccccacctcccagcagttctgctgtcttccgcctggaccaagttatccacagcaaccctgctggcatccaacaggctctggcccagcttagtagccgtcaagggagtgtaactgcaccagggggtcatccaaggcacaagcctgggcctccccaagcccctcagggcccctctcctaggcccccaacccgatacgagccccagagggtcaacagcggcctcagttctgacccccactttgaggagccggggccaatggtgagaggggtgggtgggactcctcgggactctgccggggttagtccctttccccctaaacgtcgggagcggcctcccagaaaaccagagctgctacaggaggaatctttgccacctcctcatagctctggattcttgggctctaagcctgagggcccaggccctcaggcagagtccagagatacaggcacagaggccctgacccctcacatctggaaccgtttacatactgccactagccgaaagagttaccggcccagctccatggagccttggatggagcccctgagtccttttgaggatgtggctggcacagaagtgtcatcaggtccctgcagccagcgaagttcccctgatggaggactcaagggggcagcagagggaccccccaagaggcctggaggctcctcacccctgaatgctgttccttgtgagggtccacctggctctgaacctcctaggagaccaccacctgccccccacgatggggacagaaaggagctgccccgggagcagcctctgccccctggccccattggcacagaacgatcacagcgtacagaccgaggcacagagcctggccccattcggccatcccatcgacctggtcccccagtccagtttggcactagtgacaaggactcagacttacgcctagtggtaggagacagcttgaaagcagagaaggagctaacagcatcagtcactgaggccattcctgtatcacgagactgggagctgcttcccagtgctgctgcctctgctgagccacaatccaagaacctggattctgggcactgtgtcccggagcccagctcctcaggccagcgcctgtatcctgaggttttctatggcagtgctgggccttccagttctcagatctctgggggagccatggactctcaattacatccaaacagtggaggcttccgccctgggacaccctcactgcacccttacagatcacagcccctatacctaccccccggcccagcccctccctcagcactgctctctggggtagctctcaagggccagtttctggatttctccacaatgcaagctacagagctggggaagttgccggctggaggagttctctaccctccaccttccttcctctactctccggctttctgccccagtcctttgcctgacacatcgttgcttcaggtacgccaggatctgccatccccttcggatttttattctactcctctgcagcctggtggccaaagtggctttctcccttcaggggctcctgcccagcagatgcttctacccatggtagactcacagctgcctgtggtgaactttggctccctgccgccagcaccacctcctgccccacctcccctttctctgttacctgtgggccctgctctgcagccccccagcctggctgtgcggcccccacctgctcctgctactcgggtgctgccttcacctgccaggcccttccccgctagcttggggcgagcagagctgcatccagtggaactaaagccgttccaggattatcaaaaactgagcagcaaccttgggggacctggatcatcacggactcccccaactggaaggtccttctctggcctcaattcccgtctcaaggccacgccttccacctacagtggagtcttccgcacccagcgcgtcgacctttaccagcaggcctccccaccagatgccctgcgctggatacctaagccttgggagcggacagggccgccacctcgagaagggccctcccgacgggcagaggagcctgggtcccgaggggacaaggagcctgggttgcccccaccccgctgagggagttcctcttgccccctacccccggggcttgtatatagattataaatatataagggggaaaggggtgggcggggaggggttgtggggctggggcctcacttcccctcctcccccttcccctggtcccctgtccctggggctgtttgttaaaaaagagtaataaaaggatttaaaaaaaaaaacaaacacaacaaaaaaccaaaagccaaacacaaaccacaaaaataaaaaaaccatcaatcccacaaaaaaaacaaacacaaccaatag

SEQ ID NO: 314248 - DNA, 7094 bp, Homo sapiens
cgagccggcccggttcgagctgcaggtactcaggtgcgagctgctaactcaggggcgagctgctaactcaggggcgagctgctaactcaggcgcgagctgccaagggaaaggatggaaagaagtattcctcgctcaacctgtttgatacgtataagggcaagtccttagagatccagaaacccgctgttgcccctcgccatggcctgcagagtctcgggaaagttgccattgcccggcgtatgccacctccagccaaccttccaagcctgaaagccgagaacaaaggcaatgaccccaatgtctcactagtgccaaaagacggaacaggatgggcaagcaaacaggagcagtccgaccccaagagttccgatgcctcaaccgctcagccgccggaatcgcagccactgccggcttcacagacgcctgcctccaaccagccgaaacgacccccagcagcccccgagaacactcctttggttccaagcggggtaaagtcctgggcacaagccagcgtcacccatggagcacatggagatggtggaagggcatcaagcctactgtcacgattctctcgagaggaatttccgaccctgcaggcggctggcgaccaggacaaggctgccaaggaaagggagtctgccgaacagtcgtctgggcccggaccaagcctccgcccccaaaattctacaacttggagggacggaggtgggcgtggccctgatgagctggagggcccggactccaaacttcatcatggtcatgatccccggggtgggctacagccttcaggcccaccccagttccctccctaccgcggaatgatgccgcctttcatgtatcccccatatctcccgttccctccgccctatggaccccaggggccttaccgataccccactcctgatgggcccaggtgagcaatccaggtctgggtttgtggctgggggcaggggaagcttattgggggaggagatggttttctagccaggaggctcagtctaggatcagtctcgcatgtggttatacaacatgccatatttcattttcttttttgtgtacagccgttttccccgtgtggcgggcccccgaggctcagggccaccaatgcgcttagtagagcctgtgggtcgtccctctattctcaaagaggataatctcaaagagtttgatcagttggatcaggagaatgatgatggttgggcaggggcccatgaagaggttgactacactgaaaagctcaagttcagcgatgaggaagatgggcgagactctgatgaggagggagctgagggccacagggattcccaatcagcttctggtgaggaacggccccctgaagcagatggcaaaaagggcaactcccccaacagcgaaccgcccactcctaagacggcctgggcagaaacctctcggcctccagagacagagccgggacctcctgccccaaagcctcccctacccccacctcaccggggccccgccgggaactggggcccccctggggactacccagatcgtgggggtcctccctgcaagcccccagcacctgaagatgaggatgaggcatggcggcagcgacgaaagcagtcgtcatctgagatttccctggcagtggagcgggcccggcgacggcgagaagaagaggagcggcgcatgcaagaagagcgccgggcagcctgtgctgagaagctcaagcgactcgatgaaaagtttggggcacctgacaagcggctcaaagcagagcctgctgccccacctgctgccccttctaccccagctccaccacctgcagtccctaaagaactccctgcacctccagctccacctccagcatcagccccaacaccagagaaagaacctgaagagccagcacaggcccctcctgcccaatctactcctactccaggtgtggctgcggctcccactctggtgagtggtggtggcagtaccagtagcaccagcagtggcagcttcgaagccagcccagtggaaccacaactgccctcaaaagagggtcctgaaccaccagaagaggttcctcctcctaccacacccccagttccaaaggtggaacccaagggtgatgggattggtcccacccgccagccccctagtcagggcttgggctaccccaaatatcagaagtcgttgcctcctcgtttccagcggcagcagcaggagcagctcctgaagcagcagcagcagcaccagtggcagcagcatcaacagggctctgcccctcctaccccagtgcccccatcaccaccacagcctgtgaccctgggggctgtgccagctccacaggctccacccccgccccccaaggccctgtacccaggtgctctgggccggcccccacccatgcccccaatgaactttgatccccgatggatgatgattcctccttatgtggacccccggctcctccagggtcgtccccctctagacttctaccctcctggtgtgcatccctctggcctagttccccgagagcgttcagacagtgggggctcaagctcagagccatttgaccgtcatgcacctgctatgttacgggaacggggcactccaccggtggatccaaagttggcctgggtaggagatgtcttcaccgccacacccgctgaaccccgcccacttacctcacctctgcgccaggctgcggatgaggatgacaaggggatgaggagcgagactcctccagtacctcccccaccaccctatctggccagttatccaggctttcctgagaatggagcccctgggcccccaatctctcgctttcctctggaggaaccagggccccgtccactcccctggcccccaggcagtgatgaagtggccaagatacaaactccaccacccaagaaggagccccctaaggaggagactgcacagctgacggggccagaagcaggccgaaagcctgcccgcggagtcgggagtggaggccagggccccccaccaccacgcagagagagtcgcacagagacccgctggggccctcgtccagggagcagtcgtcgtggaatccctccagaggagccaggggccccaccccgccgggctgggcctataaagaaacctccaccacctacaaaagtagaagagctgcctcccaagcccctcgaacagggggatgaaacccccaaacccccaaagccagacccactcaagataaccaaggggaagctagggggccccaaggagaccccacccaatggaaatctttcccctgccccaaggcttcggagggactattcgtatgaaagagtgggtcctacctcttgccggggtcggggccgaggcgagtattttgccagagggaggggttttcgggggacctatgggggacgagggcggggagcccgaagccgggaattccgcagttaccgagagtttcgaggagatgatgggcgtggaggtgggacagggggaccaaaccaccctcctgctccccgaggccgcactgccagcgagacacggagcgagggttcagagtatgaggaaatccccaagcggcgccggcagcggggctcagaaacaggcagcgagacccatgagagtgatctggctccttcagacaaggaggctcccacacccaaggagggaacactcacccaggtccctctcgctcccccaccaccaggagccccaccttcaccagccccagcccgcttcactgcccggggtgggcgagtcttcactcccagaggggtgccatctcgccggggccgaggaggagggaggccccctcctcaagtttgcccaggctggagccctccagccaagtctctggctcccaagaaacctcccacaggccctttgccaccaagtaaggagcctttgaaagagaagttgatcccagggcctctgtcccctgtggcgcgcggaggcagcaatggaggtagcaatgtgggcatggaagatggggagcgaccccgaaggaggcgacatgggagggctcagcagcaggataaaccgcctcgtttccggaggctgaagcaggaacgggagaatgccgcaagggggtctgagggcaagccctccctaacccttccagcctccgctcctggacctgaggaggccctcacaacagtcacagtggccccagcacctcgccgggcagctgccaagtctcctgatctgtcaaaccagaactcagaccaagccaatgaggaatgggagactgcatcagagagcagtgacttcaccagtgagcgccgaggggacaaagaggcacccccaccagtactgctgacacccaaggctgtgggaactcctgggggaggtggaggtggagccgtaccaggtatttcagccatgtcccgcggagatctgagccagagagccaaggatttgagtaaacggagcttctcaagtcagcggccaggcatggaacggcagaatcggcgccctggcccagggggcaaggctggcagcagtggcagcagcagtggaggaggcggtgggggtcctggaggaaggaccgggccaggacgaggcgacaagaggagctggccctctcccaagaaccgaagtcgtcctccagaggagcgtcccccggggcttcccctgcctcccccacctcccagcagttctgctgtcttccgcctggaccaagttatccacagcaaccctgctggcatccaacaggctctggcccagcttagtagccgtcaagggagtgtaactgcaccagggggtcatccaaggcacaagcctgggcctccccaagcccctcagggcccctctcctaggcccccaacccgatacgagccccagagggtcaacagcggcctcagttctgacccccactttgaggagccggggccaatggtgagaggggtgggtgggactcctcgggactctgccggggttagtccctttccccctaaacgtcgggagcggcctcccagaaaaccagagctgctacaggaggaatctttgccacctcctcatagctctggattcttgggctctaagcctgagggcccaggccctcaggcagagtccagagatacaggcacagaggccctgacccctcacatctggaaccgtttacatactgccactagccgaaagagttaccggcccagctccatggagccttggatggagcccctgagtccttttgaggatgtggctggcacagaaatgagtcagtctgacagtggggtggacctgagtggggattctcaggtgtcatcaggtccctgcagccagcgaagttcccctgatggaggactcaagggggcagcagagggaccccccaagaggcctggaggctcctcacccctgaatgctgttccttgtgagggtccacctggctctgaacctcctaggagaccaccacctgccccccacgatggggacagaaaggagctgccccgggagcagcctctgccccctggccccattggcacagaacgatcacagcgtacagaccgaggcacagagcctggccccattcggccatcccatcgacctggtcccccagtccagtttggcactagtgacaaggactcagacttacgcctagtggtaggagacagcttgaaagcagagaaggagctaacagcatcagtcactgaggccattcctgtatcacgagactgggagctgcttcccagtgctgctgcctctgctgagccacaatccaagaacctggattctgggcactgtgtcccggagcccagctcctcaggccagcgcctgtatcctgaggttttctatggcagtgctgggccttccagttctcagatctctgggggagccatggactctcaattacatccaaacagtggaggcttccgccctgggacaccctcactgcacccttacagatcacagcccctatacctaccccccggcccagcccctccctcagcactgctctctggggtagctctcaagggccagtttctggatttctccacaatgcaagctacagagctggggaagttgccggctggaggagttctctaccctccaccttccttcctctactctccggctttctgccccagtcctttgcctgacacatcgttgcttcaggtacgccaggatctgccatccccttcggatttttattctactcctctgcagcctggtggccaaagtggctttctcccttcaggggctcctgcccagcaggtatattgtatcttcacacttccccttcatttgatttctctgtccagttgctggctttgattttccctggttttctgacattcctccctgcccccaacatgcacacccaaatttcttgttacagatgcttctacccatggtagactcacagctgcctgtggtgaactttggctccctgccgccagcaccacctcctgccccacctcccctttctctgttacctgtgggccctgctctgcagccccccagcctggctgtgcggcccccacctgctcctgctactcgggtgctgccttcacctgccaggcccttccccgctagcttggggcgagcagagctgcatccagtggaactaaagccgttccaggattatcaaaaactgagcagcaaccttgggggacctggatcatcacggactcccccaactggaaggtccttctctggcctcaattcccgtctcaaggccacgccttccacctacagtggagtcttccgcacccagcgcgtcgacctttaccagcaggcctccccaccagatgccctgcgctggatacctaagccttgggagcggacagggccgccacctcgagaagggccctcccgacgggcagaggagcctgggtcccgaggggacaaggagcctgggttgcccccaccccgctgagggagttcctcttgccccctacccccggggcttgtatatagattataaatatataagggggaaaggggtgggcggggaggggttgtggggctggggcctcacttcccctcctcccccttcccctggtcccctgtccctggggctgtttgttaaaaaagagtaataaaaggatttaaaaaaaaaaacaaacacaacaaaaaaccaaaagccaaacacaaaccacaaaaataaaaaaaccatcaatcccacaaaaaaaacaaacacaaccaatag

SEQ ID NO: 314249 - DNA, 6740 bp, Homo sapiens
cgagccggcccggttcgagctgcaggtactcaggtgcgagctgctaactcaggggcgagctgctaactcaggggcgagctgctaactcaggcgcgagctgccaagggaaaggatggaaagaagtattcctcgctcaacctgtttgatacgtataagggcaagtccttagagatccagaaacccgctgttgcccctcgccatggcctgcagagtctcgggaaagttgccattgcccggcgtatgccacctccagccaaccttccaagcctgaaagccgagaacaaaggcaatgaccccaatgtctcactagtgccaaaagacggaacaggatgggcaagcaaacaggagcagtccgaccccaagagttccgatgcctcaaccgctcagccgccggaatcgcagccactgccggcttcacagacgcctgcctccaaccagccgaaacgacccccagcagcccccgagaacactcctttggttccaagcggggtaaagtcctgggcacaagccagcgtcacccatggagcacatggagatggtggaagggcatcaagcctactgtcacgattctctcgagaggaatttccgaccctgcaggcggctggcgaccaggacaaggctgccaaggaaagggagtctgccgaacagtcgtctgggcccggaccaagcctccgcccccaaaattctacaacttggagggacggaggtgggcgtggccctgatgagctggagggcccggactccaaacttcatcatggtcatgatccccggggtgggctacagccttcaggcccaccccagttccctccctaccgcggaatgatgccgcctttcatgtatcccccatatctcccgttccctccgccctatggaccccaggggccttaccgataccccactcctgatgggcccaggtgagcaatccaggtctgggtttgtggctgggggcaggggaagcttattgggggaggagatggttttctagccaggaggctcagtctaggatcagtctcgcatgtggttatacaacatgccatatttcattttcttttttgtgtacagccgttttccccgtgtggcgggcccccgaggctcagggccaccaatgcgcttagtagagcctgtgggtcgtccctctattctcaaagaggataatctcaaagagtttgatcagttggatcaggagaatgatgatggttgggcaggggcccatgaagaggttgactacactgaaaagctcaagttcagcgatgaggaagatgggcgagactctgatgaggagggagctgagggccacagggattcccaatcagcttctggtgaggaacggccccctgaagcagatggcaaaaagggcaactcccccaacagcgaaccgcccactcctaagacggcctgggcagaaacctctcggcctccagagacagagccgggacctcctgccccaaagcctcccctacccccacctcaccggggccccgccgggaactggggcccccctggggactacccagatcgtgggggtcctccctgcaagcccccagcacctgaagatgaggatgaggcatggcggcagcgacgaaagcagtcgtcatctgagatttccctggcagtggagcgggcccggcgacggcgagaagaagaggagcggcgcatgcaagaagagcgccgggcagcctgtgctgagaagctcaagcgactcgatgaaaagtttggggcacctgacaagcggctcaaagcagagcctgctgccccacctgctgccccttctaccccagctccaccacctgcagtccctaaagaactccctgcacctccagctccacctccagcatcagccccaacaccagagaaagaacctgaagagccagcacaggcccctcctgcccaatctactcctactccaggtgtggctgcggctcccactctggtgagtggtggtggcagtaccagtagcaccagcagtggcagcttcgaagccagcccagtggaaccacaactgccctcaaaagagggtcctgaaccaccagaagaggttcctcctcctaccacacccccagttccaaaggtggaacccaagggtgatgggattggtcccacccgccagccccctagtcagggcttgggctaccccaaatatcagaagtcgttgcctcctcgtttccagcggcagcagcaggagcagctcctgaagcagcagcagcagcaccagtggcagcagcatcaacagggctctgcccctcctaccccagtgcccccatcaccaccacagcctgtgaccctgggggctgtgccagctccacaggctccacccccgccccccaaggccctgtacccaggtgctctgggccggcccccacccatgcccccaatgaactttgatccccgatggatgatgattcctccttatgtggacccccggctcctccagggtcgtccccctctagacttctaccctcctggtgtgcatccctctggcctagttccccgagagcgttcagacagtgggggctcaagctcagagccatttgaccgtcatgcacctgctatgttacgggaacggggcactccaccggtggatccaaagttggcctgggtaggagatgtcttcaccgccacacccgctgaaccccgcccacttacctcacctctgcgccaggctgcggatgaggatgacaaggggatgaggagcgagactcctccagtacctcccccaccaccctatctggccagttatccaggctttcctgagaatggagcccctgggcccccaatctctcgctttcctctggaggaaccagggccccgtccactcccctggcccccaggcagtgatgaagtggccaagatacaaactccaccacccaagaaggagccccctaaggaggagactgcacagctgacggggccagaagcaggccgaaagcctgcccgcggagtcgggagtggaggccagggccccccaccaccacgcagagagagtcgcacagagacccgctggggccctcgtccagggagcagtcgtcgtggaatccctccagaggagccaggggccccaccccgccgggctgggcctataaagaaacctccaccacctacaaaagtagaagagctgcctcccaagcccctcgaacagggggatgaaacccccaaacccccaaagccagacccactcaagataaccaaggggaagctagggggccccaaggagaccccacccaatggaaatctttcccctgccccaaggcttcggagggactattcgtatgaaagagtgggtcctacctcttgccggggtcggggccgaggcgagtattttgccagagggaggggttttcgggggacctatgggggacgagggcggggagcccgaagccgggaattccgcagttaccgagagtttcgaggagatgatgggcgtggaggtgggacagggggaccaaaccaccctcctgctccccgaggccgcactgccagcgagacacggagcgagggttcagagtatgaggaaatccccaagcggcgccggcagcggggctcagaaacaggcagcgagacccatgagagtgatctggctccttcagacaaggaggctcccacacccaaggagggaacactcacccaggtccctctcgctcccccaccaccaggagccccaccttcaccagccccagcccgcttcactgcccggggtgggcgagtcttcactcccagaggggtgccatctcgccggggccgaggaggagggaggccccctcctcaagtttgcccaggctggagccctccagccaagtctctggctcccaagaaacctcccacaggccctttgccaccaagtaaggagcctttgaaagagaagttgatcccagggcctctgtcccctgtggcgcgcggaggcagcaatggaggtagcaatgtgggcatggaagatggggagcgaccccgaaggaggcgacatgggagggctcagcagcaggataaaccgcctcgtttccggaggctgaagcaggaacgggagaatgccgcaagggggtctgagggcaagccctccctaacccttccagcctccgctcctggacctgaggaggccctcacaacagtcacagtggccccagcacctcgccgggcagctgccaagtctcctgatctgtcaaaccagaactcagaccaagccaatgaggaatgggagactgcatcagagagcagtgacttcaccagtgagcgccgaggggacaaagaggcacccccaccagtactgctgacacccaaggctgtgggaactcctgggggaggtggaggtggagccgtaccaggtatttcagccatgtcccgcggagatctgagccagagagccaaggatttgagtaaacggagcttctcaagtcagcggccaggcatggaacggcagaatcggcgccctggcccagggggcaaggctggcagcagtggcagcagcagtggaggaggcggtgggggtcctggaggaaggaccgggccaggacgaggcgacaagaggagctggccctctcccaagaaccgaagtcgtcctccagaggagcgtcccccggggcttcccctgcctcccccacctcccagcagttctgctgtcttccgcctggaccaagttatccacagcaaccctgctggcatccaacaggctctggcccagcttagtagccgtcaagggagtgtaactgcaccagggggtcatccaaggcacaagcctgggcctccccaagcccctcagggcccctctcctaggcccccaacccgatacgagccccagagggtcaacagcggcctcagttctgacccccactttgaggagccggggccaatggtgagaggggtgggtgggactcctcgggactctgccggggttagtccctttccccctaaacgtcgggagcggcctcccagaaaaccagagctgctacaggaggaatctttgccacctcctcatagctctggattcttgggctctaagcctgagggcccaggccctcaggcagagtccagagatacaggcacagaggccctgacccctcacatctggaggctcctcacccctgaatgctgttccttgtgagggtccacctggctctgaacctcctaggagaccaccacctgccccccacgatggggacagaaaggagctgccccgggagcagcctctgccccctggccccattggcacagaacgatcacagcgtacagaccgaggcacagagcctggccccattcggccatcccatcgacctggtcccccagtccagtttggcactagtgacaaggactcagacttacgcctagtggtaggagacagcttgaaagcagagaaggagctaacagcatcagtcactgaggccattcctgtatcacgagactgggagctgcttcccagtgctgctgcctctgctgagccacaatccaagaacctggattctgggcactgtgtcccggagcccagctcctcaggccagcgcctgtatcctgaggttttctatggcagtgctgggccttccagttctcagatctctgggggagccatggactctcaattacatccaaacagtggaggcttccgccctgggacaccctcactgcacccttacagatcacagcccctatacctaccccccggcccagcccctccctcagcactgctctctggggtagctctcaagggccagtttctggatttctccacaatgcaagctacagagctggggaagttgccggctggaggagttctctaccctccaccttccttcctctactctccggctttctgccccagtcctttgcctgacacatcgttgcttcaggtacgccaggatctgccatccccttcggatttttattctactcctctgcagcctggtggccaaagtggctttctcccttcaggggctcctgcccagcagatgcttctacccatggtagactcacagctgcctgtggtgaactttggctccctgccgccagcaccacctcctgccccacctcccctttctctgttacctgtgggccctgctctgcagccccccagcctggctgtgcggcccccacctgctcctgctactcgggtgctgccttcacctgccaggcccttccccgctagcttggggcgagcagagctgcatccagtggaactaaagccgttccaggattatcaaaaactgagcagcaaccttgggggacctggatcatcacggactcccccaactggaaggtccttctctggcctcaattcccgtctcaaggccacgccttccacctacagtggagtcttccgcacccagcgcgtcgacctttaccagcaggcctccccaccagatgccctgcgctggatacctaagccttgggagcggacagggccgccacctcgagaagggccctcccgacgggcagaggagcctgggtcccgaggggacaaggagcctgggttgcccccaccccgctgagggagttcctcttgccccctacccccggggcttgtatatagattataaatatataagggggaaaggggtgggcggggaggggttgtggggctggggcctcacttcccctcctcccccttcccctggtcccctgtccctggggctgtttgttaaaaaagagtaataaaaggatttaaaaaaaaaaacaaacacaacaaaaaaccaaaagccaaacacaaaccacaaaaataaaaaaaccatcaatcccacaaaaaaaacaaacacaaccaatag

SEQ ID NO: 314250 - DNA, 7187 bp, Homo sapiens
cgagccggcccggttcgagctgcaggtactcaggtgcgagctgctaactcaggggcgagctgctaactcaggggcgagctgctaactcaggcgcgagctgccaagggaaaggatggaaagaagtattcctcgctcaacctgtttgatacgtataagggcaagtccttagagatccagaaacccgctgttgcccctcgccatggcctgcagagtctcgggaaagttgccattgcccggcgtatgccacctccagccaaccttccaagcctgaaagccgagaacaaaggcaatgaccccaatgtctcactagtgccaaaagacggaacaggatgggcaagcaaacaggagcagtccgaccccaagagttccgatgcctcaaccgctcagccgccggaatcgcagccactgccggcttcacagacgcctgcctccaaccagccgaaacgacccccagcagcccccgagaacactcctttggttccaagcggggtaaagtcctgggcacaagccagcgtcacccatggagcacatggagatggtggaagggcatcaagcctactgtcacgattctctcgagaggaatttccgaccctgcaggcggctggcgaccaggacaaggctgccaaggaaagggagtctgccgaacagtcgtctgggcccggaccaagcctccgcccccaaaattctacaacttggagggacggaggtgggcgtggccctgatgagctggagggcccggactccaaacttcatcatggtcatgatccccggggtgggctacagccttcaggcccaccccagttccctccctaccgcggaatgatgccgcctttcatgtatcccccatatctcccgttccctccgccctatggaccccaggggccttaccgataccccactcctgatgggcccaggtgagcaatccaggtctgggtttgtggctgggggcaggggaagcttattgggggaggagatggttttctagccaggaggctcagtctaggatcagtctcgcatgtggttatacaacatgccatatttcattttcttttttgtgtacagccgttttccccgtgtggcgggcccccgaggctcagggccaccaatgcgcttagtagagcctgtgggtcgtccctctattctcaaagaggataatctcaaagagtttgatcagttggatcaggagaatgatgatggttgggcaggggcccatgaagaggttgactacactgaaaagctcaagttcagcgatgaggaagatgggcgagactctgatgaggagggagctgagggccacagggattcccaatcagcttctggtgaggaacggccccctgaagcagatggcaaaaagggcaactcccccaacagcgaaccgcccactcctaagacggcctgggcagaaacctctcggcctccagagacagagccgggacctcctgccccaaagcctcccctacccccacctcaccggggccccgccgggaactggggcccccctggggactacccagatcgtgggggtcctccctgcaagcccccagcacctgaagatgaggatgaggcatggcggcagcgacgaaagcagtcgtcatctgagatttccctggcagtggagcgggcccggcgacggcgagaagaagaggagcggcgcatgcaagaagagcgccgggcagcctgtgctgagaagctcaagcgactcgatgaaaagtttggggcacctgacaagcggctcaaagcagagcctgctgccccacctgctgccccttctaccccagctccaccacctgcagtccctaaagaactccctgcacctccagctccacctccagcatcagccccaacaccagagaaagaacctgaagagccagcacaggcccctcctgcccaatctactcctactccaggtgtggctgcggctcccactctggtgagtggtggtggcagtaccagtagcaccagcagtggcagcttcgaagccagcccagtggaaccacaactgccctcaaaagagggtcctgaaccaccagaagaggttcctcctcctaccacacccccagttccaaaggtggaacccaagggtgatgggattggtcccacccgccagccccctagtcagggcttgggctaccccaaatatcagaagtcgttgcctcctcgtttccagcggcagcagcaggagcagctcctgaagcagcagcagcagcaccagtggcagcagcatcaacagggctctgcccctcctaccccagtgcccccatcaccaccacagcctgtgaccctgggggctgtgccagctccacaggctccacccccgccccccaaggccctgtacccaggtgctctgggccggcccccacccatgcccccaatgaactttgatccccgatggatgatgattcctccttatgtggacccccggctcctccagggtcgtccccctctagacttctaccctcctggtgtgcatccctctggcctagttccccgagagcgttcagacagtgggggctcaagctcagagccatttgaccgtcatgcacctgctatgttacgggaacggggcactccaccggtggatccaaagttggcctgggtaggagatgtcttcaccgccacacccgctgaaccccgcccacttacctcacctctgcgccaggctgcggatgaggatgacaaggggatgaggagcgagactcctccagtacctcccccaccaccctatctggccagttatccaggctttcctgagaatggagcccctgggcccccaatctctcgctttcctctggaggaaccagggccccgtccactcccctggcccccaggcagtgatgaagtggccaagatacaaactccaccacccaagaaggagccccctaaggaggagactgcacagctgacggggccagaagcaggccgaaagcctgcccgcggagtcgggagtggaggccagggccccccaccaccacgcagagagagtcgcacagagacccgctggggccctcgtccagggagcagtcgtcgtggaatccctccagaggagccaggggccccaccccgccgggctgggcctataaagaaacctccaccacctacaaaagtagaagagctgcctcccaagcccctcgaacagggggatgaaacccccaaacccccaaagccagacccactcaagataaccaaggggaagctagggggccccaaggagaccccacccaatggaaatctttcccctgccccaaggcttcggagggactattcgtatgaaagagtgggtcctacctcttgccggggtcggggccgaggcgagtattttgccagagggaggggttttcgggggacctatgggggacgagggcggggagcccgaagccgggaattccgcagttaccgagagtttcgaggagatgatgggcgtggaggtgggacagggggaccaaaccaccctcctgctccccgaggccgcactgccagcgagacacggagcgagggttcagagtatgaggaaatccccaagcggcgccggcagcggggctcagaaacaggcagcgagacccatgagagtgatctggctccttcagacaaggaggctcccacacccaaggagggaacactcacccaggtccctctcgctcccccaccaccaggagccccaccttcaccagccccagcccgcttcactgcccggggtgggcgagtcttcactcccagaggggtgccatctcgccggggccgaggaggagggaggccccctcctcaagtttgcccaggctggagccctccagccaagtctctggctcccaagaaacctcccacaggccctttgccaccaagtaaggagcctttgaaagagaagttgatcccagggcctctgtcccctgtggcgcgcggaggcagcaatggaggtagcaatgtgggcatggaagatggggagcgaccccgaaggaggcgacatgggagggctcagcagcaggataaaccgcctcgtttccggaggctgaagcaggaacgggagaatgccgcaagggggtctgagggcaagccctccctaacccttccagcctccgctcctggacctgaggaggccctcacaacagtcacagtggccccagcacctcgccgggcagctgccaagtctcctgatctgtcaaaccagaactcagaccaagccaatgaggaatgggagactgcatcagagagcagtgacttcaccagtgagcgccgaggggacaaagaggcacccccaccagtactgctgacacccaaggctgtgggaactcctgggggaggtggaggtggagccgtaccaggtatttcagccatgtcccgcggagatctgagccagagagccaaggatttgagtaaacggagcttctcaagtcagcggccaggcatggaacggcagaatcggcgccctggcccagggggcaaggctggcagcagtggcagcagcagtggaggaggcggtgggggtcctggaggaaggaccgggccaggacgaggcgacaagaggagctggccctctcccaagaaccgaagtcgtcctccagaggagcgtcccccggggcttcccctgcctcccccacctcccagcagttctgctgtcttccgcctggaccaagttatccacagcaaccctgctggcatccaacaggctctggcccagcttagtagccgtcaagggagtgtaactgcaccagggggtcatccaaggcacaagcctgggcctccccaagcccctcagggcccctctcctaggcccccaacccgatacgagccccagagggtcaacagcggcctcagttctgacccccactttgaggagccggggccaatggtgagaggggtgggtgggactcctcgggactctgccggggttagtccctttccccctaaacgtcgggagcggcctcccagaaaaccagagctgctacaggaggaatctttgccacctcctcatagctctggattcttgggctctaagcctgagggcccaggccctcaggcagagtccagagatacaggcacagaggccctgacccctcacatctggaaccgtttacatactgccactagccgaaagagttaccggcccagctccatggagccttggatggagcccctgagtccttttgaggatgtggctggcacagaaatgagtcagtctgacagtggggtggacctgagtggggattctcaggtgtcatcaggtccctgcagccagcgaagttcccctgatggaggactcaagggggcagcagagggaccccccaagaggcctggaggctcctcacccctgaatgctgttccttgtgagggtccacctggctctgaacctcctaggagaccaccacctgccccccacgatggggacagaaaggagctgccccgggagcagcctctgccccctggccccattggcacagaacgatcacagcgtacagaccgaggcacagagcctggccccattcggccatcccatcgacctggtcccccagtccagtttggcactagtgacaaggactcagacttacgcctagtggtaggagacagcttgaaagcagagaaggagctaacagcatcagtcactgaggccattcctgtatcacgagactgggagctgcttcccagtgctgctgcctctgctgagccacaatccaagaacctggattctgggcactgtgtcccggagcccagctcctcaggccagcgcctgtatcctgaggttttctatggcagtgctgggccttccagttctcaggtaggccccgcttcccattgcatgaccccttcagtgaataataatttttttctgcctggtatgtatttataatcaagcctttctacgttgcagagttgtgagataccactttgtcacatcatttttctccctactttttgcttctatgggtgggatggtgatcttttttcttgaccacagatactaaagctgtttcaaccgtgctcctctcctgcagatctctgggggagccatggactctcaattacatccaaacagtggaggcttccgccctgggacaccctcactgcacccttacagatcacagcccctatacctaccccccggcccagcccctccctcagcactgctctctggggtagctctcaagggccagtttctggatttctccacaatgcaagctacagagctggggaagttgccggctggaggagttctctaccctccaccttccttcctctactctccggctttctgccccagtcctttgcctgacacatcgttgcttcaggtacgccaggatctgccatccccttcggatttttattctactcctctgcagcctggtggccaaagtggctttctcccttcaggggctcctgcccagcagatgcttctacccatggtagactcacagctgcctgtggtgaactttggctccctgccgccagcaccacctcctgccccacctcccctttctctgttacctgtgggccctgctctgcagccccccagcctggctgtgcggcccccacctgctcctgctactcgggtgctgccttcacctgccaggcccttccccgctagcttggggcgagcagagctgcatccagtggaactaaagccgttccaggattatcaaaaactgagcagcaaccttgggggacctggatcatcacggactcccccaactggaaggtccttctctggcctcaattcccgtctcaaggccacgccttccacctacagtggagtcttccgcacccagcgcgtcgacctttaccagcaggcctccccaccagatgccctgcgctggatacctaagccttgggagcggacagggccgccacctcgagaagggccctcccgacgggcagaggagcctgggtcccgaggggacaaggagcctgggttgcccccaccccgctgagggagttcctcttgccccctacccccggggcttgtatatagattataaatatataagggggaaaggggtgggcggggaggggttgtggggctggggcctcacttcccctcctcccccttcccctggtcccctgtccctggggctgtttgttaaaaaagagtaataaaaggatttaaaaaaaaaaacaaacacaacaaaaaaccaaaagccaaacacaaaccacaaaaataaaaaaaccatcaatcccacaaaaaaaacaaacacaaccaatag

SEQ ID NO: 314251 - DNA, 7091 bp, Homo sapiens
cgagccggcccggttcgagctgcaggtactcaggtgcgagctgctaactcaggggcgagctgctaactcaggggcgagctgctaactcaggcgcgagctgccaagggaaaggatggaaagaagtattcctcgctcaacctgtttgatacgtataagggcaagtccttagagatccagaaacccgctgttgcccctcgccatggcctgcagagtctcgggaaagttgccattgcccggcgtatgccacctccagccaaccttccaagcctgaaagccgagaacaaaggcaatgaccccaatgtctcactagtgccaaaagacggaacaggatgggcaagcaaacaggagcagtccgaccccaagagttccgatgcctcaaccgctcagccgccggaatcgcagccactgccggcttcacagacgcctgcctccaaccagccgaaacgacccccagcagcccccgagaacactcctttggttccaagcggggtaaagtcctgggcacaagccagcgtcacccatggagcacatggagatggtggaagggcatcaagcctactgtcacgattctctcgagaggaatttccgaccctgcaggcggctggcgaccaggacaaggctgccaaggaaagggagtctgccgaacagtcgtctgggcccggaccaagcctccgcccccaaaattctacaacttggagggacggaggtgggcgtggccctgatgagctggagggcccggactccaaacttcatcatggtcatgatccccggggtgggctacagccttcaggcccaccccagttccctccctaccgcggaatgatgccgcctttcatgtatcccccatatctcccgttccctccgccctatggaccccaggggccttaccgataccccactcctgatgggcccaggtgagcaatccaggtctgggtttgtggctgggggcaggggaagcttattgggggaggagatggttttctagccaggaggctcagtctaggatcagtctcgcatgtggttatacaacatgccatatttcattttcttttttgtgtacagccgttttccccgtgtggcgggcccccgaggctcagggccaccaatgcgcttagtagagcctgtgggtcgtccctctattctcaaagaggataatctcaaagagtttgatcagttggatcaggagaatgatgatggttgggcaggggcccatgaagaggttgactacactgaaaagctcaagttcagcgatgaggaagatgggcgagactctgatgaggagggagctgagggccacagggattcccaatcagcttctggtgaggaacggccccctgaagcagatggcaaaaagggcaactcccccaacagcgaaccgcccactcctaagacggcctgggcagaaacctctcggcctccagagacagagccgggacctcctgccccaaagcctcccctacccccacctcaccggggccccgccgggaactggggcccccctggggactacccagatcgtgggggtcctccctgcaagcccccagcacctgaagatgaggatgaggcatggcggcagcgacgaaagcagtcgtcatctgagatttccctggcagtggagcgggcccggcgacggcgagaagaagaggagcggcgcatgcaagaagagcgccgggcagcctgtgctgagaagctcaagcgactcgatgaaaagtttggggcacctgacaagcggctcaaagcagagcctgctgccccacctgctgccccttctaccccagctccaccacctgcagtccctaaagaactccctgcacctccagctccacctccagcatcagccccaacaccagagaaagaacctgaagagccagcacaggcccctcctgcccaatctactcctactccaggtgtggctgcggctcccactctggtgagtggtggtggcagtaccagtagcaccagcagtggcagcttcgaagccagcccagtggaaccacaactgccctcaaaagagggtcctgaaccaccagaagaggttcctcctcctaccacacccccagttccaaaggtggaacccaagggtgatgggattggtcccacccgccagccccctagtcagggcttgggctaccccaaatatcagaagtcgttgcctcctcgtttccagcggcagcagcaggagcagctcctgaagcagcagcagcagcaccagtggcagcagcatcaacagggctctgcccctcctaccccagtgcccccatcaccaccacagcctgtgaccctgggggctgtgccagctccacaggctccacccccgccccccaaggccctgtacccaggtgctctgggccggcccccacccatgcccccaatgaactttgatccccgatggatgatgattcctccttatgtggacccccggctcctccagggtcgtccccctctagacttctaccctcctggtgtgcatccctctggcctagttccccgagagcgttcagacagtgggggctcaagctcagagccatttgaccgtcatgcacctgctatgttacgggaacggggcactccaccggtggatccaaagttggcctgggtaggagatgtcttcaccgccacacccgctgaaccccgcccacttacctcacctctgcgccaggctgcggatgaggatgacaaggggatgaggagcgagactcctccagtacctcccccaccaccctatctggccagttatccaggctttcctgagaatggagcccctgggcccccaatctctcgctttcctctggaggaaccagggccccgtccactcccctggcccccaggcagtgatgaagtggccaagatacaaactccaccacccaagaaggagccccctaaggaggagactgcacagctgacggggccagaagcaggccgaaagcctgcccgcggagtcgggagtggaggccagggccccccaccaccacgcagagagagtcgcacagagacccgctggggccctcgtccagggagcagtcgtcgtggaatccctccagaggagccaggggccccaccccgccgggctgggcctataaagaaacctccaccacctacaaaagtagaagagctgcctcccaagcccctcgaacagggggatgaaacccccaaacccccaaagccagacccactcaagataaccaaggggaagctagggggccccaaggagaccccacccaatggaaatctttcccctgccccaaggcttcggagggactattcgtatgaaagagtgggtcctacctcttgccggggtcggggccgaggcgagtattttgccagagggaggggttttcgggggacctatgggggacgagggcggggagcccgaagccgggaattccgcagttaccgagagtttcgaggagatgatgggcgtggaggtgggacagggggaccaaaccaccctcctgctccccgaggccgcactgccagcgagacacggagcgagggttcagagtatgaggaaatccccaagcggcgccggcagcggggctcagaaacaggcagcgagacccatgagagtgatctggctccttcagacaaggaggctcccacacccaaggagggaacactcacccaggtccctctcgctcccccaccaccaggagccccaccttcaccagccccagcccgcttcactgcccggggtgggcgagtcttcactcccagaggggtgccatctcgccggggccgaggaggagggaggccccctcctcaagtttgcccaggctggagccctccagccaagtctctggctcccaagaaacctcccacaggccctttgccaccaagtaaggagcctttgaaagagaagttgatcccagggcctctgtcccctgtggcgcgcggaggcagcaatggaggtagcaatgtgggcatggaagatggggagcgaccccgaaggaggcgacatgggagggctcagcagcaggataaaccgcctcgtttccggaggctgaagcaggaacgggagaatgccgcaagggggtctgagggcaagccctccctaacccttccagcctccgctcctggacctgaggaggccctcacaacagtcacagtggccccagcacctcgccgggcagctgccaagtctcctgatctgtcaaaccagaactcagaccaagccaatgaggaatgggagactgcatcagagagcagtgacttcaccagtgagcgccgaggggacaaagaggcacccccaccagtactgctgacacccaaggctgtgggaactcctgggggaggtggaggtggagccgtaccaggtatttcagccatgtcccgcggagatctgagccagagagccaaggatttgagtaaacggagcttctcaagtcagcggccaggcatggaacggcagaatcggcgccctggcccagggggcaaggctggcagcagtggcagcagcagtggaggaggcggtgggggtcctggaggaaggaccgggccaggacgaggcgacaagaggagctggccctctcccaagaaccgaagtcgtcctccagaggagcgtcccccggggcttcccctgcctcccccacctcccagcagttctgctgtcttccgcctggaccaagttatccacagcaaccctgctggcatccaacaggctctggcccagcttagtagccgtcaagggagtgtaactgcaccagggggtcatccaaggcacaagcctgggcctccccaagcccctcagggcccctctcctaggcccccaacccgatacgagccccagagggtcaacagcggcctcagttctgacccccactttgaggagccggggccaatggtgagaggggtgggtgggactcctcgggactctgccggggttagtccctttccccctaaacgtcgggagcggcctcccagaaaaccagagctgctacaggaggaatctttgccacctcctcatagctctggattcttgggctctaagcctgagggcccaggccctcaggcagagtccagagatacaggcacagaggccctgacccctcacatctggaaccgtttacatactgccactagccgaaagagttaccggcccagctccatggagccttggatggagcccctgagtccttttgaggatgtggctggcacagaaatgagtcagtctgacagtggggtggacctgagtggggattctcaggtgtcatcaggtccctgcagccagcgaagttcccctgatggaggactcaagggggcagcagagggaccccccaagaggcctggaggctcctcacccctgaatgctgttccttgtgagggtccacctggctctgaacctcctaggagaccaccacctgccccccacgatggggacagaaaggagctgccccgggagcagcctctgccccctggccccattggcacagaacgatcacagcgtacagaccgaggcacagagcctggccccattcggccatcccatcgacctggtcccccagtccagtttggcactagtgacaaggactcagacttacgcctagtggtaggagacagcttgaaagcagagaaggagctaacagcatcagtcactgaggccattcctgtatcacgagactgggagctgcttcccagtgctgctgcctctgctgagccacaatccaagaacctggattctgggcactgtgtcccggagcccagctcctcaggccagcgcctgtatcctgaggttttctatggcagtgctgggccttccagttctcagatctctgggggagccatggactctcaattacatccaaacagtggaggcttccgccctgggacaccctcactgcacccttacagatcacagcccctatacctaccccccggcccagcccctccctcagcactgctctctggggtagctctcaagggccagtttctggatttctccacaatgcaagctacagagctggggaagttgccggctggaggagttctctaccctccaccttccttcctctactctccggctttctgccccagtcctttgcctgacacatcgttgcttcaggtacgccaggatctgccatccccttcggatttttattctactcctctgcagcctggtggccaaagtggctttctcccttcaggggctcctgcccagcagatgcttctacccatggtagactcacagctgcctgtggtgaactttggctccctgccgccagcaccacctcctgccccacctcccctttctctgttacctgtgggccctgctctgcagccccccagcctggctgtgcggcccccacctgctcctgctactcgggtgctgccttcacctgccaggcccttccccgctagcttggggcgagcagagctgcatccagtggaactaaagccgttccaggattatcaaaaactgagcagcaaccttgggggacctggatcatcacggactcccccaactggaaggtccttctctggcctcaattcccgtctcaaggccacgccttccacctacagtggagtcttccgcacccagcgcgtcgacctttaccagcaggtgaaggagaaacccttgtggccccaactctaaattcgagttgccacctgatttcctgtccttccgtctcatcgctgacctctcactgtgactcactgtttaacacatgcctgtcccctaggcctccccaccagatgccctgcgctggatacctaagccttgggagcggacagggccgccacctcgagaagggccctcccgacgggcagaggagcctgggtcccgaggggacaaggagcctgggttgcccccaccccgctgagggagttcctcttgccccctacccccggggcttgtatatagattataaatatataagggggaaaggggtgggcggggaggggttgtggggctggggcctcacttcccctcctcccccttcccctggtcccctgtccctggggctgtttgttaaaaaagagtaataaaaggatttaaaaaaaaaaacaaacacaacaaaaaaccaaaagccaaacacaaaccacaaaaataaaaaaaccatcaatcccacaaaaaaaacaaacacaaccaatag

SEQ ID NO: 314252 - DNA, 7188 bp, Homo sapiens
cgagccggcccggttcgagctgcaggtactcaggtgcgagctgctaactcaggggcgagctgctaactcaggggcgagctgctaactcaggcgcgagctgccaagggaaaggatggaaagaagtattcctcgctcaacctgtttgatacgtataagggcaagtccttagagatccagaaacccgctgttgcccctcgccatggcctgcagagtctcgggaaagttgccattgcccggcgtatgccacctccagccaaccttccaagcctgaaagccgagaacaaaggcaatgaccccaatgtctcactagtgccaaaagacggaacaggatgggcaagcaaacaggagcagtccgaccccaagagttccgatgcctcaaccgctcagccgccggaatcgcagccactgccggcttcacagacgcctgcctccaaccagccgaaacgacccccagcagcccccgagaacactcctttggttccaagcggggtaaagtcctgggcacaagccagcgtcacccatggagcacatggagatggtggaagggcatcaagcctactgtcacgattctctcgagaggaatttccgaccctgcaggcggctggcgaccaggacaaggctgccaaggaaagggagtctgccgaacagtcgtctgggcccggaccaagcctccgcccccaaaattctacaacttggagggacggaggtgggcgtggccctgatgagctggagggcccggactccaaacttcatcatggtcatgatccccggggtgggctacagccttcaggcccaccccagttccctccctaccgcggaatgatgccgcctttcatgtatcccccatatctcccgttccctccgccctatggaccccaggggccttaccgataccccactcctgatgggcccaggtgagcaatccaggtctgggtttgtggctgggggcaggggaagcttattgggggaggagatggttttctagccaggaggctcagtctaggatcagtctcgcatgtggttatacaacatgccatatttcattttcttttttgtgtacagccgttttccccgtgtggcgggcccccgaggctcagggccaccaatgcgcttagtagagcctgtgggtcgtccctctattctcaaagaggataatctcaaagagtttgatcagttggatcaggagaatgatgatggttgggcaggggcccatgaagaggttgactacactgaaaagctcaagttcagcgatgaggaagatgggcgagactctgatgaggagggagctgagggccacagggattcccaatcagcttctggtgaggaacggccccctgaagcagatggcaaaaagggcaactcccccaacagcgaaccgcccactcctaagacggcctgggcagaaacctctcggcctccagagacagagccgggacctcctgccccaaagcctcccctacccccacctcaccggggccccgccgggaactggggcccccctggggactacccagatcgtgggggtcctccctgcaagcccccagcacctgaagatgaggatgaggcatggcggcagcgacgaaagcagtcgtcatctgagatttccctggcagtggagcgggcccggcgacggcgagaagaagaggagcggcgcatgcaagaagagcgccgggcagcctgtgctgagaagctcaagcgactcgatgaaaagtttggggcacctgacaagcggctcaaagcagagcctgctgccccacctgctgccccttctaccccagctccaccacctgcagtccctaaagaactccctgcacctccagctccacctccagcatcagccccaacaccagagaaagaacctgaagagccagcacaggcccctcctgcccaatctactcctactccaggtgtggctgcggctcccactctggtgagtggtggtggcagtaccagtagcaccagcagtggcagcttcgaagccagcccagtggaaccacaactgccctcaaaagagggtcctgaaccaccagaagaggttcctcctcctaccacacccccagttccaaaggtggaacccaagggtgatgggattggtcccacccgccagccccctagtcagggcttgggctaccccaaatatcagaagtcgttgcctcctcgtttccagcggcagcagcaggagcagctcctgaagcagcagcagcagcaccagtggcagcagcatcaacagggctctgcccctcctaccccagtgcccccatcaccaccacagcctgtgaccctgggggctgtgccagctccacaggctccacccccgccccccaaggccctgtacccaggtgctctgggccggcccccacccatgcccccaatgaactttgatccccgatggatgatgattcctccttatgtggacccccggctcctccagggtcgtccccctctagacttctaccctcctggtgtgcatccctctggcctagttccccgagagcgttcagacagtgggggctcaagctcagagccatttgaccgtcatgcacctgctatgttacgggaacggggcactccaccggtggatccaaagttggcctgggtaggagatgtcttcaccgccacacccgctgaaccccgcccacttacctcacctctgcgccaggctgcggatgaggatgacaaggggatgaggagcgagactcctccagtacctcccccaccaccctatctggccagttatccaggctttcctgagaatggagcccctgggcccccaatctctcgctttcctctggaggaaccagggccccgtccactcccctggcccccaggcagtgatgaagtggccaagatacaaactccaccacccaagaaggagccccctaaggaggagactgcacagctgacggggccagaagcaggccgaaagcctgcccgcggagtcgggagtggaggccagggccccccaccaccacgcagagagagtcgcacagagacccgctggggccctcgtccagggagcagtcgtcgtggaatccctccagaggagccaggggccccaccccgccgggctgggcctataaagaaacctccaccacctacaaaagtagaagagctgcctcccaagcccctcgaacagggggatgaaacccccaaacccccaaagccagacccactcaagataaccaaggggaagctagggggccccaaggagaccccacccaatggaaatctttcccctgccccaaggcttcggagggactattcgtatgaaagagtgggtcctacctcttgccggggtcggggccgaggcgagtattttgccagagggaggggttttcgggggacctatgggggacgagggcggggagcccgaagccgggaattccgcagttaccgagagtttcgaggagatgatgggcgtggaggtgggacagggggaccaaaccaccctcctgctccccgaggccgcactgccagcgagacacggagcgagggttcagagtatgaggaaatccccaagcggcgccggcagcggggctcagaaacaggcagcgagacccatgagagtgatctggctccttcagacaaggaggctcccacacccaaggagggaacactcacccaggtccctctcgctcccccaccaccaggagccccaccttcaccagccccagcccgcttcactgcccggggtgggcgagtcttcactcccagaggggtgccatctcgccggggccgaggaggagggaggccccctcctcaagtttgcccaggctggagccctccagccaagtctctggctcccaagaaacctcccacaggccctttgccaccaagtaaggagcctttgaaagagaagttgatcccagggcctctgtcccctgtggcgcgcggaggcagcaatggaggtagcaatgtgggcatggaagatggggagcgaccccgaaggaggcgacatgggagggctcagcagcaggataaaccgcctcgtttccggaggctgaagcaggaacgggagaatgccgcaagggggtctgagggcaagccctccctaacccttccagcctccgctcctggacctgaggaggccctcacaacagtcacagtggccccagcacctcgccgggcagctgccaagtctcctgatctgtcaaaccagaactcagaccaagccaatgaggaatgggagactgcatcagagagcagtgacttcaccagtgagcgccgaggggacaaagaggcacccccaccagtactgctgacacccaaggctgtgggaactcctgggggaggtggaggtggagccgtaccaggtatttcagccatgtcccgcggagatctgagccagagagccaaggatttgagtaaacggagcttctcaagtcagcggccaggcatggaacggcagaatcggcgccctggcccagggggcaaggctggcagcagtggcagcagcagtggaggaggcggtgggggtcctggaggaaggaccgggccaggacgaggcgacaagaggagctggccctctcccaagaaccgaagtcgtcctccagaggagcgtcccccggggcttcccctgcctcccccacctcccagcagttctgctgtcttccgcctggaccaagttatccacagcaaccctgctggcatccaacaggctctggcccagcttagtagccgtcaagggagtgtaactgcaccagggggtcatccaaggcacaagcctgggcctccccaagcccctcagggcccctctcctaggcccccaacccgatacgagccccagagggtcaacagcggcctcagttctgacccccactttgaggagccggggccaatggtgagaggggtgggtgggactcctcgggactctgccggggttagtccctttccccctaaacgtcgggagcggcctcccagaaaaccagagctgctacaggaggaatctttgccacctcctcatagctctggattcttgggctctaagcctgagggcccaggccctcaggcagagtccagagatacaggcacagaggccctgacccctcacatctggaaccgtttacatactgccactagccgaaagagttaccggcccagctccatggagccttggatggagcccctgagtccttttgaggatgtggctggcacagaaatgagtcagtctgacagtggggtggacctgagtggggattctcaggtgtcatcaggtccctgcagccagcgaagttcccctgatggaggactcaagggggcagcagagggaccccccaagaggcctggaggctcctcacccctgaatgctgttccttgtgagggtccacctggctctgaacctcctaggagaccaccacctgccccccacgatggggacagaaaggagctgccccgggagcagcctctgccccctggccccattggcacagaacgatcacagcgtacagaccgaggcacagagcctggccccattcggccatcccatcgacctggtcccccagtccagtttggcactagtgacaaggactcagacttacgcctagtggtaggagacagcttgaaagcagagaaggagctaacagcatcagtcactgaggccattcctgtatcacgagactgggagctgcttcccagtgctgctgcctctgctgagccacaatccaagaacctggattctgggcactgtgtcccggagcccagctcctcaggccagcgcctgtatcctgaggttttctatggcagtgctgggccttccagttctcagatctctgggggagccatggactctcaattacatccaaacagtggaggcttccgccctgggacaccctcactgcacccttacagatcacagcccctatacctaccccccggcccagcccctccctcagcactgctctctggggtagctctcaagggccagtttctggatttctccacaatgcaagctacagagctggggaagttgccggctggaggagttctctaccctccaccttccttcctctactctccggctttctgccccagtcctttgcctgacacatcgttgcttcaggtacgccaggatctgccatccccttcggatttttattctactcctctgcagcctggtggccaaagtggctttctcccttcaggggctcctgcccagcagatgcttctacccatggtagactcacagctgcctgtggtgaactttggctccctgccgccagcaccacctcctgccccacctcccctttctctgttacctgtgggccctgctctgcagccccccagcctggctgtgcggcccccacctgctcctgctactcgggtgctgccttcacctgccaggcccttccccgctagcttggggcgagcagagctgcatccagtggaactaaagccgttccaggattatcaaaaactgagcagcaaccttgggggacctggatcatcacggactcccccaactggaaggtgaaacggaatagggatgtggactttccaagtgcttccttactttggaaccagggtctggatcctaggcttgccttagacgcccttcttcccttaggtccttctctggcctcaattcccgtctcaaggccacgccttccacctacagtggagtcttccgcacccagcgcgtcgacctttaccagcaggtgaaggagaaacccttgtggccccaactctaaattcgagttgccacctgatttcctgtccttccgtctcatcgctgacctctcactgtgactcactgtttaacacatgcctgtcccctaggcctccccaccagatgccctgcgctggatacctaagccttgggagcggacagggccgccacctcgagaagggccctcccgacgggcagaggagcctgggtcccgaggggacaaggagcctgggttgcccccaccccgctgagggagttcctcttgccccctacccccggggcttgtatatagattataaatatataagggggaaaggggtgggcggggaggggttgtggggctggggcctcacttcccctcctcccccttcccctggtcccctgtccctggggctgtttgttaaaaaagagtaataaaaggatttaaaaaaaaaaacaaacacaacaaaaaaccaaaagccaaacacaaaccacaaaaataaaaaaaccatcaatcccacaaaaaaaacaaacacaaccaatag

SEQ ID NO: 314253 - DNA, 6669 bp, Homo sapiens
cgagccggcccggttcgagctgcaggtactcaggtgcgagctgctaactcaggggcgagctgctaactcaggggcgagctgctaactcaggcgcgagctgccaagggaaaggatggaaagaagtattcctcgctcaacctgtttgatacgtataagggcaagtccttagagatccagaaacccgctgttgcccctcgccatggcctgcagagtctcgggaaagttgccattgcccggcgtatgccacctccagccaaccttccaagcctgaaagccgagaacaaaggcaatgaccccaatgtctcactagtgccaaaagacggaacaggatgggcaagcaaacaggagcagtccgaccccaagagttccgatgcctcaaccgctcagccgccggaatcgcagccactgccggcttcacagacgcctgcctccaaccagccgaaacgacccccagcagcccccgagaacactcctttggttccaagcggggtaaagtcctgggcacaagccagcgtcacccatggagcacatggagatggtggaagggcatcaagcctactgtcacgattctctcgagaggaatttccgaccctgcaggcggctggcgaccaggacaaggctgccaaggaaagggagtctgccgaacagtcgtctgggcccggaccaagcctccgcccccaaaattctacaacttggagggacggaggtgggcgtggccctgatgagctggagggcccggactccaaacttcatcatggtcatgatccccggggtgggctacagccttcaggcccaccccagttccctccctaccgcggaatgatgccgcctttcatgtatcccccatatctcccgttccctccgccctatggaccccaggggccttaccgataccccactcctgatgggcccaggtgagcaatccaggtctgggtttgtggctgggggcaggggaagcttattgggggaggagatggttttctagccaggaggctcagtctaggatcagtctcgcatgtggttatacaacatgccatatttcattttcttttttgtgtacagccgttttccccgtgtggcgggcccccgaggctcagggccaccaatgcgcttagtagagcctgtgggtcgtccctctattctcaaagaggataatctcaaagagtttgatcagttggatcaggagaatgatgatggttgggcaggggcccatgaagaggttgactacactgaaaagctcaagttcagcgatgaggaagatgggcgagactctgatgaggagggagctgagggccacagggattcccaatcagcttctggtgaggaacggccccctgaagcagatggcaaaaagggcaactcccccaacagcgaaccgcccactcctaagacggcctgggcagaaacctctcggcctccagagacagagccgggacctcctgccccaaagcctcccctacccccacctcaccggggccccgccgggaactggggcccccctggggactacccagatcgtgggggtcctccctgcaagcccccagcacctgaagatgaggatgaggcatggcggcagcgacgaaagcagtcgtcatctgagatttccctggcagtggagcgggcccggcgacggcgagaagaagaggagcggcgcatgcaagaagagcgccgggcagcctgtgctgagaagctcaagcgactcgatgaaaagtttggggcacctgacaagcggctcaaagcagagcctgctgccccacctgctgccccttctaccccagctccaccacctgcagtccctaaagaactccctgcacctccagctccacctccagcatcagccccaacaccagagaaagaacctgaagagccagcacaggcccctcctgcccaatctactcctactccaggtgtggctgcggctcccactctggtgagtggtggtggcagtaccagtagcaccagcagtggcagcttcgaagccagcccagtggaaccacaactgccctcaaaagagggtcctgaaccaccagaagaggttcctcctcctaccacacccccagttccaaaggtggaacccaagggtgatgggattggtcccacccgccagccccctagtcagggcttgggctaccccaaatatcagaagtcgttgcctcctcgtttccagcggcagcagcaggagcagctcctgaagcagcagcagcagcaccagtggcagcagcatcaacagggctctgcccctcctaccccagtgcccccatcaccaccacagcctgtgaccctgggggctgtgccagctccacaggctccacccccgccccccaaggccctgtacccaggtgctctgggccggcccccacccatgcccccaatgaactttgatccccgatggatgatgattcctccttatgtggacccccggctcctccagggtcgtccccctctagacttctaccctcctggtgtgcatccctctggcctagttccccgagagcgttcagacagtgggggctcaagctcagagccatttgaccgtcatgcacctgctatgttacgggaacggggcactccaccggtggatccaaagttggcctgggtaggagatgtcttcaccgccacacccgctgaaccccgcccacttacctcacctctgcgccaggctgcggatgaggatgacaaggggatgaggagcgagactcctccagtacctcccccaccaccctatctggccagttatccaggctttcctgagaatggagcccctgggcccccaatctctcgctttcctctggaggaaccagggccccgtccactcccctggcccccaggcagtgatgaagtggccaagatacaaactccaccacccaagaaggagccccctaaggaggagactgcacagctgacggggccagaagcaggccgaaagcctgcccgcggagtcgggagtggaggccagggccccccaccaccacgcagagagagtcgcacagagacccgctggggccctcgtccagggagcagtcgtcgtggaatccctccagaggagccaggggccccaccccgccgggctgggcctataaagaaacctccaccacctacaaaagtagaagagctgcctcccaagcccctcgaacagggggatgaaacccccaaacccccaaagccagacccactcaagataaccaaggggaagctagggggccccaaggagaccccacccaatggaaatctttcccctgccccaaggcttcggagggactattcgtatgaaagagtgggtcctacctcttgccggggtcggggccgaggcgagtattttgccagagggaggggttttcgggggacctatgggggacgagggcggggagcccgaagccgggaattccgcagttaccgagagtttcgaggagatgatgggcgtggaggtgggacagggggaccaaaccaccctcctgctccccgaggccgcactgccagcgagacacggagcgagggttcagagtatgaggaaatccccaagcggcgccggcagcggggctcagaaacaggcagcgagacccatgagagtgatctggctccttcagacaaggaggctcccacacccaaggagggaacactcacccaggtccctctcgctcccccaccaccaggagccccaccttcaccagccccagcccgcttcactgcccggggtgggcgagtcttcactcccagaggggtgccatctcgccggggccgaggaggagggaggccccctcctcaagtttgcccaggctggagccctccagccaagtctctggctcccaagaaacctcccacaggccctttgccaccaagtaaggagcctttgaaagagaagttgatcccagggcctctgtcccctgtggcgcgcggaggcagcaatggaggtagcaatgtgggcatggaagatggggagcgaccccgaaggaggcgacatgggagggctcagcagcaggataaaccgcctcgtttccggaggctgaagcaggaacgggagaatgccgcaagggggtctgagggcaagccctccctaacccttccagcctccgctcctggacctgaggaggccctcacaacagtcacagtggccccagcacctcgccgggcagctgccaagtctcctgatctgtcaaaccagaactcagaccaagccaatgaggaatgggagactgcatcagagagcagtgacttcaccagtgagcgccgaggggacaaagaggcacccccaccagtactgctgacacccaaggctgtgggaactcctgggggaggtggaggtggagccgtaccaggtatttcagccatgtcccgcggagatctgagccagagagccaaggatttgagtaaacggagcttctcaagtcagcggccaggcatggaacggcagaatcggcgccctggcccagggggcaaggctggcagcagtggcagcagcagtggaggaggcggtgggggtcctggaggaaggaccgggccaggacgaggcgacaagaggagctggccctctcccaagaaccgaagtcgtcctccagaggagcgtcccccggggcttcccctgcctcccccacctcccagcagttctgctgtcttccgcctggaccaagttatccacagcaaccctgctggcatccaacaggctctggcccagcttagtagccgtcaagggagtgtaactgcaccagggggtcatccaaggcacaagcctgggcctccccaagcccctcagggcccctctcctaggcccccaacccgatacgagccccagagggtcaacagcggcctcagttctgacccccactttgaggagccggggccaatggtgagaggggtgggtgggactcctcgggactctgccggggttagtccctttccccctaaacgtcgggagcggcctcccagaaaaccagagctgctacaggaggaatctttgccacctcctcatagctctggattcttgggctctaagcctgagggcccaggccctcaggcagagtccagagatacaggcacagaggccctgacccctcacatctggaaccgtttacatactgccactagccgaaagagttaccggcccagctccatggagccttggatggagcccctgagtccttttgaggatgtggctggcacagaaatgagtcagtctgacagtggggtggacctgagtggggattctcaggtgtcatcaggtccctgcagccagcgaagttcccctgatggaggactcaagggggcagcagagggaccccccaagaggcctggaggctcctcacccctgaatgctgttccttgtgagggtccacctggctctgaacctcctaggagaccaccacctgccccccacgatggggacagaaaggagctgccccgggagcagcctctgccccctggccccattggcacagaacgatcacagcgtacagaccgaggcacagagcctggccccattcggccatcccatcgacctggtcccccagtccagtttggcactagtgacaaggactcagacttacgcctagtggtaggagacagcttgaaagcagagaaggagctaacagcatcagtcactgaggccattcctgtatcacgagactgggagctgcttcccagtgctgctgcctctgctgagccacaatccaagaacctggattctgggcactgtgtcccggagcccagctcctcaggccagcgcctgtatcctgaggttttctatggcagtgctgggccttccagttctcagatctctgggggagccatggactctcaattacatccaaacagtggaggcttccgccctgggacaccctcactgcacccttacagatcacagcccctatacctaccccccggcccagcccctccctcagcactgctctctggggtagctctcaagggccagtttctggatttctccacaatgcaagctacagagctggggaagttgccggctggaggagttctctaccctccaccttccttcctctactctccggctttctgccccaacctgccaggcccttccccgctagcttggggcgagcagagctgcatccagtggaactaaagccgttccaggattatcaaaaactgagcagcaaccttgggggacctggatcatcacggactcccccaactggaaggtccttctctggcctcaattcccgtctcaaggccacgccttccacctacagtggagtcttccgcacccagcgcgtcgacctttaccagcaggcctccccaccagatgccctgcgctggatacctaagccttgggagcggacagggccgccacctcgagaagggccctcccgacgggcagaggagcctgggtcccgaggggacaaggagcctgggttgcccccaccccgctgagggagttcctcttgccccctacccccggggcttgtatatagattataaatatataagggggaaaggggtgggcggggaggggttgtggggctggggcctcacttcccctcctcccccttcccctggtcccctgtccctggggctgtttgttaaaaaagagtaataaaaggatttaaaaaaaaaaacaaacacaacaaaaaaccaaaagccaaacacaaaccacaaaaataaaaaaaccatcaatcccacaaaaaaaacaaacacaaccaatag

SEQ ID NO: 314254 - DNA, 5901 bp, Homo sapiens
cgagccggcccggttcgagctgcaggtactcaggtgcgagctgctaactcaggggcgagctgctaactcaggggcgagctgctaactcaggcgcgagctgccaagggaaaggatggaaagaagtattcctcgctcaacctgtttgatacgtataagggcaagtccttagagatccagaaacccgctgttgcccctcgccatggcctgcagagtctcgggaaagttgccattgcccggcgtatgccacctccagccaaccttccaagcctgaaagccgagaacaaaggcaatgaccccaatgtctcactagtgccaaaagacggaacaggatgggcaagcaaacaggagcagtccgaccccaagagttccgatgcctcaaccgctcagccgccggaatcgcagccactgccggcttcacagacgcctgcctccaaccagccgaaacgacccccagcagcccccgagaacactcctttggttccaagcggggtaaagtcctgggcacaagccagcgtcacccatggagcacatggagatggtggaagggcatcaagcctactgtcacgattctctcgagaggaatttccgaccctgcaggcggctggcgaccaggacaaggctgccaaggaaagggagtctgccgaacagtcgtctgggcccggaccaagcctccgcccccaaaattctacaacttggagggacggaggtgggcgtggccctgatgagctggagggcccggactccaaacttcatcatggtcatgatccccggggtgggctacagccttcaggcccaccccagttccctccctaccgcggaatgatgccgcctttcatgtatcccccatatctcccgttccctccgccctatggaccccaggggccttaccgataccccactcctgatgggcccaggtgagcaatccaggtctgggtttgtggctgggggcaggggaagcttattgggggaggagatggttttctagccaggaggctcagtctaggatcagtctcgcatgtggttatacaacatgccatatttcattttcttttttgtgtacagccgttttccccgtgtggcgggcccccgaggctcagggccaccaatgcgcttagtagagcctgtgggtcgtccctctattctcaaagaggataatctcaaagagtttgatcagttggatcaggagaatgatgatggttgggcaggggcccatgaagaggttgactacactgaaaagctcaagttcagcgatgaggaagatgggcgagactctgatgaggagggagctgagggccacagggattcccaatcagcttctggtgaggaacggccccctgaagcagatggcaaaaagggcaactcccccaacagcgaaccgcccactcctaagacggcctgggcagaaacctctcggcctccagagacagagccgggacctcctgccccaaagcctcccctacccccacctcaccggggccccgccgggaactggggcccccctggggactacccagatcgtgggggtcctccctgcaagcccccagcacctgaagatgaggatgaggcatggcggcagcgacgaaagcagtcgtcatctgagatttccctggcagtggagcgggcccggcgacggcgagaagaagaggagcggcgcatgcaagaagagcgccgggcagcctgtgctgagaagctcaagcgactcgatgaaaagtttggggcacctgacaagcggctcaaagcagagcctgctgccccacctgctgccccttctaccccagctccaccacctgcagtccctaaagaactccctgcacctccagctccacctccagcatcagccccaacaccagagaaagaacctgaagagccagcacaggcccctcctgcccaatctactcctactccaggtgtggctgcggctcccactctggtgagtggtggtggcagtaccagtagcaccagcagtggcagcttcgaagccagcccagtggaaccacaactgccctcaaaagagggtcctgaaccaccagaagaggttcctcctcctaccacacccccagttccaaaggtggaacccaagggtgatgggattggtcccacccgccagccccctagtcagggcttgggctaccccaaatatcagaagtcgttgcctcctcgtttccagcggcagcagcaggagcagctcctgaagcagcagcagcagcaccagtggcagcagcatcaacagggctctgcccctcctaccccagtgcccccatcaccaccacagcctgtgaccctgggggctgtgccagctccacaggctccacccccgccccccaaggccctgtacccaggtgctctgggccggcccccacccatgcccccaatgaactttgatccccgatggatgatgattcctccttatgtggacccccggctcctccagggtcgtccccctctagacttctaccctcctggtgtgcatccctctggcctagttccccgagagcgttcagacagtgggggctcaagctcagagccatttgaccgtcatgcacctgctatgttacgggaacggggcactccaccggtggatccaaagttggcctgggtaggagatgtcttcaccgccacacccgctgaaccccgcccacttacctcacctctgcgccaggctgcggatgaggatgacaaggggatgaggagcgagactcctccagtacctcccccaccaccctatctggccagttatccaggctttcctgagaatggagcccctgggcccccaatctctcgctttcctctggaggaaccagggccccgtccactcccctggcccccaggcagtgatgaagtggccaagatacaaactccaccacccaagaaggagccccctaaggaggagactgcacagctgacggggccagaagcaggccgaaagcctgcccgcggagtcgggagtggaggccagggccccccaccaccacgcagagagagtcgcacagagacccgctggggccctcgtccagggagcagtcgtcgtggaatccctccagaggagccaggggccccaccccgccgggctgggcctataaagaaacctccaccacctacaaaagtagaagagctgcctcccaagcccctcgaacagggggatgaaacccccaaacccccaaagccagacccactcaagataaccaaggggaagctagggggccccaaggagaccccacccaatggaaatctttcccctgccccaaggcttcggagggactattcgtatgaaagagtgggtcctacctcttgccggggtcggggccgaggcgagtattttgccagagggaggggttttcgggggacctatgggggacgagggcggggagcccgaagccgggaattccgcagttaccgagagtttcgaggagatgatgggcgtggaggtgggacagggggaccaaaccaccctcctgctccccgaggccgcactgccagcgagacacggagcgagggttcagagtatgaggaaatccccaagcggcgccggcagcggggctcagaaacaggcagcgagacccatgagagtgatctggctccttcagacaaggaggctcccacacccaaggagggaacactcacccaggtccctctcgctcccccaccaccaggagccccaccttcaccagccccagcccgcttcactgcccggggtgggcgagtcttcactcccagaggggtgccatctcgccggggccgaggaggagggaggccccctcctcaagtttgcccaggctggagccctccagccaagtctctggctcccaagaaacctcccacaggccctttgccaccaagtaaggagcctttgaaagagaagttgatcccagggcctctgtcccctgtggcgcgcggaggcagcaatggaggtagcaatgtgggcatggaagatggggagcgaccccgaaggaggcgacatgggagggctcagcagcaggataaaccgcctcgtttccggaggctgaagcaggaacgggagaatgccgcaagggggtctgagggcaagccctccctaacccttccagcctccgctcctggacctgaggaggccctcacaacagtcacagtggccccagcacctcgccgggcagctgccaagtctcctgatctgtcaaaccagaactcagaccaagccaatgaggaatgggagactgcatcagagagcagtgacttcaccagtgagcgccgaggggacaaagaggcacccccaccagtactgctgacacccaaggctgtgggaactcctgggggaggtggaggtggagccgtaccaggtatttcagccatgtcccgcggagatctgagccagagagccaaggatttgagtaaacggagcttctcaagtcagcggccaggcatggaacggcagaatcggcgccctggcccagggggcaaggctggcagcagtggcagcagcagtggaggaggcggtgggggtcctggaggaaggaccgggccaggacgaggcgacaagaggagctggccctctcccaagaaccgaagtcgtcctccagaggagcgtcccccggggcttcccctgcctcccccacctcccagcagttctgctgtcttccgcctggaccaagttatccacagcaaccctgctggcatccaacaggctctggcccagcttagtagccgtcaagggagtgtaactgcaccagggggtcatccaaggcacaagcctgggcctccccaagcccctcagggcccctctcctaggcccccaacccgatacgagccccagagggtcaacagcggcctcagttctgacccccactttgaggagccggggccaatggtgagaggggtgggtgggactcctcgggactctgccggggttagtccctttccccctaaacgtcgggagcggcctcccagaaaaccagagctgctacaggaggaatctttgccacctcctcatagctctggattcttgggctctaagcctgagggcccaggccctcaggcagagtccagagatacaggcacagaggccctgacccctcacatctggaaccgtttacatactgccactagccgaaagagttaccggcccagctccatggagccttggatggagcccctgagtccttttgaggatgtggctggcacagaaatgagtcagtctgacagtggggtggacctgagtggggattctcaggtgtcatcaggtccctgcagccagcgaagttcccctgatggaggactcaagggggcagcagagggaccccccaagaggcctggaggctcctcacccctgaatgctgttccttgtgagggtccacctggctctgaacctcctaggagaccaccacctgccccccacgatggggacagaaaggagctgccccgggagcagcctctgccccctggccccattggcacagaacgatcacagcgtacagaccgaggcacagagcctggccccattcggccatcccatcgacctggtcccccagtccagtttggcactagtgacaaggactcagacttacgcctagtggtaggagacagcttgaaagcagagaaggagctaacagcatcagtcactgaggccattcctgtatcacgagactgggagctgcttcccagtgctgctgcctctgctgagccacaatccaagaacctggattctgggcactgtgtcccggagcccagctcctcaggccagcgcctgtatcctgaggttttctatggcagtgctgggccttccagttctcagatctctgggggagccatggactctcaattacatccaaacagtggaggcttccgccctgggacaccctcactgcacccttacagatcacagccccaccgccgctgcccagccagccagtgcattaaagatttaaaccg

SEQ ID NO: 314255 - DNA, 6217 bp, Homo sapiens
cgagccggcccggttcgagctgcaggtactcaggtgcgagctgctaactcaggggcgagctgctaactcaggggcgagctgctaactcaggcgcgagctgccaagggaaaggatggaaagaagtattcctcgctcaacctgtttgatacgtataagggcaagtccttagagatccagaaacccgctgttgcccctcgccatggcctgcagagtctcgggaaagttgccattgcccggcgtatgccacctccagccaaccttccaagcctgaaagccgagaacaaaggcaatgaccccaatgtctcactagtgccaaaagacggaacaggatgggcaagcaaacaggagcagtccgaccccaagagttccgatgcctcaaccgctcagccgccggaatcgcagccactgccggcttcacagacgcctgcctccaaccagccgaaacgacccccagcagcccccgagaacactcctttggttccaagcggggtaaagtcctgggcacaagccagcgtcacccatggagcacatggagatggtggaagggcatcaagcctactgtcacgattctctcgagaggaatttccgaccctgcaggcggctggcgaccaggacaaggctgccaaggaaagggagtctgccgaacagtcgtctgggcccggaccaagcctccgcccccaaaattctacaacttggagggacggaggtgggcgtggccctgatgagctggagggcccggactccaaacttcatcatggtcatgatccccggggtgggctacagccttcaggcccaccccagttccctccctaccgcggaatgatgccgcctttcatgtatcccccatatctcccgttccctccgccctatggaccccaggggccttaccgataccccactcctgatgggcccaggtgagcaatccaggtctgggtttgtggctgggggcaggggaagcttattgggggaggagatggttttctagccaggaggctcagtctaggatcagtctcgcatgtggttatacaacatgccatatttcattttcttttttgtgtacagccgttttccccgtgtggcgggcccccgaggctcagggccaccaatgcgcttagtagagcctgtgggtcgtccctctattctcaaagaggataatctcaaagagtttgatcagttggatcaggagaatgatgatggttgggcaggggcccatgaagaggttgactacactgaaaagctcaagttcagcgatgaggaagatgggcgagactctgatgaggagggagctgagggccacagggattcccaatcagcttctggtgaggaacggccccctgaagcagatggcaaaaagggcaactcccccaacagcgaaccgcccactcctaagacggcctgggcagaaacctctcggcctccagagacagagccgggacctcctgccccaaagcctcccctacccccacctcaccggggccccgccgggaactggggcccccctggggactacccagatcgtgggggtcctccctgcaagcccccagcacctgaagatgaggatgaggcatggcggcagcgacgaaagcagtcgtcatctgagatttccctggcagtggagcgggcccggcgacggcgagaagaagaggagcggcgcatgcaagaagagcgccgggcagcctgtgctgagaagctcaagcgactcgatgaaaagtttggggcacctgacaagcggctcaaagcagagcctgctgccccacctgctgccccttctaccccagctccaccacctgcagtccctaaagaactccctgcacctccagctccacctccagcatcagccccaacaccagagaaagaacctgaagagccagcacaggcccctcctgcccaatctactcctactccaggtgtggctgcggctcccactctggtgagtggtggtggcagtaccagtagcaccagcagtggcagcttcgaagccagcccagtggaaccacaactgccctcaaaagagggtcctgaaccaccagaagaggttcctcctcctaccacacccccagttccaaaggtggaacccaagggtgatgggattggtcccacccgccagccccctagtcagggcttgggctaccccaaatatcagaagtcgttgcctcctcgtttccagcggcagcagcaggagcagctcctgaagcagcagcagcagcaccagtggcagcagcatcaacagggctctgcccctcctaccccagtgcccccatcaccaccacagcctgtgaccctgggggctgtgccagctccacaggctccacccccgccccccaaggccctgtacccaggtgctctgggccggcccccacccatgcccccaatgaactttgatccccgatggatgatgattcctccttatgtggacccccggctcctccagggtcgtccccctctagacttctaccctcctggtgtgcatccctctggcctagttccccgagagcgttcagacagtgggggctcaagctcagagccatttgaccgtcatgcacctgctatgttacgggaacggggcactccaccggtggatccaaagttggcctgggtaggagatgtcttcaccgccacacccgctgaaccccgcccacttacctcacctctgcgccaggctgcggatgaggatgacaaggggatgaggagcgagactcctccagtacctcccccaccaccctatctggccagttatccaggctttcctgagaatggagcccctgggcccccaatctctcgctttcctctggaggaaccagggccccgtccactcccctggcccccaggcagtgatgaagtggccaagatacaaactccaccacccaagaaggagccccctaaggaggagactgcacagctgacggggccagaagcaggccgaaagcctgcccgcggagtcgggagtggaggccagggccccccaccaccacgcagagagagtcgcacagagacccgctggggccctcgtccagggagcagtcgtcgtggaatccctccagaggagccaggggccccaccccgccgggctgggcctataaagaaacctccaccacctacaaaagtagaagagctgcctcccaagcccctcgaacagggggatgaaacccccaaacccccaaagccagacccactcaagataaccaaggggaagctagggggccccaaggagaccccacccaatggaaatctttcccctgccccaaggcttcggagggactattcgtatgaaagagtgggtcctacctcttgccggggtcggggccgaggcgagtattttgccagagggaggggttttcgggggacctatgggggacgagggcggggagcccgaagccgggaattccgcagttaccgagagtttcgaggagatgatgggcgtggaggtgggacagggggaccaaaccaccctcctgctccccgaggccgcactgccagcgagacacggagcgagggttcagagtatgaggaaatccccaagcggcgccggcagcggggctcagaaacaggcagcgagacccatgagagtgatctggctccttcagacaaggaggctcccacacccaaggagggaacactcacccaggtccctctcgctcccccaccaccaggagccccaccttcaccagccccagcccgcttcactgcccggggtgggcgagtcttcactcccagaggggtgccatctcgccggggccgaggaggagggaggccccctcctcaagtttgcccaggctggagccctccagccaagtctctggctcccaagaaacctcccacaggccctttgccaccaagtaaggagcctttgaaagagaagttgatcccagggcctctgtcccctgtggcgcgcggaggcagcaatggaggtagcaatgtgggcatggaagatggggagcgaccccgaaggaggcgacatgggagggctcagcagcaggataaaccgcctcgtttccggaggctgaagcaggaacgggagaatgccgcaagggggtctgagggcaagccctccctaacccttccagcctccgctcctggacctgaggaggccctcacaacagtcacagtggccccagcacctcgccgggcagctgccaagtctcctgatctgtcaaaccagaactcagaccaagccaatgaggaatgggagactgcatcagagagcagtgacttcaccagtgagcgccgaggggacaaagaggcacccccaccagtactgctgacacccaaggctgtgggaactcctgggggaggtggaggtggagccgtaccaggtatttcagccatgtcccgcggagatctgagccagagagccaaggatttgagtaaacggagcttctcaagtcagcggccaggcatggaacggcagaatcggcgccctggcccagggggcaaggctggcagcagtggcagcagcagtggaggaggcggtgggggtcctggaggaaggaccgggccaggacgaggcgacaagaggagctggccctctcccaagaaccgaagtcgtcctccagaggagcgtcccccggggcttcccctgcctcccccacctcccagcagttctgctgtcttccgcctggaccaagttatccacagcaaccctgctggcatccaacaggctctggcccagcttagtagccgtcaagggagtgtaactgcaccagggggtcatccaaggcacaagcctgggcctccccaagcccctcagggcccctctcctaggcccccaacccgatacgagccccagagggtcaacagcggcctcagttctgacccccactttgaggagccggggccaatggtgagaggggtgggtgggactcctcgggactctgccggggttagtccctttccccctaaacgtcgggagcggcctcccagaaaaccagagctgctacaggaggaatctttgccacctcctcatagctctggattcttgggctctaagcctgagggcccaggccctcaggcagagtccagagatacaggcacagaggccctgacccctcacatctggaaccgtttacatactgccactagccgaaagagttaccggcccagctccatggagccttggatggagcccctgagtccttttgaggatgtggctggcacagaaatgagtcagtctgacagtggggtggacctgagtggggattctcaggtgtcatcaggtccctgcagccagcgaagttcccctgatggaggactcaagggggcagcagagggaccccccaagaggcctggaggctcctcacccctgaatgctgttccttgtgagggtccacctggctctgaacctcctaggagaccaccacctgccccccacgatggggacagaaaggagctgccccgggagcagcctctgccccctggccccattggcacagaacgatcacagcgtacagaccgaggcacagagcctggccccattcggccatcccatcgacctggtcccccagtccagtttggcactagtgacaaggactcagacttacgcctagtggtaggagacagcttgaaagcagagaaggagctaacagcatcagtcactgaggccattcctgtatcacgagactgggagctgcttcccagtgctgctgcctctgctgagccacaatccaagaacctggattctgggcactgtgtcccggagcccagctcctcaggccagcgcctgtatcctgaggttttctatggcagtgctgggccttccagttctcagatctctgggggagccatggactctcaattacatccaaacagtggaggcttccgccctgggacaccctcactgcacccttacagatcacagccttctaccccgccgccctcctcgcctgctctcggtagctctcaggcgtctggtctcccatgcgctacgagctgggagttgcggtgggggtctctactcccctcctctctctccggtttgcccgtcttgcctgcctcgtgttcggtcgccggtctgcatcccctcggatttatctactctcgcgctggggcaagggttctcctcgggctcctgcagcgatgtctacctggtgactccgtgctggggacttggtcctgcgcagacactctgcccctccttttctgtactgtggctgtctggccccgctgtggggccactgtctgtatcggtgtgctcactgcggcctccgtgtgggggggtgtc

SEQ ID NO: 314256 - DNA, 1181 bp, Homo sapiens
aatgcagcctgctgagggaggggctgggccctgggacaccctcactgcacccttacagatcacagcccctatacctaccccccggcccagcccctccctcagcactgctctctggggtagctctcaagggccagtttctggatttctccacaatgcaagctacagagctggggaagttgccggctggaggagttctctaccctccaccttccttcctctactctccggctttctgccccagtcctttgcctgacacatcgttgcttcaggtacgccaggatctgccatccccttcggatttttattctactcctctgcagcctggtggccaaagtggctttctcccttcaggggctcctgcccagcagatgcttctacccatggtagactcacagctgcctgtggtgaactttggctccctgccgccagcaccacctcctgccccacctcccctttctctgttacctgtgggccctgctctgcagccccccagcctggctgtgcggcccccacctgctcctgctactcgggtgctgccttcacctgccaggcccttccccgctagcttggggcgagcagagctgcatccagtggaactaaagccgttccaggattatcaaaaactgagcagcaaccttgggggacctggatcatcacggactcccccaactggaaggtccttctctggcctcaattcccgtctcaaggccacgccttccacctacagtggagtcttccgcacccagcgcgtcgacctttaccagcaggcctccccaccagatgccctgcgctggatacctaagccttgggagcggacagggccgccacctcgagaagggccctcccgacgggcagaggagcctgggtcccgaggggacaaggagcctgggttgcccccaccccgctgagggagttcctcttgccccctacccccggggcttgtatatagattataaatatataagggggaaaggggtgggcggggaggggttgtggggctggggcctcacttcccctcctcccccttcccctggtcccctgtccctggggctgtttgttaaaaaagagtaataaaaggatttaaaaaaaaaaacaaacacaacaaaaaaccaaaagccaaacacaaaccacaaaaataaaaaaaccatcaatcccacaaaaaaaacaaacacaaccaatag

SEQ ID NO: 314257 - DNA, 5336 bp, Homo sapiens
cgagccggcccggttcgagctgcaggtactcaggtgcgagctgctaactcaggggcgagctgctaactcaggggcgagctgctaactcaggcgcgagctgccaagggaaaggatggaaagaagtattcctcgctcaacctgtttgatacgtataagggcaagtccttagagatccagaaacccgctgttgcccctcgccatggcctgcagagtctcgggaaagttgccattgcccggcgtatgccacctccagccaaccttccaagcctgaaagccgagaacaaaggcaatgaccccaatgtctcactagtgccaaaagacggaacaggatgggcaagcaaacaggagcagtccgaccccaagagttccgatgcctcaaccgctcagccgccggaatcgcagccactgccggcttcacagacgcctgcctccaaccagccgaaacgacccccagcagcccccgagaacactcctttggttccaagcggggtaaagtcctgggcacaagccagcgtcacccatggagcacatggagatggtggaagggcatcaagcctactgtcacgattctctcgagaggaatttccgaccctgcaggcggctggcgaccaggacaaggctgccaaggaaagggagtctgccgaacagtcgtctgggcccggaccaagcctccgcccccaaaattctacaacttggagggacggaggtgggcgtggccctgatgagctggagggcccggactccaaacttcatcatggtcatgatccccggggtgggctacagccttcaggcccaccccagttccctccctaccgcggaatgatgccgcctttcatgtatcccccatatctcccgttccctccgccctatggaccccaggggccttaccgataccccactcctgatgggcccaggtgagcaatccaggtctgggtttgtggctgggggcaggggaagcttattgggggaggagatggttttctagccaggaggctcagtctaggatcagtctcgcatgtggttatacaacatgccatatttcattttcttttttgtgtacagccgttttccccgtgtggcgggcccccgaggctcagggccaccaatgcgcttagtagagcctgtgggtcgtccctctattctcaaagaggataatctcaaagagtttgatcagttggatcaggagaatgatgatggttgggcaggggcccatgaagaggttgactacactgaaaagctcaagttcagcgatgaggaagatgggcgagactctgatgaggagggagctgagggccacagggattcccaatcagcttctggtgaggaacggccccctgaagcagatggcaaaaagggcaactcccccaacagcgaaccgcccactcctaagacggcctgggcagaaacctctcggcctccagagacagagccgggacctcctgccccaaagcctcccctacccccacctcaccggggccccgccgggaactggggcccccctggggactacccagatcgtgggggtcctccctgcaagcccccagcacctgaagatgaggatgaggcatggcggcagcgacgaaagcagtcgtcatctgagatttccctggcagtggagcgggcccggcgacggcgagaagaagaggagcggcgcatgcaagaagagcgccgggcagcctgtgctgagaagctcaagcgactcgatgaaaagtttggggcacctgacaagcggctcaaagcagagcctgctgccccacctgctgccccttctaccccagctccaccacctgcagtccctaaagaactccctgcacctccagctccacctccagcatcagccccaacaccagagaaagaacctgaagagccagcacaggcccctcctgcccaatctactcctactccaggtgtggctgcggctcccactctggtgagtggtggtggcagtaccagtagcaccagcagtggcagcttcgaagccagcccagtggaaccacaactgccctcaaaagagggtcctgaaccaccagaagaggttcctcctcctaccacacccccagttccaaaggtggaacccaagggtgatgggattggtcccacccgccagccccctagtcagggcttgggctaccccaaatatcagaagtcgttgcctcctcgtttccagcggcagcagcaggagcagctcctgaagcagcagcagcagcaccagtggcagcagcatcaacagggctctgcccctcctaccccagtgcccccatcaccaccacagcctgtgaccctgggggctgtgccagctccacaggctccacccccgccccccaaggccctgtacccaggtgctctgggccggcccccacccatgcccccaatgaactttgatccccgatggatgatgattcctccttatgtggacccccggctcctccagggtcgtccccctctagacttctaccctcctggtgtgcatccctctggcctagttccccgagagcgttcagacagtgggggctcaagctcagagccatttgaccgtcatgcacctgctatgttacgggaacggggcactccaccggtggatccaaagttggcctgggtaggagatgtcttcaccgccacacccgctgaaccccgcccacttacctcacctctgcgccaggctgcggatgaggatgacaaggggatgaggagcgagactcctccagtacctcccccaccaccctatctggccagttatccaggctttcctgagaatggagcccctgggcccccaatctctcgctttcctctggaggaaccagggccccgtccactcccctggcccccaggcagtgatgaagtggccaagatacaaactccaccacccaagaaggagccccctaaggaggagactgcacagctgacggggccagaagcaggccgaaagcctgcccgcggagtcgggagtggaggccagggccccccaccaccacgcagagagagtcgcacagagacccgctggggccctcgtccagggagcagtcgtcgtggaatccctccagaggagccaggggccccaccccgccgggctgggcctataaagaaacctccaccacctacaaaagtagaagagctgcctcccaagcccctcgaacagggggatgaaacccccaaacccccaaagccagacccactcaagataaccaaggggaagctagggggccccaaggagaccccacccaatggaaatctttcccctgccccaaggcttcggagggactattcgtatgaaagagtgggtcctacctcttgccggggtcggggccgaggcgagtattttgccagagggaggggttttcgggggacctatgggggacgagggcggggagcccgaagccgggaattccgcagttaccgagagtttcgaggagatgatgggcgtggaggtgggacagggggaccaaaccaccctcctgctccccgaggccgcactgccagcgagacacggagcgagggttcagagtatgaggaaatccccaagcggcgccggcagcggggctcagaaacaggcagcgagacccatgagagtgatctggctccttcagacaaggaggctcccacacccaaggagggaacactcacccaggtccctctcgctcccccaccaccaggagccccaccttcaccagccccagcccgcttcactgcccggggtgggcgagtcttcactcccagaggggtgccatctcgccggggccgaggaggagggaggccccctcctcaagtttgcccaggctggagccctccagccaagtctctggctcccaagaaacctcccacaggccctttgccaccaagtaaggagcctttgaaagagaagttgatcccagggcctctgtcccctgtggcgcgcggaggcagcaatggaggtagcaatgtgggcatggaagatggggagcgaccccgaaggaggcgacatgggagggctcagcagcaggataaaccgcctcgtttccggaggctgaagcaggaacgggagaatgccgcaagggggtctgagggcaagccctccctaacccttccagcctccgctcctggacctgaggaggccctcacaacagtcacagtggccccagcacctcgccgggcagctgccaagtctcctgatctgtcaaaccagaactcagaccaagccaatgaggaatgggagactgcatcagagagcagtgacttcaccagtgagcgccgaggggacaaagaggcacccccaccagtactgctgacacccaaggctgtgggaactcctgggggaggtggaggtggagccgtaccaggtatttcagccatgtcccgcggagatctgagccagagagccaaggatttgagtaaacggagcttctcaagtcagcggccaggcatggaacggcagaatcggcgccctggcccagggggcaaggctggcagcagtggcagcagcagtggaggaggcggtgggggtcctggaggaaggaccgggccaggacgaggcgacaagaggagctggccctctcccaagaaccgaagtcgtcctccagaggagcgtcccccggggcttcccctgcctcccccacctcccagcagttctgctgtcttccgcctggaccaagttatccacagcaaccctgctggcatccaacaggctctggcccagcttagtagccgtcaagggagtgtaactgcaccagggggtcatccaaggcacaagcctgggcctccccaagcccctcagggcccctctcctaggcccccaacccgatacgagccccagagggtcaacagcggcctcagttctgacccccactttgaggagccggggccaatggtgagaggggtgggtgggactcctcgggactctgccggggttagtccctttccccctaaacgtcgggagcggcctcccagaaaaccagagctgctacaggaggaatctttgccacctcctcatagctctggattcttgggctctaagcctgagggcccaggccctcaggcagagtccagagatacaggcacagaggccctgacccctcacatctggaaccgtttacatactgccactagccgaaagagttaccggcccagctccatggagccttggatggagcccctgagtccttttgaggatgtggctggcacagaaatgagtcagtctgacagtggggtggacctgagtggggattctcaggtgtcatcaggtccctgcagccagcgaagttcccctgatggaggactcaagggggcagcagagggaccccccaagaggcaccctctccaactctgtgcttcacgctccacacatgcccagctgtttcactaac

SEQ ID NO: 314258 - DNA, 892 bp, Homo sapiens
  misc_feature (39)..(41): n is a, c, g, or t
agatccgcacaccttacggctaggtacgaggctgggtgnnncaaagtggctttctcccttcagggctcctgcccagcagatgcttctacccatggtagactcacagctgcctgtggtgaactttggctccctgccgccagcaccacctcctgccccacctcccctttctctgttacctgtgggccctgctctgcagccccccagcctggctgtgcggcccccacctgctcctgctactcgggtgctgccttcacctgccaggcccttccccgctagcttggggcgagcagagctgcatccagtggaactaaagccgttccaggattatcaaaaactgagcagcaaccttgggggacctggatcatcacggactcccccaactggaaggtccttctctggcctcaattcccgtctcaaggccacgccttccacctacagtggagtcttccgcacccagcgcgtcgacctttaccagcaggcctccccaccagatgccctgcgctggatacctaagccttgggagcggacagggccgccacctcgagaagggccctcccgacgggcagaggagcctgggtcccgaggggacaaggagcctgggttgcccccaccccgctgagggagttcctcttgccccctacccccggggcttgtatatagattataaatatataagggggaaaggggtgggcggggaggggttgtggggctggggcctcacttcccctcctcccccttcccctggtcccctgtccctggggctgtttgttaaaaaagagtaataaaaggatttaaaaaaaaaaacaaacacaacaaaaaaccaaaagccaaacacaaaccacaaaaataaaaaaaccatcaatcccacaaaaaaaacaaacacaaccaatag

SEQ ID NO: 314259 - DNA, 2962 bp, Homo sapiens
cgagccggcccggttcgagctgcaggtactcaggtgcgagctgctaactcaggggcgagctgctaactcaggggcgagctgctaactcaggcgcgagctgccaagggaaaggatggaaagaagtattcctcgctcaacctgtttgatacgtataagggcaagtccttagagatccagaaacccgctgttgcccctcgccatggcctgcagagtctcgggaaagttgccattgcccggcgtatgccacctccagccaaccttccaagcctgaaagccgagaacaaaggcaatgaccccaatgtctcactagtgccaaaagacggaacaggatgggcaagcaaacaggagcagtccgaccccaagagttccgatgcctcaaccgctcagccgccggaatcgcagccactgccggcttcacagacgcctgcctccaaccagccgaaacgacccccagcagcccccgagaacactcctttggttccaagcggggtaaagtcctgggcacaagccagcgtcacccatggagcacatggagatggtggaagggcatcaagcctactgtcacgattctctcgagaggaatttccgaccctgcaggcggctggcgaccaggacaaggctgccaaggaaagggagtctgccgaacagtcgtctgggcccggaccaagcctccgcccccaaaattctacaacttggagggacggaggtgggcgtggccctgatgagctggagggcccggactccaaacttcatcatggtcatgatccccggggtgggctacagccttcaggcccaccccagttccctccctaccgcggaatgatgccgcctttcatgtatcccccatatctcccgttccctccgccctatggaccccaggggccttaccgataccccactcctgatgggcccaggtgagcaatccaggtctgggtttgtggctgggggcaggggaagcttattgggggaggagatggttttctagccaggaggctcagtctaggatcagtctcgcatgtggttatacaacatgccatatttcattttcttttttgtgtacagccgttttccccgtgtggcgggcccccgaggctcagggccaccaatgcgcttagtagagcctgtgggtcgtccctctattctcaaagaggataatctcaaagagtttgatcagttggatcaggagaatgatgatggttgggcaggggcccatgaagaggttgactacactgaaaagctcaagttcagcgatgaggaagatgggcgagactctgatgaggagggagctgagggccacagggattcccaatcagcttctggtgaggaacggccccctgaagcagatggcaaaaagggcaactcccccaacagcgaaccgcccactcctaagacggcctgggcagaaacctctcggcctccagagacagagccgggacctcctgccccaaagcctcccctacccccacctcaccggggccccgccgggaactggggcccccctggggactacccagatcgtgggggtcctccctgcaagcccccagcacctgaagatgaggatgaggcatggcggcagcgacgaaagcagtcgtcatctgagatttccctggcagtggagcgggcccggcgacggcgagaagaagaggagcggcgcatgcaagaagagcgccgggcagcctgtgctgagaagctcaagcgactcgatgaaaagtttggggcacctgacaagcggctcaaagcagagcctgctgccccacctgctgccccttctaccccagctccaccacctgcagtccctaaagaactccctgcacctccagctccacctccagcatcagccccaacaccagagaaagaacctgaagagccagcacaggcccctcctgcccaatctactcctactccaggtgtggctgcggctcccactctggtgagtggtggtggcagtaccagtagcaccagcagtggcagcttcgaagccagcccagtggaaccacaactgccctcaaaagagggtcctgaaccaccagaagaggttcctcctcctaccacacccccagttccaaaggtggaacccaagggtgatgggattggtcccacccgccagccccctagtcagggcttgggctaccccaaatatcagaagtcgttgcctcctcgtttccagcggcagcagcaggagcagctcctgaagcagcagcagcagcaccagtggcagcagcatcaacagggctctgcccctcctaccccagtgcccccatcaccaccacagcctgtgaccctgggggctgtgccagctccacaggctccacccccgccccccaaggccctgtacccaggtgctctgggccggcccccacccatgcccccaatgaactttgatccccgatggatgatgattcctccttatgtggacccccggctcctccagggtcgtccccctctagacttctaccctcctggtgtgcatccctctggcctagttccccgagagcgttcagacagtgggggctcaagctcagagccatttgaccgtcatgcacctgctatgttacgggaacggggcactccaccggtggatccaaagttggcctgggtaggagatgtcttcaccgccacacccgctgaaccccgcccacttacctcacctctgcgccaggctgcggatgaggatgacaaggggatgaggtgagtcttggtcatgagaaatgggtgagttcacagtgaaaggatctaggcctgggagaaaggtactttgggttagtggtagggatagggatgaacgggaaaggagaggctggatggagtggctcatgcctgtaatcccagcattttgggaggctgaggcaagacgttcgttcgtgctttcctgctttcctccctcccccgcccctgttttttttttcttccttccctccttccttcctttaaaaaaaaaaaagaatcataccatcgtgcttta

SEQ ID NO: 314260 - DNA, 2297 bp, Homo sapiens
cgagccggcccggttcgagctgcaggtactcaggtgcgagctgctaactcaggggcgagctgctaactcaggggcgagctgctaactcaggcgcgagctgccaagggaaaggatggaaagaagtattcctcgctcaacctgtttgatacgtataagggcaagtccttagagatccagaaacccgctgttgcccctcgccatggcctgcagagtctcgggaaagttgccattgcccggcgtatgccacctccagccaaccttccaagcctgaaagccgagaacaaaggcaatgaccccaatgtctcactagtgccaaaagacggaacaggatgggcaagcaaacaggagcagtccgaccccaagagttccgatgcctcaaccgctcagccgccggaatcgcagccactgccggcttcacagacgcctgcctccaaccagccgaaacgacccccagcagcccccgagaacactcctttggttccaagcggggtaaagtcctgggcacaagccagcgtcacccatggagcacatggagatggtggaagggcatcaagcctactgtcacgattctctcgagaggaatttccgaccctgcaggcggctggcgaccaggacaaggctgccaaggaaagggagtctgccgaacagtcgtctgggcccggaccaagcctccgcccccaaaattctacaacttggagggacggaggtgggcgtggccctgatgagctggagggcccggactccaaacttcatcatggtcatgatccccggggtgggctacagccttcaggcccaccccagttccctccctaccgcggaatgatgccgcctttcatgtatcccccatatctcccgttccctccgccctatggaccccaggggccttaccgataccccactcctgatgggcccaggtgagcaatccaggtctgggtttgtggctgggggcaggggaagcttattgggggaggagatggttttctagccaggaggctcagtctaggatcagtctcgcatgtggttatacaacatgccatatttcattttcttttttgtgtacagccgttttccccgtgtggcgggcccccgaggctcagggccaccaatgcgcttagtagagcctgtgggtcgtccctctattctcaaagaggataatctcaaagagtttgatcagttggatcaggagaatgatgatggttgggcaggggcccatgaagaggttgactacactgaaaagctcaagttcagcgatgaggaagatgggcgagactctgatgaggagggagctgagggccacagggattcccaatcagcttctggtgaggaacggccccctgaagcagatggcaaaaagggcaactcccccaacagcgaaccgcccactcctaagacggcctgggcagaaacctctcggcctccagagacagagccgggacctcctgccccaaagcctcccctacccccacctcaccggggccccgccgggaactggggcccccctggggactacccagatcgtgggggtcctccctgcaagcccccagcacctgaagatgaggatgaggcatggcggcagcgacgaaagcagtcgtcatctgagatttccctggcagtggagcgggcccggcgacggcgagaagaagaggagcggcgcatgcaagaagagcgccgggcagcctgtgctgagaagctcaagcgactcgatgaaaagtttggggcacctgacaagcggctcaaagcagagcctgctgccccacctgctgccccttctaccccagctccaccacctgcagtccctaaagaactccctgcacctccagctccacctccagcatcagccccaacaccagagaaagaacctgaagagccagcacaggcccctcctgcccaatctactcctactccaggtgtggctgcggctcccactctggtgagtggtggtggcagtaccagtagcaccagcagtggcagcttcgaagccagcccagtggaaccacaactgccctcaaaagagggtcctgaaccaccagaagaggttcctcctcctaccacacccccagttccaaaggtggaacccaagggtgatgggattggtcccacccgccagccccctagtcagggcttgggctaccccaaatatcagaagtcgttgcctcctcgtttccagcggcagcagcaggtgaaatcaagttgtttaccctctaagggctgcttttcttcctggcttcggtccctaattctcttcataagttaccttctgggtccctttgcttctttgtccagttgtctccattgtc

SEQ ID NO: 314261 - DNA, 1640 bp, Homo sapiens
cgagccggcccggttcgagctgcaggtactcaggtgcgagctgctaactcaggggcgagctgctaactcaggggcgagctgctaactcaggcgcgagctgccaagggaaaggatggaaagaagtattcctcgctcaacctgtttgatacgtataagggcaagtccttagagatccagaaacccgctgttgcccctcgccatggcctgcagagtctcgggaaagttgccattgcccggcgtatgccacctccagccaaccttccaagcctgaaagccgagaacaaaggcaatgaccccaatgtctcactagtgccaaaagacggaacaggatgggcaagcaaacaggagcagtccgaccccaagagttccgatgcctcaaccgctcagccgccggaatcgcagccactgccggcttcacagacgcctgcctccaaccagccgaaacgacccccagcagcccccgagaacactcctttggttccaagcggggtaaagtcctgggcacaagccagcgtcacccatggagcacatggagatggtggaagggcatcaagcctactgtcacgattctctcgagaggaatttccgaccctgcaggcggctggcgaccaggacaaggctgccaaggaaagggagtctgccgaacagtcgtctgggcccggaccaagcctccgcccccaaaattctacaacttggagggacggaggtgggcgtggccctgatgagctggagggcccggactccaaacttcatcatggtcatgatccccggggtgggctacagccttcaggcccaccccagttccctccctaccgcggaatgatgccgcctttcatgtatcccccatatctcccgttccctccgccctatggaccccaggggccttaccgataccccactcctgatgggcccaggtgagcaatccaggtctgggtttgtggctgggggcaggggaagcttattgggggaggagatggttttctagccaggaggctcagtctaggatcagtctcgcatgtggttatacaacatgccatatttcattttcttttttgtgtacagccgttttccccgtgtggcgggcccccgaggctcagggccaccaatgcgcttagtagagcctgtgggtcgtccctctattctcaaagaggataatctcaaagagtttgatcagttggatcaggagaatgatgatggttgggcaggtaagtggatattaagggtcaagaatttggatcttgaaaggcaaaacctaatgaggaaaaaaaaatacagggttatgtgggtgaaaggcagacattgaagtgtaggaagaccaggcccaatggctcacatctgtaatcccagtgctttgggagtgttaggtgagaggatcgcttgaagccaggagttcaagaccagcctgggcaacacagcaagaccccccacctctacaaaaaaaaaaaaattttttagttgggtgtggactgtgcatctgtggtcccagctactctggaggttgtggtgggaggatcagttgagcccaggagttggaggtcacagtgagctatgatcgtgccactgaactccatcctgggcaacagagcgagacttttaaaaggaaaaaaaaaaaagagtaggggaggatggatggggaatac

SEQ ID NO: 314262 - DNA, 410 bp, Homo sapiens
gtagacagaggcttgggggacctagagtgatgggtattttaacttgaacttcagggagcattggggcttggtttagtccagccacgtctgagccagagacgaagaggtccctttcttacctattgcaggttccttgttaaatgactaaggaatggtactaaactttagctttttgtcttggagagagagcatgaaaaaatagacaacagcctacaaaggatgacaaaattaatttgtccttatatttgtaaatggtagcaatgggcatgatttcagtcctgagtctccaccagttggagaagtcagggaggcatctcaggtgtgaataaccttcccattctgtcccctcagttccgatgcctcaaccgctcagccgccggaatcgcagccactgccggcttcacagacgc

SEQ ID NO: 314263 - DNA, 281 bp, Homo sapiens
ttgtaagcagaagttgggaaacataacttgtgggaaaaagtaacgatttagtggatactggagctaatgctctgttttctccagtcgtcctccagaggagcgtcccccggggcttcccctgcctcccccacctcccagcagttctgctgtcttccgcctggaccaagttatccacagcaaccctgctggcatccaacaggctctggcccagcttagtagccgtcaagggagtgtaactgcaccagggggtcatccaaggcacaagcctgggcctccccaag

SEQ ID NO: 314264 - DNA, 843 bp, Homo sapiens
  misc_feature (39)..(41): n is a, c, g, or t
agatccgcacaccttacggctaggtacgaggctgggtgnnncaaagtggctttctcccttcagggctcctgcccagcagatgcttctacccatggtagactcacagctgcctgtggtgaactttggctccctgccgccagcaccacctcctgccccacctcccctttctctgttacctgtgggccctgctctgcagccccccagcctggctgtgcggcccccacctgctcctgctactcgggtgctgccttcacctgccaggcccttccccgctagcttggggcgagcagagctgcatccagtggaactaaagccgttccaggattatcaaaaactgagcagcaaccttgggggacctggatcatcacggactcccccaactggaaggtccttctctggcctcaattcccgtctcaaggccacgccttccacctacagtggagtcttccgcacccagcgcgtcgacctttaccagcaggcctccccaccagatgccctgcgctggatacctaagccttgggagcggacagggccgccacctcgagaagggccctcccgacgggcagaggagcctgggtcccgaggggacaaggagcctgggttgcccccaccccgctgagggagttcctcttgccccctacccccggggcttgtatatagattataaatatataagggggaaaggggtgggcggggaggggttgtggggctggggcctcacttcccctcctcccccttcccctggtcccctgtccctggggctgtttgtcacaccgcctccagcttccacaaaaaaccggcctttttcggcgcaaacgttaaggctgtcatgtcgccgtttga

SEQ ID NO: 314265 - DNA, 6970 bp, Homo sapiens
cgagccggcccggttcgagctgcaggtactcaggtgcgagctgctaactcaggggcgagctgctaactcaggggcgagctgctaactcaggcgcgagctgccaagggaaaggatggaaagaagtattcctcgctcaacctgtttgatacgtataagggcaagtccttagagatccagaaacccgctgttgcccctcgccatggcctgcagagtctcgggaaagttgccattgcccggcgtatgccacctccagccaaccttccaagcctgaaagccgagaacaaaggcaatgaccccaatgtctcactagtgccaaaagacggaacaggatgggcaagcaaacaggagcagtccgaccccaagagttccgatgcctcaaccgctcagccgccggaatcgcagccactgccggcttcacagacgcctgcctccaaccagccgaaacgacccccagcagcccccgagaacactcctttggttccaagcggggtaaagtcctgggcacaagccagcgtcacccatggagcacatggagatggtggaagggcatcaagcctactgtcacgattctctcgagaggaatttccgaccctgcaggcggctggcgaccaggacaaggctgccaaggaaagggagtctgccgaacagtcgtctgggcccggaccaagcctccgcccccaaaattctacaacttggagggacggaggtgggcgtggccctgatgagctggagggcccggactccaaacttcatcatggtcatgatccccggggtgggctacagccttcaggcccaccccagttccctccctaccgcggaatgatgccgcctttcatgtatcccccatatctcccgttccctccgccctatggaccccaggggccttaccgataccccactcctgatgggcccaggtgagcaatccaggtctgggtttgtggctgggggcaggggaagcttattgggggaggagatggttttctagccaggaggctcagtctaggatcagtctcgcatgtggttatacaacatgccatatttcattttcttttttgtgtacagccgttttccccgtgtggcgggcccccgaggctcagggccaccaatgcgcttagtagagcctgtgggtcgtccctctattctcaaagaggataatctcaaagagtttgatcagttggatcaggagaatgatgatggttgggcaggggcccatgaagaggttgactacactgaaaagctcaagttcagcgatgaggaagatgggcgagactctgatgaggagggagctgagggccacagggattcccaatcagcttctggtgaggaacggccccctgaagcagatggcaaaaagggcaactcccccaacagcgaaccgcccactcctaagacggcctgggcagaaacctctcggcctccagagacagagccgggacctcctgccccaaagcctcccctacccccacctcaccggggccccgccgggaactggggcccccctggggactacccagatcgtgggggtcctccctgcaagcccccagcacctgaagatgaggatgaggcatggcggcagcgacgaaagcagtcgtcatctgagatttccctggcagtggagcgggcccggcgacggcgagaagaagaggagcggcgcatgcaagaagagcgccgggcagcctgtgctgagaagctcaagcgactcgatgaaaagtttggggcacctgacaagcggctcaaagcagagcctgctgccccacctgctgccccttctaccccagctccaccacctgcagtccctaaagaactccctgcacctccagctccacctccagcatcagccccaacaccagagaaagaacctgaagagccagcacaggcccctcctgcccaatctactcctactccaggtgtggctgcggctcccactctggtgagtggtggtggcagtaccagtagcaccagcagtggcagcttcgaagccagcccagtggaaccacaactgccctcaaaagagggtcctgaaccaccagaagaggttcctcctcctaccacacccccagttccaaaggtggaacccaagggtgatgggattggtcccacccgccagccccctagtcagggcttgggctaccccaaatatcagaagtcgttgcctcctcgtttccagcggcagcagcaggagcagctcctgaagcagcagcagcagcaccagtggcagcagcatcaacagggctctgcccctcctaccccagtgcccccatcaccaccacagcctgtgaccctgggggctgtgccagctccacaggctccacccccgccccccaaggccctgtacccaggtgctctgggccggcccccacccatgcccccaatgaactttgatccccgatggatgatgattcctccttatgtggacccccggctcctccagggtcgtccccctctagacttctaccctcctggtgtgcatccctctggcctagttccccgagagcgttcagacagtgggggctcaagctcagagccatttgaccgtcatgcacctgctatgttacgggaacggggcactccaccggtggatccaaagttggcctgggtaggagatgtcttcaccgccacacccgctgaaccccgcccacttacctcacctctgcgccaggctgcggatgaggatgacaaggggatgaggagcgagactcctccagtacctcccccaccaccctatctggccagttatccaggctttcctgagaatggagcccctgggcccccaatctctcgctttcctctggaggaaccagggccccgtccactcccctggcccccaggcagtgatgaagtggccaagatacaaactccaccacccaagaaggagccccctaaggaggagactgcacagctgacggggccagaagcaggccgaaagcctgcccgcggagtcgggagtggaggccagggccccccaccaccacgcagagagagtcgcacagagacccgctggggccctcgtccagggagcagtcgtcgtggaatccctccagaggagccaggggccccaccccgccgggctgggcctataaagaaacctccaccacctacaaaagtagaagagctgcctcccaagcccctcgaacagggggatgaaacccccaaacccccaaagccagacccactcaagataaccaaggggaagctagggggccccaaggagaccccacccaatggaaatctttcccctgccccaaggcttcggagggactattcgtatgaaagagtgggtcctacctcttgccggggtcggggccgaggcgagtattttgccagagggaggggttttcgggggacctatgggggacgagggcggggagcccgaagccgggaattccgcagttaccgagagtttcgaggagatgatgggcgtggaggtgggacagggggaccaaaccaccctcctgctccccgaggccgcactgccagcgagacacggagcgagggttcagagtatgaggaaatccccaagcggcgccggcagcggggctcagaaacaggcagcgagacccatgagagtgatctggctccttcagacaaggaggctcccacacccaaggagggaacactcacccaggtccctctcgctcccccaccaccaggagccccaccttcaccagccccagcccgcttcactgcccggggtgggcgagtcttcactcccagaggggtgccatctcgccggggccgaggaggagggaggccccctcctcaagtttgcccaggctggagccctccagccaagtctctggctcccaagaaacctcccacaggccctttgccaccaagtaaggagcctttgaaagagaagttgatcccagggcctctgtcccctgtggcgcgcggaggcagcaatggaggtagcaatgtgggcatggaagatggggagcgaccccgaaggaggcgacatgggagggctcagcagcaggataaaccgcctcgtttccggaggctgaagcaggaacgggagaatgccgcaagggggtctgagggcaagccctccctaacccttccagcctccgctcctggacctgaggaggccctcacaacagtcacagtggccccagcacctcgccgggcagctgccaagtctcctgatctgtcaaaccagaactcagaccaagccaatgaggaatgggagactgcatcagagagcagtgacttcaccagtgagcgccgaggggacaaagaggcacccccaccagtactgctgacacccaaggctgtgggaactcctgggggaggtggaggtggagccgtaccaggtatttcagccatgtcccgcggagatctgagccagagagccaaggatttgagtaaacggagcttctcaagtcagcggccaggcatggaacggcagaatcggcgccctggcccagggggcaaggctggcagcagtggcagcagcagtggaggaggcggtgggggtcctggaggaaggaccgggccaggacgaggcgacaagaggagctggccctctcccaagaaccgaagtcgtcctccagaggagcgtcccccggggcttcccctgcctcccccacctcccagcagttctgctgtcttccgcctggaccaagttatccacagcaaccctgctggcatccaacaggctctggcccagcttagtagccgtcaagggagtgtaactgcaccagggggtcatccaaggcacaagcctgggcctccccaagcccctcagggcccctctcctaggcccccaacccgatacgagccccagagggtcaacagcggcctcagttctgacccccactttgaggagccggggccaatggtgagaggggtgggtgggactcctcgggactctgccggggttagtccctttccccctaaacgtcgggagcggcctcccagaaaaccagagctgctacaggaggaatctttgccacctcctcatagctctggattcttgggctctaagcctgagggcccaggccctcaggcagagtccagagatacaggcacagaggccctgacccctcacatctggaaccgtttacatactgccactagccgaaagagttaccggcccagctccatggagccttggatggagcccctgagtccttttgaggatgtggctggcacagaaatgagtcagtctgacagtggggtggacctgagtggggattctcaggtgtcatcaggtccctgcagccagcgaagttcccctgatggaggactcaagggggcagcagagggaccccccaagaggcctggaggctcctcacccctgaatgctgttccttgtgagggtccacctggctctgaacctcctaggagaccaccacctgccccccacgatggggacagaaaggagctgccccgggagcagcctctgccccctggccccattggcacagaacgatcacagcgtacagaccgaggcacagagcctggccccattcggccatcccatcgacctggtcccccagtccagtttggcactagtgacaaggactcagacttacgcctagtggtaggagacagcttgaaagcagagaaggagctaacagcatcagtcactgaggccattcctgtatcacgagactgggagctgcttcccagtgctgctgcctctgctgagccacaatccaagaacctggattctgggcactgtgtcccggagcccagctcctcaggccagcgcctgtatcctgaggttttctatggcagtgctgggccttccagttctcagatctctgggggagccatggactctcaattacatccaaacagtggaggcttccgccctgggacaccctcactgcacccttacagatcacagcccctatacctaccccccggcccagcccctccctcagcactgctctctggggtagctctcaagggccagtttctggatttctccacaatgcaagctacagagctggggaagttgccggctggaggagttctctaccctccaccttccttcctctactctccggctttctgccccagtcctttgcctgacacatcgttgcttcaggtacgccaggatctgccatccccttcggatttttattctactcctctgcagcctggtggccaaagtggctttctcccttcaggggctcctgcccagcagatgcttctacccatggtagactcacagctgcctgtggtgaactttggctccctgccgccagcaccacctcctgccccacctcccctttctctgttacctgtgggccctgctctgcagccccccagcctggctgtgcggcccccacctgctcctgctactcgggtgctgccttcacctgccaggcccttccccgctagcttggggcgagcagagctgcatccagtggaactaaagccgttccaggattatcaaaaactgagcagcaaccttgggggacctggatcatcacggactcccccaactggaaggtccttctctggcctcaattcccgtctcaaggccacgccttccacctacagtggagtcttccgcacccagcgcgtcgacctttaccagcaggcctccccaccagatgccctgcgctggatacctaagccttgggagcggacagggccgccacctcgagaagggccctcccgacgggcagaggagcctgggtcccgaggggacaaggagcctgggttgcccccaccccgctgagggagttcctcttgccccctacccccggggcttgtatatagattataaatatataagggggaaaggggtgggcggggaggggttgtggggctggggcctcacttcccctcctcccccttcccctggtcccctgtccctggggctgtttgttaaaaaagagtaataaaaggatttaaaaaaaaaaacaaacacaacaaaaaaccaaaagccaaacacaaaccacaaaaataaaaaaaccatcaatcccacaaaaaaaacaaacacaaccaatag

SEQ ID NO: 314266 - DNA, 6690 bp, Homo sapiens
cgagccggcccggttcgagctgcaggtactcaggtgcgagctgctaactcaggggcgagctgctaactcaggggcgagctgctaactcaggcgcgagctgccaagggaaaggatggaaagaagtattcctcgctcaacctgtttgatacgtataagggcaagtccttagagatccagaaacccgctgttgcccctcgccatggcctgcagagtctcgggaaagttgccattgcccggcgtatgccacctccagccaaccttccaagcctgaaagccgagaacaaaggcaatgaccccaatgtctcactagtgccaaaagacggaacaggatgggcaagcaaacaggagcagtccgaccccaagagttccgatgcctcaaccgctcagccgccggaatcgcagccactgccggcttcacagacgcctgcctccaaccagccgaaacgacccccagcagcccccgagaacactcctttggttccaagcggggtaaagtcctgggcacaagccagcgtcacccatggagcacatggagatggtggaagggcatcaagcctactgtcacgattctctcgagaggaatttccgaccctgcaggcggctggcgaccaggacaaggctgccaaggaaagggagtctgccgaacagtcgtctgggcccggaccaagcctccgcccccaaaattctacaacttggagggacggaggtgggcgtggccctgatgagctggagggcccggactccaaacttcatcatggtcatgatccccggggtgggctacagccttcaggcccaccccagttccctccctaccgcggaatgatgccgcctttcatgtatcccccatatctcccgttccctccgccctatggaccccaggggccttaccgataccccactcctgatgggcccaggtgagcaatccaggtctgggtttgtggctgggggcaggggaagcttattgggggaggagatggttttctagccaggaggctcagtctaggatcagtctcgcatgtggttatacaacatgccatatttcattttcttttttgtgtacagccgttttccccgtgtggcgggcccccgaggctcagggccaccaatgcgcttagtagagcctgtgggtcgtccctctattctcaaagaggataatctcaaagagtttgatcagttggatcaggagaatgatgatggttgggcaggggcccatgaagaggttgactacactgaaaagctcaagttcagcgatgaggaagatgggcgagactctgatgaggagggagctgagggccacagggattcccaatcagcttctggtgaggaacggccccctgaagcagatggcaaaaagggcaactcccccaacagcgaaccgcccactcctaagacggcctgggcagaaacctctcggcctccagagacagagccgggacctcctgccccaaagcctcccctacccccacctcaccggggccccgccgggaactggggcccccctggggactacccagatcgtgggggtcctccctgcaagcccccagcacctgaagatgaggatgaggcatggcggcagcgacgaaagcagtcgtcatctgagatttccctggcagtggagcgggcccggcgacggcgagaagaagaggagcggcgcatgcaagaagagcgccgggcagcctgtgctgagaagctcaagcgactcgatgaaaagtttggggcacctgacaagcggctcaaagcagagcctgctgccccacctgctgccccttctaccccagctccaccacctgcagtccctaaagaactccctgcacctccagctccacctccagcatcagccccaacaccagagaaagaacctgaagagccagcacaggcccctcctgcccaatctactcctactccaggtgtggctgcggctcccactctggtgagtggtggtggcagtaccagtagcaccagcagtggcagcttcgaagccagcccagtggaaccacaactgccctcaaaagagggtcctgaaccaccagaagaggttcctcctcctaccacacccccagttccaaaggtggaacccaagggtgatgggattggtcccacccgccagccccctagtcagggcttgggctaccccaaatatcagaagtcgttgcctcctcgtttccagcggcagcagcaggagcagctcctgaagcagcagcagcagcaccagtggcagcagcatcaacagggctctgcccctcctaccccagtgcccccatcaccaccacagcctgtgaccctgggggctgtgccagctccacaggctccacccccgccccccaaggccctgtacccaggtgctctgggccggcccccacccatgcccccaatgaactttgatccccgatggatgatgattcctccttatgtggacccccggctcctccagggtcgtccccctctagacttctaccctcctggtgtgcatccctctggcctagttccccgagagcgttcagacagtgggggctcaagctcagagccatttgaccgtcatgcacctgctatgttacgggaacggggcactccaccggtggatccaaagttggcctgggtaggagatgtcttcaccgccacacccgctgaaccccgcccacttacctcacctctgcgccaggctgcggatgaggatgacaaggggatgaggagcgagactcctccagtacctcccccaccaccctatctggccagttatccaggctttcctgagaatggagcccctgggcccccaatctctcgctttcctctggaggaaccagggccccgtccactcccctggcccccaggcagtgatgaagtggccaagatacaaactccaccacccaagaaggagccccctaaggaggagactgcacagctgacggggccagaagcaggccgaaagcctgcccgcggagtcgggagtggaggccagggccccccaccaccacgcagagagagtcgcacagagacccgctggggccctcgtccagggagcagtcgtcgtggaatccctccagaggagccaggggccccaccccgccgggctgggcctataaagaaacctccaccacctacaaaagtagaagagctgcctcccaagcccctcgaacagggggatgaaacccccaaacccccaaagccagacccactcaagataaccaaggggaagctagggggccccaaggagaccccacccaatggaaatctttcccctgccccaaggcttcggagggactattcgtatgaaagagtgggtcctacctcttgccggggtcggggccgaggcgagtattttgccagagggaggggttttcgggggacctatgggggacgagggcggggagcccgaagccgggaattccgcagttaccgagagtttcgaggagatgatgggcgtggaggtgggacagggggaccaaaccaccctcctgctccccgaggccgcactgccagcgagacacggagcgagggttcagagtatgaggaaatccccaagcggcgccggcagcggggctcagaaacaggcagcgagacccatgagagtgatctggctccttcagacaaggaggctcccacacccaaggagggaacactcacccaggtccctctcgctcccccaccaccaggagccccaccttcaccagccccagcccgcttcactgcccggggtgggcgagtcttcactcccagaggggtgccatctcgccggggccgaggaggagggaggccccctcctcaagtttgcccaggctggagccctccagccaagtctctggctcccaagaaacctcccacaggccctttgccaccaagtaaggagcctttgaaagagaagttgatcccagggcctctgtcccctgtggcgcgcggaggcagcaatggaggtagcaatgtgggcatggaagatggggagcgaccccgaaggaggcgacatgggagggctcagcagcaggataaaccgcctcgtttccggaggctgaagcaggaacgggagaatgccgcaagggggtctgagggcaagccctccctaacccttccagcctccgctcctggacctgaggaggccctcacaacagtcacagtggccccagcacctcgccgggcagctgccaagtctcctgatctgtcaaaccagaactcagaccaagccaatgaggaatgggagactgcatcagagagcagtgacttcaccagtgagcgccgaggggacaaagaggcacccccaccagtactgctgacacccaaggctgtgggaactcctgggggaggtggaggtggagccgtaccaggtatttcagccatgtcttccgcctggaccaagttatccacagcaaccctgctggcatccaacaggctctggcccagcttagtagccgtcaagggagtgtaactgcaccagggggtcatccaaggcacaagcctgggcctccccaagcccctcagggcccctctcctaggcccccaacccgatacgagccccagagggtcaacagcggcctcagttctgacccccactttgaggagccggggccaatggtgagaggggtgggtgggactcctcgggactctgccggggttagtccctttccccctaaacgtcgggagcggcctcccagaaaaccagagctgctacaggaggaatctttgccacctcctcatagctctggattcttgggctctaagcctgagggcccaggccctcaggcagagtccagagatacaggcacagaggccctgacccctcacatctggaaccgtttacatactgccactagccgaaagagttaccggcccagctccatggagccttggatggagcccctgagtccttttgaggatgtggctggcacagaaatgagtcagtctgacagtggggtggacctgagtggggattctcaggtgtcatcaggtccctgcagccagcgaagttcccctgatggaggactcaagggggcagcagagggaccccccaagaggcctggaggctcctcacccctgaatgctgttccttgtgagggtccacctggctctgaacctcctaggagaccaccacctgccccccacgatggggacagaaaggagctgccccgggagcagcctctgccccctggccccattggcacagaacgatcacagcgtacagaccgaggcacagagcctggccccattcggccatcccatcgacctggtcccccagtccagtttggcactagtgacaaggactcagacttacgcctagtggtaggagacagcttgaaagcagagaaggagctaacagcatcagtcactgaggccattcctgtatcacgagactgggagctgcttcccagtgctgctgcctctgctgagccacaatccaagaacctggattctgggcactgtgtcccggagcccagctcctcaggccagcgcctgtatcctgaggttttctatggcagtgctgggccttccagttctcagatctctgggggagccatggactctcaattacatccaaacagtggaggcttccgccctgggacaccctcactgcacccttacagatcacagcccctatacctaccccccggcccagcccctccctcagcactgctctctggggtagctctcaagggccagtttctggatttctccacaatgcaagctacagagctggggaagttgccggctggaggagttctctaccctccaccttccttcctctactctccggctttctgccccagtcctttgcctgacacatcgttgcttcaggtacgccaggatctgccatccccttcggatttttattctactcctctgcagcctggtggccaaagtggctttctcccttcaggggctcctgcccagcagatgcttctacccatggtagactcacagctgcctgtggtgaactttggctccctgccgccagcaccacctcctgccccacctcccctttctctgttacctgtgggccctgctctgcagccccccagcctggctgtgcggcccccacctgctcctgctactcgggtgctgccttcacctgccaggcccttccccgctagcttggggcgagcagagctgcatccagtggaactaaagccgttccaggattatcaaaaactgagcagcaaccttgggggacctggatcatcacggactcccccaactggaaggtccttctctggcctcaattcccgtctcaaggccacgccttccacctacagtggagtcttccgcacccagcgcgtcgacctttaccagcaggcctccccaccagatgccctgcgctggatacctaagccttgggagcggacagggccgccacctcgagaagggccctcccgacgggcagaggagcctgggtcccgaggggacaaggagcctgggttgcccccaccccgctgagggagttcctcttgccccctacccccggggcttgtatatagattataaatatataagggggaaaggggtgggcggggaggggttgtggggctggggcctcacttcccctcctcccccttcccctggtcccctgtccctggggctgtttgttaaaaaagagtaataaaaggatttaaaaaaaaaaacaaacacaacaaaaaaccaaaagccaaacacaaaccacaaaaataaaaaaaccatcaatcccacaaaaaaaacaaacacaaccaatag

SEQ ID NO: 314267 - DNA, 2829 bp, Homo sapiens
cgagcacaatgttatcagtcgtccgtgtattcatccttggctgccttatattacatacagagcagtgacttcaccagtgagcgccgaggggacaaagaggcacccccaccagtactgctgacacccaaggctgtgggaactcctgggggaggtggaggtggagccgtaccaggtatttcagccatgtcccgcggagatctgagccagagagccaaggatttgagtaaacggagcttctcaagtcagcggccaggcatggaacggcagaatcggcgccctggcccagggggcaaggctggcagcagtggcagcagcagtggaggaggcggtgggggtcctggaggaaggaccgggccaggacgaggcgacaagaggagctggccctctcccaagaaccgaagtcgtcctccagaggagcgtcccccggggcttcccctgcctcccccacctcccagcagttctgctgtcttccgcctggaccaagttatccacagcaaccctgctggcatccaacaggctctggcccagcttagtagccgtcaagggagtgtaactgcaccagggggtcatccaaggcacaagcctgggcctccccaagcccctcagggcccctctcctaggcccccaacccgatacgagccccagagggtcaacagcggcctcagttctgacccccactttgaggagccggggccaatggtgagaggggtgggtgggactcctcgggactctgccggggttagtccctttccccctaaacgtcgggagcggcctcccagaaaaccagagctgctacaggaggaatctttgccacctcctcatagctctggattcttgggctctaagcctgagggcccaggccctcaggcagagtccagagatacaggcacagaggccctgacccctcacatctggaaccgtttacatactgccactagccgaaagagttaccggcccagctccatggagccttggatggagcccctgagtccttttgaggatgtggctggcacagaaatgagtcagtctgacagtggggtggacctgagtggggattctcaggtgtcatcaggtccctgcagccagcgaagttcccctgatggaggactcaagggggcagcagagggaccccccaagaggcctggaggctcctcacccctgaatgctgttccttgtgagggtccacctggctctgaacctcctaggagaccaccacctgccccccacgatggggacagaaaggagctgccccgggagcagcctctgccccctggccccattggcacagaacgatcacagcgtacagaccgaggcacagagcctggccccattcggccatcccatcgacctggtcccccagtccagtttggcactagtgacaaggactcagacttacgcctagtggtaggagacagcttgaaagcagagaaggagctaacagcatcagtcactgaggccattcctgtatcacgagactgggagctgcttcccagtgctgctgcctctgctgagccacaatccaagaacctggattctgggcactgtgtcccggagcccagctcctcaggccagcgcctgtatcctgaggttttctatggcagtgctgggccttccagttctcagatctctgggggagccatggactctcaattacatccaaacagtggaggcttccgccctgggacaccctcactgcacccttacagatcacagcccctatacctaccccccggcccagcccctccctcagcactgctctctggggtagctctcaagggccagtttctggatttctccacaatgcaagctacagagctggggaagttgccggctggaggagttctctaccctccaccttccttcctctactctccggctttctgccccagtcctttgcctgacacatcgttgcttcaggtacgccaggatctgccatccccttcggatttttattctactcctctgcagcctggtggccaaagtggctttctcccttcaggggctcctgcccagcagatgcttctacccatggtagactcacagctgcctgtggtgaactttggctccctgccgccagcaccacctcctgccccacctcccctttctctgttacctgtgggccctgctctgcagccccccagcctggctgtgcggcccccacctgctcctgctactcgggtgctgccttcacctgccaggcccttccccgctagcttggggcgagcagagctgcatccagtggaactaaagccgttccaggattatcaaaaactgagcagcaaccttgggggacctggatcatcacggactcccccaactggaaggtccttctctggcctcaattcccgtctcaaggccacgccttccacctacagtggagtcttccgcacccagcgcgtcgacctttaccagcaggcctccccaccagatgccctgcgctggatacctaagccttgggagcggacagggccgccacctcgagaagggccctcccgacgggcagaggagcctgggtcccgaggggacaaggagcctgggttgcccccaccccgctgagggagttcctcttgccccctacccccggggcttgtatatagattataaatatataagggggaaaggggtgggcggggaggggttgtggggctggggcctcacttcccctcctcccccttcccctggtcccctgtccctggggctgtttgttaaaaaagagtaataaaaggatttaaaaaaaaaaacaaacacaacaaaaaaccaaaagccaaacacaaaccacaaaaataaaaaaaccatcaatcccacaaaaaaaacaaacacaaccaatag

SEQ ID NO: 314268 - DNA, 7066 bp, Homo sapiens
cgagccggcccggttcgagctgcaggtactcaggtgcgagctgctaactcaggggcgagctgctaactcaggggcgagctgctaactcaggcgcgagctgccaagggaaaggatggaaagaagtattcctcgctcaacctgtttgatacgtataagggcaagtccttagagatccagaaacccgctgttgcccctcgccatggcctgcagagtctcgggaaagttgccattgcccggcgtatgccacctccagccaaccttccaagcctgaaagccgagaacaaaggcaatgaccccaatgtctcactagtgccaaaagacggaacaggatgggcaagcaaacaggagcagtccgaccccaagagttccgatgcctcaaccgctcagccgccggaatcgcagccactgccggcttcacagacgcctgcctccaaccagccgaaacgacccccagcagcccccgagaacactcctttggttccaagcggggtaaagtcctgggcacaagccagcgtcacccatggagcacatggagatggtggaagggcatcaagcctactgtcacgattctctcgagaggaatttccgaccctgcaggcggctggcgaccaggacaaggctgccaaggaaagggagtctgccgaacagtcgtctgggcccggaccaagcctccgcccccaaaattctacaacttggagggacggaggtgggcgtggccctgatgagctggagggcccggactccaaacttcatcatggtcatgatccccggggtgggctacagccttcaggcccaccccagttccctccctaccgcggaatgatgccgcctttcatgtatcccccatatctcccgttccctccgccctatggaccccaggggccttaccgataccccactcctgatgggcccaggtgagcaatccaggtctgggtttgtggctgggggcaggggaagcttattgggggaggagatggttttctagccaggaggctcagtctaggatcagtctcgcatgtggttatacaacatgccatatttcattttcttttttgtgtacagccgttttccccgtgtggcgggcccccgaggctcagggccaccaatgcgcttagtagagcctgtgggtcgtccctctattctcaaagaggataatctcaaagagtttgatcagttggatcaggagaatgatgatggttgggcaggggcccatgaagaggttgactacactgaaaagctcaagttcagcgatgaggaagatgggcgagactctgatgaggagggagctgagggccacagggattcccaatcagcttctggtgaggaacggccccctgaagcagatggcaaaaagggcaactcccccaacagcgaaccgcccactcctaagacggcctgggcagaaacctctcggcctccagagacagagccgggacctcctgccccaaagcctcccctacccccacctcaccggggccccgccgggaactggggcccccctggggactacccagatcgtgggggtcctccctgcaagcccccagcacctgaagatgaggatgaggcatggcggcagcgacgaaagcagtcgtcatctgagatttccctggcagtggagcgggcccggcgacggcgagaagaagaggagcggcgcatgcaagaagagcgccgggcagcctgtgctgagaagctcaagcgactcgatgaaaagtttggggcacctgacaagcggctcaaagcagagcctgctgccccacctgctgccccttctaccccagctccaccacctgcagtccctaaagaactccctgcacctccagctccacctccagcatcagccccaacaccagagaaagaacctgaagagccagcacaggcccctcctgcccaatctactcctactccaggtgtggctgcggctcccactctggtgagtggtggtggcagtaccagtagcaccagcagtggcagcttcgaagccagcccagtggaaccacaactgccctcaaaagagggtcctgaaccaccagaagaggttcctcctcctaccacacccccagttccaaaggtggaacccaagggtgatgggattggtcccacccgccagccccctagtcagggcttgggctaccccaaatatcagaagtcgttgcctcctcgtttccagcggcagcagcaggagcagctcctgaagcagcagcagcagcaccagtggcagcagcatcaacagggctctgcccctcctaccccagtgcccccatcaccaccacagcctgtgaccctgggggctgtgccagctccacaggctccacccccgccccccaaggccctgtacccaggtgctctgggccggcccccacccatgcccccaatgaactttgatccccgatggatgatgattcctccttatgtggacccccggctcctccagggtcgtccccctctagacttctaccctcctggtgtgcatccctctggcctagttccccgagagcgttcagacagtgggggctcaagctcagagccatttgaccgtcatgcacctgctatgttacgggaacggggcactccaccggtggatccaaagttggcctgggtaggagatgtcttcaccgccacacccgctgaaccccgcccacttacctcacctctgcgccaggctgcggatgaggatgacaaggggatgaggagcgagactcctccagtacctcccccaccaccctatctggccagttatccaggctttcctgagaatggagcccctgggcccccaatctctcgctttcctctggaggaaccagggccccgtccactcccctggcccccaggcagtgatgaagtggccaagatacaaactccaccacccaagaaggagccccctaaggaggagactgcacagctgacggggccagaagcaggccgaaagcctgcccgcggagtcgggagtggaggccagggccccccaccaccacgcagagagagtcgcacagagacccgctggggccctcgtccagggagcagtcgtcgtggaatccctccagaggagccaggggccccaccccgccgggctgggcctataaagaaacctccaccacctacaaaagtagaagagctgcctcccaagcccctcgaacagggggatgaaacccccaaacccccaaagccagacccactcaagataaccaaggggaagctagggggccccaaggagaccccacccaatggaaatctttcccctgccccaaggcttcggagggactattcgtatgaaagagtgggtcctacctcttgccggggtcggggccgaggcgagtattttgccagagggaggggttttcgggggacctatgggggacgagggcggggagcccgaagccgggaattccgcagttaccgagagtttcgaggagatgatgggcgtggaggtgggacagggggaccaaaccaccctcctgctccccgaggccgcactgccagcgagacacggagcgagggttcagagtatgaggaaatccccaagcggcgccggcagcggggctcagaaacaggcagcgagacccatgagagtgatctggctccttcagacaaggaggctcccacacccaaggagggaacactcacccaggtccctctcgctcccccaccaccaggagccccaccttcaccagccccagcccgcttcactgcccggggtgggcgagtcttcactcccagaggggtgccatctcgccggggccgaggaggagggaggccccctcctcaagtttgcccaggctggagccctccagccaagtctctggctcccaagaaacctcccacaggccctttgccaccaagtaaggagcctttgaaagagaagttgatcccagggcctctgtcccctgtggcgcgcggaggcagcaatggaggtagcaatgtgggcatggaagatggggagcgaccccgaaggaggcgacatgggagggctcagcagcaggataaaccgcctcgtttccggaggctgaagcaggaacgggagaatgccgcaagggggtctgagggcaagccctccctaacccttccagcctccgctcctggacctgaggaggccctcacaacagtcacagtggccccagcacctcgccgggcagctgccaagtctcctgatctgtcaaaccagaactcagaccaagccaatgaggaatgggagactgcatcagagagcagtgacttcaccagtgagcgccgaggggacaaagaggcacccccaccagtactgctgacacccaaggctgtgggaactcctgggggaggtggaggtggagccgtaccaggtatttcagccatgtcccgcggagatctgagccagagagccaaggatttgagtaaacggagcttctcaagtcagcggccaggcatggaacggcagaatcggcgccctggcccagggggcaaggctggcagcagtggcagcagcagtggaggaggcggtgggggtcctggaggaaggaccgggccaggacgaggcgacaagaggagctggccctctcccaagaaccgaagtcgtcctccagaggagcgtcccccggggcttcccctgcctcccccacctcccagcagttctgctgtcttccgcctggaccaagttatccacagcaaccctgctggcatccaacaggctctggcccagcttagtagccgtcaagggagtgtaactgcaccagggggtcatccaaggcacaagcctgggcctccccaagcccctcagggcccctctcctaggcccccaacccgatacgagccccagagggtcaacagcggcctcagttctgacccccactttgaggagccggggccaatggtgagaggggtgggtgggactcctcgggactctgccggggttagtccctttccccctaaacgtcgggagcggcctcccagaaaaccagagctgctacaggaggaatctttgccacctcctcatagctctggattcttgggctctaagcctgagggcccaggccctcaggcagagtccagagatacaggcacagaggccctgacccctcacatctggaaccgtttacatactgccactagccgaaagagttaccggcccagctccatggagccttggatggagcccctgagtccttttgaggatgtggctggcacagaaatgagtcagtctgacagtggggtggacctgagtggggattctcaggtgtcatcaggtccctgcagccagcgaagttcccctgatggaggactcaagggggcagcagagggaccccccaagaggcctggaggctcctcacccctgaatgctgttccttgtgagggtccacctggctctgaacctcctaggagaccaccacctgccccccacgatggggacagaaaggagctgccccgggagcagcctctgccccctggccccattggcacagaacgatcacagcgtacagaccgaggcacagagcctggccccattcggccatcccatcgacctggtcccccagtccagtttggcactagtgacaaggactcagacttacgcctagtggtaggagacagcttgaaagcagagaaggagctaacagcatcagtcactgaggccattcctgtatcacgagactgggagctgcttcccagtgctgctgcctctgctgagccacaatccaagaacctggattctgggcactgtgtcccggagcccagctcctcaggccagcgcctgtatcctgaggttttctatggcagtgctgggccttccagttctcagatctctgggggagccatggactctcaattacatccaaacagtggaggcttccgccctgggacaccctcactgcacccttacagatcacagcccctatacctaccccccggcccagcccctccctcagcactgctctctggggtagctctcaagggccagtttctggatttctccacaatgcaagctacagagctggggaagttgccggctggaggagttctctaccctccaccttccttcctctactctccggctttctgccccagtcctttgcctgacacatcgttgcttcaggtacgccaggatctgccatccccttcggatttttattctactcctctgcagcctggtggccaaagtggctttctcccttcaggggctcctgcccagcagatgcttctacccatggtagactcacagctgcctgtggtgaactttggctccctgccgccagcaccacctcctgccccacctcccctttctctgttacctgtgggccctgctctgcagccccccagcctggctgtgcggcccccacctgctcctgctactcgggtgctgccttcacctgccaggcccttccccgctagcttggggcgagcagaggtaaggtacaggaactgaggggctagggagcgccaagacttgggagtagggattctgtatttcaaggtaggcagctcatgatttttttcccctcagctgcatccagtggaactaaagccgttccaggattatcaaaaactgagcagcaaccttgggggacctggatcatcacggactcccccaactggaaggtccttctctggcctcaattcccgtctcaaggccacgccttccacctacagtggagtcttccgcacccagcgcgtcgacctttaccagcaggcctccccaccagatgccctgcgctggatacctaagccttgggagcggacagggccgccacctcgagaagggccctcccgacgggcagaggagcctgggtcccgaggggacaaggagcctgggttgcccccaccccgctgagggagttcctcttgccccctacccccggggcttgtatatagattataaatatataagggggaaaggggtgggcggggaggggttgtggggctggggcctcacttcccctcctcccccttcccctggtcccctgtccctggggctgtttgttaaaaaagagtaataaaaggatttaaaaaaaaaaacaaacacaacaaaaaaccaaaagccaaacacaaaccacaaaaataaaaaaaccatcaatcccacaaaaaaaacaaacacaaccaatag

SEQ ID NO: 314269 - DNA, 2677 bp, Homo sapiens
agtcgtaaaaaacaaatagggctagtcgaggcctggggttacgagtcttactcccagagccaaggatttgagtaaacggagcttctcaagtcagcggccaggcatggaacggcagaatcggcgccctggcccagggggcaaggctggcagcagtggcagcagcagtggaggaggcggtgggggtcctggaggaaggaccgggccaggacgaggcgacaagaggagctggccctctcccaagaaccgaagtcgtcctccagaggagcgtcccccggggcttcccctgcctcccccacctcccagcagttctgctgtcttccgcctggaccaagttatccacagcaaccctgctggcatccaacaggctctggcccagcttagtagccgtcaagggagtgtaactgcaccagggggtcatccaaggcacaagcctgggcctccccaagcccctcagggcccctctcctaggcccccaacccgatacgagccccagagggtcaacagcggcctcagttctgacccccactttgaggagccggggccaatggtgagaggggtgggtgggactcctcgggactctgccggggttagtccctttccccctaaacgtcgggagcggcctcccagaaaaccagagctgctacaggaggaatctttgccacctcctcatagctctggattcttgggctctaagcctgagggcccaggccctcaggcagagtccagagatacaggcacagaggccctgacccctcacatctggaaccgtttacatactgccactagccgaaagagttaccggcccagctccatggagccttggatggagcccctgagtccttttgaggatgtggctggcacagaaatgagtcagtctgacagtggggtggacctgagtggggattctcaggtgtcatcaggtccctgcagccagcgaagttcccctgatggaggactcaagggggcagcagagggaccccccaagaggcctggaggctcctcacccctgaatgctgttccttgtgagggtccacctggctctgaacctcctaggagaccaccacctgccccccacgatggggacagaaaggagctgccccgggagcagcctctgccccctggccccattggcacagaacgatcacagcgtacagaccgaggcacagagcctggccccattcggccatcccatcgacctggtcccccagtccagtttggcactagtgacaaggactcagacttacgcctagtggtaggagacagcttgaaagcagagaaggagctaacagcatcagtcactgaggccattcctgtatcacgagactgggagctgcttcccagtgctgctgcctctgctgagccacaatccaagaacctggattctgggcactgtgtcccggagcccagctcctcaggccagcgcctgtatcctgaggttttctatggcagtgctgggccttccagttctcagatctctgggggagccatggactctcaattacatccaaacagtggaggcttccgccctgggacaccctcactgcacccttacagatcacagcccctatacctaccccccggcccagcccctccctcagcactgctctctggggtagctctcaagggccagtttctggatttctccacaatgcaagctacagagctggggaagttgccggctggaggagttctctaccctccaccttccttcctctactctccggctttctgccccagtcctttgcctgacacatcgttgcttcaggtacgccaggatctgccatccccttcggatttttattctactcctctgcagcctggtggccaaagtggctttctcccttcaggggctcctgcccagcagatgcttctacccatggtagactcacagctgcctgtggtgaactttggctccctgccgccagcaccacctcctgccccacctcccctttctctgttacctgtgggccctgctctgcagccccccagcctggctgtgcggcccccacctgctcctgctactcgggtgctgccttcacctgccaggcccttccccgctagcttggggcgagcagagctgcatccagtggaactaaagccgttccaggattatcaaaaactgagcagcaaccttgggggacctggatcatcacggactcccccaactggaaggtccttctctggcctcaattcccgtctcaaggccacgccttccacctacagtggagtcttccgcacccagcgcgtcgacctttaccagcaggcctccccaccagatgccctgcgctggatacctaagccttgggagcggacagggccgccacctcgagaagggccctcccgacgggcagaggagcctgggtcccgaggggacaaggagcctgggttgcccccaccccgctgagggagttcctcttgccccctacccccggggcttgtatatagattataaatatataagggggaaaggggtgggcggggaggggttgtggggctggggcctcacttcccctcctcccccttcccctggtcccctgtccctggggctgtttgttaaaaaagagtaataaaaggatttaaaaaaaaaaacaaacacaacaaaaaaccaaaagccaaacacaaaccacaaaaataaaaaaaccatcaatcccacaaaaaaaacaaacacaaccaatag

SEQ ID NO: 314270 - DNA, 6988 bp, Homo sapiens
cgagccggcccggttcgagctgcaggtactcaggtgcgagctgctaactcaggggcgagctgctaactcaggggcgagctgctaactcaggcgcgagctgccaagggaaaggatggaaagaagtattcctcgctcaacctgtttgatacgtataagggcaagtccttagagatccagaaacccgctgttgcccctcgccatggcctgcagagtctcgggaaagttgccattgcccggcgtatgccacctccagccaaccttccaagcctgaaagccgagaacaaaggcaatgaccccaatgtctcactagtgccaaaagacggaacaggatgggcaagcaaacaggagcagtccgaccccaagagttccgatgcctcaaccgctcagccgccggaatcgcagccactgccggcttcacagacgcctgcctccaaccagccgaaacgacccccagcagcccccgagaacactcctttggttccaagcggggtaaagtcctgggcacaagccagcgtcacccatggagcacatggagatggtggaagggcatcaagcctactgtcacgattctctcgagaggaatttccgaccctgcaggcggctggcgaccaggacaaggctgccaaggaaagggagtctgccgaacagtcgtctgggcccggaccaagcctccgcccccaaaattctacaacttggagggacggaggtgggcgtggccctgatgagctggagggcccggactccaaacttcatcatggtcatgatccccggggtgggctacagccttcaggcccaccccagttccctccctaccgcggaatgatgccgcctttcatgtatcccccatatctcccgttccctccgccctatggaccccaggggccttaccgataccccactcctgatgggcccaggtgagcaatccaggtctgggtttgtggctgggggcaggggaagcttattgggggaggagatggttttctagccaggaggctcagtctaggatcagtctcgcatgtggttatacaacatgccatatttcattttcttttttgtgtacagccgttttccccgtgtggcgggcccccgaggctcagggccaccaatgcgcttagtagagcctgtgggtcgtccctctattctcaaagaggataatctcaaagagtttgatcagttggatcaggagaatgatgatggttgggcaggggcccatgaagaggttgactacactgaaaagctcaagttcagcgatgaggaagatgggcgagactctgatgaggagggagctgagggccacagggattcccaatcagcttctggtgaggaacggccccctgaagcagatggcaaaaagggcaactcccccaacagcgaaccgcccactcctaagacggcctgggcagaaacctctcggcctccagagacagagccgggacctcctgccccaaagcctcccctacccccacctcaccggggccccgccgggaactggggcccccctggggactacccagatcgtgggggtcctccctgcaagcccccagcacctgaagatgaggatgaggcatggcggcagcgacgaaagcagtcgtcatctgagatttccctggcagtggagcgggcccggcgacggcgagaagaagaggagcggcgcatgcaagaagagcgccgggcagcctgtgctgagaagctcaagcgactcgatgaaaagtttggggcacctgacaagcggctcaaagcagagcctgctgccccacctgctgccccttctaccccagctccaccacctgcagtccctaaagaactccctgcacctccagctccacctccagcatcagccccaacaccagagaaagaacctgaagagccagcacaggcccctcctgcccaatctactcctactccaggtgtggctgcggctcccactctggtgagtggtggtggcagtaccagtagcaccagcagtggcagcttcgaagccagcccagtggaaccacaactgccctcaaaagagggtcctgaaccaccagaagaggttcctcctcctaccacacccccagttccaaaggtggaacccaagggtgatgggattggtcccacccgccagccccctagtcagggcttgggctaccccaaatatcagaagtcgttgcctcctcgtttccagcggcagcagcaggagcagctcctgaagcagcagcagcagcaccagtggcagcagcatcaacagggctctgcccctcctaccccagtgcccccatcaccaccacagcctgtgaccctgggggctgtgccagctccacaggctccacccccgccccccaaggccctgtacccaggtgctctgggccggcccccacccatgcccccaatgaactttgatccccgatggatgatgattcctccttatgtggacccccggctcctccagggtcgtccccctctagacttctaccctcctggtgtgcatccctctggcctagttccccgagagcgttcagacagtgggggctcaagctcagagccatttgaccgtcatgcacctgctatgttacgggaacggggcactccaccggtggatccaaagttggcctgggtaggagatgtcttcaccgccacacccgctgaaccccgcccacttacctcacctctgcgccaggctgcggatgaggatgacaaggggatgaggagcgagactcctccagtacctcccccaccaccctatctggccagttatccaggctttcctgagaatggagcccctgggcccccaatctctcgctttcctctggaggaaccagggccccgtccactcccctggcccccaggcagtgatgaagtggccaagatacaaactccaccacccaagaaggagccccctaaggaggagactgcacagctgacggggccagaagcaggccgaaagcctgcccgcggagtcgggagtggaggccagggccccccaccaccacgcagagagagtcgcacagagacccgctggggccctcgtccagggagcagtcgtcgtggaatccctccagaggagccaggggccccaccccgccgggctgggcctataaagaaacctccaccacctacaaaagtagaagagctgcctcccaagcccctcgaacagggggatgaaacccccaaacccccaaagccagacccactcaagataaccaaggggaagctagggggccccaaggagaccccacccaatggaaatctttcccctgccccaaggcttcggagggactattcgtatgaaagagtgggtcctacctcttgccggggtcggggccgaggcgagtattttgccagagggaggggttttcgggggacctatgggggacgagggcggggagcccgaagccgggaattccgcagttaccgagagtttcgaggagatgatgggcgtggaggtgggacagggggaccaaaccaccctcctgctccccgaggccgcactgccagcgagacacggagcgagggttcagagtatgaggaaatccccaagcggcgccggcagcggggctcagaaacaggcagcgagacccatgagagtgatctggctccttcagacaaggaggctcccacacccaaggagggaacactcacccaggtccctctcgctcccccaccaccaggagccccaccttcaccagccccagcccgcttcactgcccggggtgggcgagtcttcactcccagaggggtgccatctcgccggggccgaggaggagggaggccccctcctcaagtttgcccaggctggagccctccagccaagtctctggctcccaagaaacctcccacaggccctttgccaccaagtaaggagcctttgaaagagaagttgatcccagggcctctgtcccctgtggcgcgcggaggcagcaatggaggtagcaatgtgggcatggaagatggggagcgaccccgaaggaggcgacatgggagggctcagcagcaggataaaccgcctcgtttccggaggctgaagcaggaacgggagaatgccgcaagggggtctgagggcaagccctccctaacccttccagcctccgctcctggacctgaggaggccctcacaacagtcacagtggccccagcacctcgccgggcagctgccaagtctcctgatctgtcaaaccagaactcagaccaagccaatgaggaatgggagactgcatcagagagcagtgacttcaccagtgagcgccgaggggacaaagaggcacccccaccagtactgctgacacccaaggctgtgggaactcctgggggaggtggaggtggagccgtaccaggtatttcagccatgtcccgcggagatctgagccagagagccaaggatttgagtaaacggagcttctcaagtcagcggccaggcatggaacggcagaatcggcgccctggcccagggggcaaggctggcagcagtggcagcagcagtggaggaggcggtgggggtcctggaggaaggaccgggccaggacgaggcgacaagaggagctggccctctcccaagaaccgaagtcgtcctccagaggagcgtcccccggggcttcccctgcctcccccacctcccagcagttctgctgtcttccgcctggaccaagttatccacagcaaccctgctggcatccaacaggctctggcccagcttagtagccgtcaagggagtgtaactgcaccagggggtcatccaaggcacaagcctgggcctccccaagcccctcagggcccctctcctaggcccccaacccgatacgagccccagagggtcaacagcggcctcagttctgacccccactttgaggagccggggccaatggtgagaggggtgggtgggactcctcgggactctgccggggttagtccctttccccctaaacgtcgggagcggcctcccagaaaaccagagctgctacaggaggaatctttgccacctcctcatagctctggattcttgggctctaagcctgagggcccaggccctcaggcagagtccagagatacaggcacagaggccctgacccctcacatctggaaccgtttacatactgccactagccgaaagagttaccggcccagctccatggagccttggatggagcccctgagtccttttgaggatgtggctggcacagaaatgagtcagtctgacagtggggtggacctgagtggggattctcaggtgtcatcaggtccctgcagccagcgaagttcccctgatggaggactcaagggggcagcagagggaccccccaagaggcctggaggctcctcacccctgaatgctgttccttgtgagggtccacctggctctgaacctcctaggagaccaccacctgccccccacgatggggacagaaaggagctgccccgggagcagcctctgccccctggccccattggcacagaacgatcacagcgtacagaccgaggcacagagcctggccccattcggccatcccatcgacctggtcccccagtccagtttggcactagtgacaaggactcagacttacgcctagtggtaggagacagcttgaaagcagagaaggagctaacagcatcagtcactgaggccattcctgtatcacgagactgggagctgcttcccagtgctgctgcctctgctgagccacaatccaagaacctggattctgggcactgtgtcccggagcccagctcctcaggccagcgcctgtatcctgaggttttctatggcagtgctgggccttccagttctcagatctctgggggagccatggactctcaattacatccaaacagtggaggcttccgccctgggacaccctcactgcacccttacagatcacagcccctatacctaccccccggcccagcccctccctcagcactgctctctggggtagctctcaagggccagtttctggatttctccacaatgcaagctacagagctggggaagttgccggctggaggagttctctaccctccaccttccttcctctactctccggctttctgccccagtcctttgcctgacacatcgttgcttcaggtacgccaggatctgccatccccttcggatttttattctactcctctgcagcctggtggccaaagtggctttctcccttcaggggctcctgcccagcagatgcttctacccatggtagactcacagctgcctgtggtgaactttggctccctgccgccagcaccacctcctgccccacctcccctttctctgttacctgtgggccctgctctgcagccccccagcctggctgtgcggcccccacctgctcctgctactcgggtgctgccttcacctgccaggcccttccccgctagcttggggcgagcagagctgcatccagtggaactaaagccgttccaggattatcaaaaactgagcagcaaccttgggggacctggatcatcacggactcccccaactggaagacgcccttcttcccttaggtccttctctggcctcaattcccgtctcaaggccacgccttccacctacagtggagtcttccgcacccagcgcgtcgacctttaccagcaggcctccccaccagatgccctgcgctggatacctaagccttgggagcggacagggccgccacctcgagaagggccctcccgacgggcagaggagcctgggtcccgaggggacaaggagcctgggttgcccccaccccgctgagggagttcctcttgccccctacccccggggcttgtatatagattataaatatataagggggaaaggggtgggcggggaggggttgtggggctggggcctcacttcccctcctcccccttcccctggtcccctgtccctggggctgtttgttaaaaaagagtaataaaaggatttaaaaaaaaaaacaaacacaacaaaaaaccaaaagccaaacacaaaccacaaaaataaaaaaaccatcaatcccacaaaaaaaacaaacacaaccaatag

SEQ ID NO: 314271 - DNA, 7163 bp, Homo sapiens
cgagccggcccggttcgagctgcaggtactcaggtgcgagctgctaactcaggggcgagctgctaactcaggggcgagctgctaactcaggcgcgagctgccaagggaaaggatggaaagaagtattcctcgctcaacctgtttgatacgtataagggcaagtccttagagatccagaaacccgctgttgcccctcgccatggcctgcagagtctcgggaaagttgccattgcccggcgtatgccacctccagccaaccttccaagcctgaaagccgagaacaaaggcaatgaccccaatgtctcactagtgccaaaagacggaacaggatgggcaagcaaacaggagcagtccgaccccaagagttccgatgcctcaaccgctcagccgccggaatcgcagccactgccggcttcacagacgcctgcctccaaccagccgaaacgacccccagcagcccccgagaacactcctttggttccaagcggggtaaagtcctgggcacaagccagcgtcacccatggagcacatggagatggtggaagggcatcaagcctactgtcacgattctctcgagaggaatttccgaccctgcaggcggctggcgaccaggacaaggctgccaaggaaagggagtctgccgaacagtcgtctgggcccggaccaagcctccgcccccaaaattctacaacttggagggacggaggtgggcgtggccctgatgagctggagggcccggactccaaacttcatcatggtcatgatccccggggtgggctacagccttcaggcccaccccagttccctccctaccgcggaatgatgccgcctttcatgtatcccccatatctcccgttccctccgccctatggaccccaggggccttaccgataccccactcctgatgggcccaggtgagcaatccaggtctgggtttgtggctgggggcaggggaagcttattgggggaggagatggttttctagccaggaggctcagtctaggatcagtctcgcatgtggttatacaacatgccatatttcattttcttttttgtgtacagccgttttccccgtgtggcgggcccccgaggctcagggccaccaatgcgcttagtagagcctgtgggtcgtccctctattctcaaagaggataatctcaaagagtttgatcagttggatcaggagaatgatgatggttgggcaggggcccatgaagaggttgactacactgaaaagctcaagttcagcgatgaggaagatgggcgagactctgatgaggagggagctgagggccacagggattcccaatcagcttctggtgaggaacggccccctgaagcagatggcaaaaagggcaactcccccaacagcgaaccgcccactcctaagacggcctgggcagaaacctctcggcctccagagacagagccgggacctcctgccccaaagcctcccctacccccacctcaccggggccccgccgggaactggggcccccctggggactacccagatcgtgggggtcctccctgcaagcccccagcacctgaagatgaggatgaggcatggcggcagcgacgaaagcagtcgtcatctgagatttccctggcagtggagcgggcccggcgacggcgagaagaagaggagcggcgcatgcaagaagagcgccgggcagcctgtgctgagaagctcaagcgactcgatgaaaagtttggggcacctgacaagcggctcaaagcagagcctgctgccccacctgctgccccttctaccccagctccaccacctgcagtccctaaagaactccctgcacctccagctccacctccagcatcagccccaacaccagagaaagaacctgaagagccagcacaggcccctcctgcccaatctactcctactccaggtgtggctgcggctcccactctggtgagtggtggtggcagtaccagtagcaccagcagtggcagcttcgaagccagcccagtggaaccacaactgccctcaaaagagggtcctgaaccaccagaagaggttcctcctcctaccacacccccagttccaaaggtggaacccaagggtgatgggattggtcccacccgccagccccctagtcagggcttgggctaccccaaatatcagaagtcgttgcctcctcgtttccagcggcagcagcaggagcagctcctgaagcagcagcagcagcaccagtggcagcagcatcaacagggctctgcccctcctaccccagtgcccccatcaccaccacagcctgtgaccctgggggctgtgccagctccacaggctccacccccgccccccaaggccctgtacccaggtgctctgggccggcccccacccatgcccccaatgaactttgatccccgatggatgatgattcctccttatgtggacccccggctcctccagggtcgtccccctctagacttctaccctcctggtgtgcatccctctggcctagttccccgagagcgttcagacagtgggggctcaagctcagagccatttgaccgtcatgcacctgctatgttacgggaacggggcactccaccggtggatccaaagttggcctgggtaggagatgtcttcaccgccacacccgctgaaccccgcccacttacctcacctctgcgccaggctgcggatgaggatgacaaggggatgaggagcgagactcctccagtacctcccccaccaccctatctggccagttatccaggctttcctgagaatggagcccctgggcccccaatctctcgctttcctctggaggaaccagggccccgtccactcccctggcccccaggcagtgatgaagtggccaagatacaaactccaccacccaagaaggagccccctaaggaggagactgcacagctgacggggccagaagcaggccgaaagcctgcccgcggagtcgggagtggaggccagggccccccaccaccacgcagagagagtcgcacagagacccgctggggccctcgtccagggagcagtcgtcgtggaatccctccagaggagccaggggccccaccccgccgggctgggcctataaagaaacctccaccacctacaaaagtagaagagctgcctcccaagcccctcgaacagggggatgaaacccccaaacccccaaagccagacccactcaagataaccaaggggaagctagggggccccaaggagaccccacccaatggaaatctttcccctgccccaaggcttcggagggactattcgtatgaaagagtgggtcctacctcttgccggggtcggggccgaggcgagtattttgccagagggaggggttttcgggggacctatgggggacgagggcggggagcccgaagccgggaattccgcagttaccgagagtttcgaggagatgatgggcgtggaggtgggacagggggaccaaaccaccctcctgctccccgaggccgcactgccagcgagacacggagcgagggttcagagtatgaggaaatccccaagcggcgccggcagcggggctcagaaacaggcagcgagacccatgagagtgatctggctccttcagacaaggaggctcccacacccaaggagggaacactcacccaggtccctctcgctcccccaccaccaggagccccaccttcaccagccccagcccgcttcactgcccggggtgggcgagtcttcactcccagaggggtgccatctcgccggggccgaggaggagggaggccccctcctcaagtttgcccaggctggagccctccagccaagtctctggctcccaagaaacctcccacaggccctttgccaccaagtaaggagcctttgaaagagaagttgatcccagggcctctgtcccctgtggcgcgcggaggcagcaatggaggtagcaatgtgggcatggaagatggggagcgaccccgaaggaggcgacatgggagggctcagcagcaggataaaccgcctcgtttccggaggctgaagcaggaacgggagaatgccgcaagggggtctgagggcaagccctccctaacccttccagcctccgctcctggacctgaggaggccctcacaacagtcacagtggccccagcacctcgccgggcagctgccaagtctcctgatctgtcaaaccagaactcagaccaagccaatgaggaatgggagactgcatcagagagcagtgacttcaccagtgagcgccgaggggacaaagaggcacccccaccagtactgctgacacccaaggctgtgggaactcctgggggaggtggaggtggagccgtaccaggtatttcagccatgtcccgcggagatctgagccagagagccaaggatttgagtaaacggagcttctcaagtcagcggccaggcatggaacggcagaatcggcgccctggcccagggggcaaggctggcagcagtggcagcagcagtggaggaggcggtgggggtcctggaggaaggaccgggccaggacgaggcgacaagaggagctggccctctcccaagaaccgaagtcgtcctccagaggagcgtcccccggggcttcccctgcctcccccacctcccagcagttctgctgtcttccgcctggaccaagttatccacagcaaccctgctggcatccaacaggctctggcccagcttagtagccgtcaagggagtgtaactgcaccagggggtcatccaaggcacaagcctgggcctccccaagcccctcagggcccctctcctaggcccccaacccgatacgagccccagagggtcaacagcggcctcagttctgacccccactttgaggagccggggccaatggtgagaggggtgggtgggactcctcgggactctgccggggttagtccctttccccctaaacgtcgggagcggcctcccagaaaaccagagctgctacaggaggaatctttgccacctcctcatagctctggattcttgggctctaagcctgagggcccaggccctcaggcagagtccagagatacaggcacagaggccctgacccctcacatctggaaccgtttacatactgccactagccgaaagagttaccggcccagctccatggagccttggatggagcccctgagtccttttgaggatgtggctggcacagaaatgagtcagtctgacagtggggtggacctgagtggggattctcaggtgtcatcaggtccctgcagccagcgaagttcccctgatggaggactcaagggggcagcagagggaccccccaagaggcctggaggctcctcacccctgaatgctgttccttgtgagggtccacctggctctgaacctcctaggagaccaccacctgccccccacgatggggacagaaaggagctgccccgggagcagcctctgccccctggccccattggcacagaacgatcacagcgtacagaccgaggcacagagcctggccccattcggccatcccatcgacctggtcccccagtccagtttggcactagtgacaaggactcagacttacgcctagtggtaggagacagcttgaaagcagagaaggagctaacagcatcagtcactgaggccattcctgtatcacgagactgggagctgcttcccagtgctgctgcctctgctgagccacaatccaagaacctggattctgggcactgtgtcccggagcccagctcctcaggccagcgcctgtatcctgaggttttctatggcagtgctgggccttccagttctcagatctctgggggagccatggactctcaattacatccaaacagtggaggcttccgccctgggacaccctcactgcacccttacagatcacagcccctatacctaccccccggcccagcccctccctcagcactgctctctggggtagctctcaagggccagtttctggatttctccacaatgcaagctacagagctggggaagttgccggctggaggagttctctaccctccaccttccttcctctactctccggctttctgccccagtcctttgcctgacacatcgttgcttcaggtacgccaggatctgccatccccttcggatttttattctactcctctgcagcctggtggccaaagtggctttctcccttcaggggctcctgcccagcagatgcttctacccatggtagactcacagctgcctgtggtgaactttggctccctgccgccagcaccacctcctgccccacctcccctttctctgttacctgtgggccctgctctgcagccccccagcctggctgtgcggcccccacctgctcctgctactcgggtgctgccttcacctgccaggcccttccccgctagcttggggcgagcagaggtaaggtacaggaactgaggggctagggagcgccaagacttgggagtagggattctgtatttcaaggtaggcagctcatgatttttttcccctcagctgcatccagtggaactaaagccgttccaggattatcaaaaactgagcagcaaccttgggggacctggatcatcacggactcccccaactggaaggtgaaacggaatagggatgtggactttccaagtgcttccttactttggaaccagggtctggatcctaggcttgccttagacgcccttcttcccttaggtccttctctggcctcaattcccgtctcaaggccacgccttccacctacagtggagtcttccgcacccagcgcgtcgacctttaccagcaggcctccccaccagatgccctgcgctggatacctaagccttgggagcggacagggccgccacctcgagaagggccctcccgacgggcagaggagcctgggtcccgaggggacaaggagcctgggttgcccccaccccgctgagggagttcctcttgccccctacccccggggcttgtatatagattataaatatataagggggaaaggggtgggcggggaggggttgtggggctggggcctcacttcccctcctcccccttcccctggtcccctgtccctggggctgtttgttaaaaaagagtaataaaaggatttaaaaaaaaaaacaaacacaacaaaaaaccaaaagccaaacacaaaccacaaaaataaaaaaaccatcaatcccacaaaaaaaacaaacacaaccaatag

SEQ ID NO: 314272 - DNA, 5713 bp, Homo sapiens
cgagccggcccggttcgagctgcaggtactcaggtgcgagctgctaactcaggggcgagctgctaactcaggggcgagctgctaactcaggcgcgagctgccaagggaaaggatggaaagaagtattcctcgctcaacctgtttgatacgtataagggcaagtccttagagatccagaaacccgctgttgcccctcgccatggcctgcagagtctcgggaaagttgccattgcccggcgtatgccacctccagccaaccttccaagcctgaaagccgagaacaaaggcaatgaccccaatgtctcactagtgccaaaagacggaacaggatgggcaagcaaacaggagcagtccgaccccaagagttccgatgcctcaaccgctcagccgccggaatcgcagccactgccggcttcacagacgcctgcctccaaccagccgaaacgacccccagcagcccccgagaacactcctttggttccaagcggggtaaagtcctgggcacaagccagcgtcacccatggagcacatggagatggtggaagggcatcaagcctactgtcacgattctctcgagaggaatttccgaccctgcaggcggctggcgaccaggacaaggctgccaaggaaagggagtctgccgaacagtcgtctgggcccggaccaagcctccgcccccaaaattctacaacttggagggacggaggtgggcgtggccctgatgagctggagggcccggactccaaacttcatcatggtcatgatccccggggtgggctacagccttcaggcccaccccagttccctccctaccgcggaatgatgccgcctttcatgtatcccccatatctcccgttccctccgccctatggaccccaggggccttaccgataccccactcctgatgggcccaggtgagcaatccaggtctgggtttgtggctgggggcaggggaagcttattgggggaggagatggttttctagccaggaggctcagtctaggatcagtctcgcatgtggttatacaacatgccatatttcattttcttttttgtgtacagccgttttccccgtgtggcgggcccccgaggctcagggccaccaatgcgcttagtagagcctgtgggtcgtccctctattctcaaagaggataatctcaaagagtttgatcagttggatcaggagaatgatgatggttgggcaggggcccatgaagaggttgactacactgaaaagctcaagttcagcgatgaggaagatgggcgagactctgatgaggagggagctgagggccacagggattcccaatcagcttctggtgaggaacggccccctgaagcagatggcaaaaagggcaactcccccaacagcgaaccgcccactcctaagacggcctgggcagaaacctctcggcctccagagacagagccgggacctcctgccccaaagcctcccctacccccacctcaccggggccccgccgggaactggggcccccctggggactacccagatcgtgggggtcctccctgcaagcccccagcacctgaagatgaggatgaggcatggcggcagcgacgaaagcagtcgtcatctgagatttccctggcagtggagcgggcccggcgacggcgagaagaagaggagcggcgcatgcaagaagagcgccgggcagcctgtgctgagaagctcaagcgactcgatgaaaagtttggggcacctgacaagcggctcaaagcagagcctgctgccccacctgctgccccttctaccccagctccaccacctgcagtccctaaagaactccctgcacctccagctccacctccagcatcagccccaacaccagagaaagaacctgaagagccagcacaggcccctcctgcccaatctactcctactccaggtgtggctgcggctcccactctggtgagtggtggtggcagtaccagtagcaccagcagtggcagcttcgaagccagcccagtggaaccacaactgccctcaaaagagggtcctgaaccaccagaagaggttcctcctcctaccacacccccagttccaaaggtggaacccaagggtgatgggattggtcccacccgccagccccctagtcagggcttgggctaccccaaatatcagaagtcgttgcctcctcgtttccagcggcagcagcaggagcagctcctgaagcagcagcagcagcaccagtggcagcagcatcaacagggctctgcccctcctaccccagtgcccccatcaccaccacagcctgtgaccctgggggctgtgccagctccacaggctccacccccgccccccaaggccctgtacccaggtgctctgggccggcccccacccatgcccccaatgaactttgatccccgatggatgatgattcctccttatgtggacccccggctcctccagggtcgtccccctctagacttctaccctcctggtgtgcatccctctggcctagttccccgagagcgttcagacagtgggggctcaagctcagagccatttgaccgtcatgcacctgctatgttacgggaacggggcactccaccggtggatccaaagttggcctgggtaggagatgtcttcaccgccacacccgctgaaccccgcccacttacctcacctctgcgccaggctgcggatgaggatgacaaggggatgaggagcgagactcctccagtacctcccccaccaccctatctggccagttatccaggctttcctgagaatggagcccctgggcccccaatctctcgctttcctctggaggaaccagggccccgtccactcccctggcccccaggcagtgatgaagtggccaagatacaaactccaccacccaagaaggagccccctaaggaggagactgcacagctgacggggccagaagcaggccgaaagcctgcccgcggagtcgggagtggaggccagggccccccaccaccacgcagagagagtcgcacagagacccgctggggccctcgtccagggagcagtcgtcgtggaatccctccagaggagccaggggccccaccccgccgggctgggcctataaagaaacctccaccacctacaaaagtagaagagctgcctcccaagcccctcgaacagggggatgaaacccccaaacccccaaagccagacccactcaagataaccaaggggaagctagggggccccaaggagaccccacccaatggaaatctttcccctgccccaaggcttcggagggactattcgtatgaaagagtgggtcctacctcttgccggggtcggggccgaggcgagtattttgccagagggaggggttttcgggggacctatgggggacgagggcggggagcccgaagccgggaattccgcagttaccgagagtttcgaggagatgatgggcgtggaggtgggacagggggaccaaaccaccctcctgctccccgaggccgcactgccagcgagacacggagcgagggttcagagtatgaggaaatccccaagcggcgccggcagcggggctcagaaacaggcagcgagacccatgagagtgatctggctccttcagacaaggaggctcccacacccaaggagggaacactcacccaggtccctctcgctcccccaccaccaggagccccaccttcaccagccccagcccgcttcactgcccggggtgggcgagtcttcactcccagaggggtgccatctcgccggggccgaggaggagggaggccccctcctcaagtttgcccaggctggagccctccagccaagtctctggctcccaagaaacctcccacaggccctttgccaccaagtaaggagcctttgaaagagaagttgatgcccctgagtccttttgaggatgtggctggcacagaaatgagtcagtctgacagtggggtggacctgagtggggattctcaggtgtcatcaggtccctgcagccagcgaagttcccctgatggaggactcaagggggcagcagagggaccccccaagaggcctggaggctcctcacccctgaatgctgttccttgtgagggtccacctggctctgaacctcctaggagaccaccacctgccccccacgatggggacagaaaggagctgccccgggagcagcctctgccccctggccccattggcacagaacgatcacagcgtacagaccgaggcacagagcctggccccattcggccatcccatcgacctggtcccccagtccagtttggcactagtgacaaggactcagacttacgcctagtggtaggagacagcttgaaagcagagaaggagctaacagcatcagtcactgaggccattcctgtatcacgagactgggagctgcttcccagtgctgctgcctctgctgagccacaatccaagaacctggattctgggcactgtgtcccggagcccagctcctcaggccagcgcctgtatcctgaggttttctatggcagtgctgggccttccagttctcagatctctgggggagccatggactctcaattacatccaaacagtggaggcttccgccctgggacaccctcactgcacccttacagatcacagcccctatacctaccccccggcccagcccctccctcagcactgctctctggggtagctctcaagggccagtttctggatttctccacaatgcaagctacagagctggggaagttgccggctggaggagttctctaccctccaccttccttcctctactctccggctttctgccccagtcctttgcctgacacatcgttgcttcaggtacgccaggatctgccatccccttcggatttttattctactcctctgcagcctggtggccaaagtggctttctcccttcaggggctcctgcccagcagatgcttctacccatggtagactcacagctgcctgtggtgaactttggctccctgccgccagcaccacctcctgccccacctcccctttctctgttacctgtgggccctgctctgcagccccccagcctggctgtgcggcccccacctgctcctgctactcgggtgctgccttcacctgccaggcccttccccgctagcttggggcgagcagagctgcatccagtggaactaaagccgttccaggattatcaaaaactgagcagcaaccttgggggacctggatcatcacggactcccccaactggaaggtccttctctggcctcaattcccgtctcaaggccacgccttccacctacagtggagtcttccgcacccagcgcgtcgacctttaccagcaggcctccccaccagatgccctgcgctggatacctaagccttgggagcggacagggccgccacctcgagaagggccctcccgacgggcagaggagcctgggtcccgaggggacaaggagcctgggttgcccccaccccgctgagggagttcctcttgccccctacccccggggcttgtatatagattataaatatataagggggaaaggggtgggcggggaggggttgtggggctggggcctcacttcccctcctcccccttcccctggtcccctgtccctggggctgtttgttaaaaaagagtaataaaaggatttaaaaaaaaaaacaaacacaacaaaaaaccaaaagccaaacacaaaccacaaaaataaaaaaaccatcaatcccacaaaaaaaacaaacacaaccaatag

SEQ ID NO: 314273 - DNA, 4335 bp, Homo sapiens
cgagccggcccggttcgagctgcaggtactcaggtgcgagctgctaactcaggggcgagctgctaactcaggggcgagctgctaactcaggcgcgagctgccaagggaaaggatggaaagaagtattcctcgctcaacctgtttgatacgtataagggcaagtccttagagatccagaaacccgctgttgcccctcgccatggcctgcagagtctcgggaaagttgccattgcccggcgtatgccacctccagccaaccttccaagcctgaaagccgagaacaaaggcaatgaccccaatgtctcactagtgccaaaagacggaacaggatgggcaagcaaacaggagcagtccgaccccaagagttccgatgcctcaaccgctcagccgccggaatcgcagccactgccggcttcacagacgcctgcctccaaccagccgaaacgacccccagcagcccccgagaacactcctttggttccaagcggggtaaagtcctgggcacaagccagcgtcacccatggagcacatggagatggtggaagggcatcaagcctactgtcacgattctctcgagaggaatttccgaccctgcaggcggctggcgaccaggacaaggctgccaaggaaagggagtctgccgaacagtcgtctgggcccggaccaagcctccgcccccaaaattctacaacttggagggacggaggtgggcgtggccctgatgagctggagggcccggactccaaacttcatcatggtcatgatccccggggtgggctacagccttcaggcccaccccagttccctccctaccgcggaatgatgccgcctttcatgtatcccccatatctcccgttccctccgccctatggaccccaggggccttaccgataccccactcctgatgggcccaggtgagcaatccaggtctgggtttgtggctgggggcaggggaagcttattgggggaggagatggttttctagccaggaggctcagtctaggatcagtctcgcatgtggttatacaacatgccatatttcattttcttttttgtgtacagccgttttccccgtgtggcgggcccccgaggctcagggccaccaatgcgcttagtagagcctgtgggtcgtccctctattctcaaagaggataatctcaaagagtttgatcagttggatcaggagaatgatgatggttgggcaggggcccatgaagaggttgactacactgaaaagctcaagttcagcgatgaggaagatgggcgagactctgatgaggagggagctgagggccacagggattcccaatcagcttctggtgaggaacggccccctgaagcagatggcaaaaagggcaactcccccaacagcgaaccgcccactcctaagacggcctgggcagaaacctctcggcctccagagacagagccgggacctcctgccccaaagcctcccctacccccacctcaccggggccccgccgggaactggggcccccctggggactacccagatcgtgggggtcctccctgcaagcccccagcacctgaagatgaggatgaggcatggcggcagcgacgaaagcagtcgtcatctgagatttccctggcagtggagcgggcccggcgacggcgagaagaagaggagcggcgcatgcaagaagagcgccgggcagcctgtgctgagaagctcaagcgactcgatgaaaagtttggggcacctgacaagcggctcaaagcagagcctgctgccccacctgctgccccttctaccccagctccaccacctgcagtccctaaagaactccctgcacctccagctccacctccagcatcagccccaacaccagagaaagaacctgaagagccagcacaggcccctcctgcccaatctactcctactccaggtgtggctgcggctcccactctggtgagtggtggtggcagtaccagtagcaccagcagtggcagcttcgaagccagcccagtggaaccacaactgccctcaaaagagggtcctgaaccaccagaagaggttcctcctcctaccacacccccagttccaaaggtggaacccaagggtgatgggattggtcccacccgccagccccctagtcagggcttgggctaccccaaatatcagaagtcgttgcctcctcgtttccagcggcagcagcaggagcagctcctgaagcagcagcagcagcaccagtggcagcagcatcaacagggctctgcccctcctaccccagtgcccccatcaccaccacagcctgtgaccctgggggctgtgccagctccacaggctccacccccgccccccaaggccctgtacccaggtgctctgggccggcccccacccatgcccccaatgaactttgatccccgatggatgatgattcctccttatgtggacccccggctcctccagggtcgtccccctctagacttctaccctcctggtgtgcatccctctggcctagttccccgagagcgttcagacagtgggggctcaagctcagagccatttgaccgtcatgcacctgctatgttacgggaacggggcactccaccggtggatccaaagttggcctgggtaggagatgtcttcaccgccacacccgctgaaccccgcccacttacctcacctctgcgccaggctgcggatgaggatgacaaggggatgaggagcgagactcctccagtacctcccccaccaccctatctggccagttatccaggctttcctgagaatggagcccctgggcccccaatctctcgctttcctctggaggaaccagggccccgtccactcccctggcccccaggcagtgatgaagtggccaagatacaaactccaccacccaagaaggagccccctaaggaggagactgcacagctgacggggccagaagcaggccgaaagcctgcccgcggagtcgggagtggaggccagggccccccaccaccacgcagagggtcaacagcggcctcagttctgacccccactttgaggagccggggccaatggtgagaggggtgggtgggactcctcgggactctgccggggttagtccctttccccctaaacgtcgggagcggcctcccagaaaaccagagctgctacaggaggaatctttgccacctcctcatagctctggattcttgggctctaagcctgagggcccaggccctcaggcagagtccagagatacaggcacagaggccctgacccctcacatctggaaccgtttacatactgtctctggggtagctctcaagggccagtttctggatttctccacaatgcaagctacagagctggggaagttgccggctggaggagttctctaccctccaccttccttcctctactctccggctttctgccccagtcctttgcctgacacatcgttgcttcaggtacgccaggatctgccatccccttcggatttttattctactcctctgcagcctggtggccaaagtggctttctcccttcaggggctcctgcccagcagatgcttctacccatggtagactcacagctgcctgtggtgaactttggctccctgccgccagcaccacctcctgccccacctcccctttctctgttacctgtgggccctgctctgcagccccccagcctggctgtgcggcccccacctgctcctgctactcgggtgctgccttcacctgccaggcccttccccgctagcttggggcgagcagagctgcatccagtggaactaaagccgttccaggattatcaaaaactgagcagcaaccttgggggacctggatcatcacggactcccccaactggaaggtccttctctggcctcaattcccgtctcaaggccacgccttccacctacagtggagtcttccgcacccagcgcgtcgacctttaccagcaggcctccccaccagatgccctgcgctggatacctaagccttgggagcggacagggccgccacctcgagaagggccctcccgacgggcagaggagcctgggtcccgaggggacaaggagcctgggttgcccccaccccgctgagggagttcctcttgccccctacccccggggcttgtatatagattataaatatataagggggaaaggggtgggcggggaggggttgtggggctggggcctcacttcccctcctcccccttcccctggtcccctgtccctggggctgtttgttaaaaaagagtaataaaaggatttaaaaaaaaaaacaaacacaacaaaaaaccaaaagccaaacacaaaccacaaaaataaaaaaaccatcaatcccacaaaaaaaacaaacacaaccaatag

SEQ ID NO: 314274 - DNA, 1131 bp, Homo sapiens
tgtgcccttttagatcacagaggacctcagctccaaagaagtcaaggatgtctatcagtctctggggtagctctcaagggccagtttctggatttctccacaatgcaagctacagagctggggaagttgccggctggaggagttctctaccctccaccttccttcctctactctccggctttctgccccagtcctttgcctgacacatcgttgcttcaggtacgccaggatctgccatccccttcggatttttattctactcctctgcagcctggtggccaaagtggctttctcccttcaggggctcctgcccagcagatgcttctacccatggtagactcacagctgcctgtggtgaactttggctccctgccgccagcaccacctcctgccccacctcccctttctctgttacctgtgggccctgctctgcagccccccagcctggctgtgcggcccccacctgctcctgctactcgggtgctgccttcacctgccaggcccttccccgctagcttggggcgagcagagctgcatccagtggaactaaagccgttccaggattatcaaaaactgagcagcaaccttgggggacctggatcatcacggactcccccaactggaaggtccttctctggcctcaattcccgtctcaaggccacgccttccacctacagtggagtcttccgcacccagcgcgtcgacctttaccagcaggcctccccaccagatgccctgcgctggatacctaagccttgggagcggacagggccgccacctcgagaagggccctcccgacgggcagaggagcctgggtcccgaggggacaaggagcctgggttgcccccaccccgctgagggagttcctcttgccccctacccccggggcttgtatatagattataaatatataagggggaaaggggtgggcggggaggggttgtggggctggggcctcacttcccctcctcccccttcccctggtcccctgtccctggggctgtttgttaaaaaagagtaataaaaggatttaaaaaaaaaaacaaacacaacaaaaaaccaaaagccaaacacaaaccacaaaaataaaaaaaccatcaatcccacaaaaaaaacaaacacaaccaatag

SEQ ID NO: 314275 - DNA, 5254 bp, Homo sapiens
cgagccggcccggttcgagctgcaggtactcaggtgcgagctgctaactcaggggcgagctgctaactcaggggcgagctgctaactcaggcgcgagctgccaagggaaaggatggaaagaagtattcctcgctcaacctgtttgatacgtataagggcaagtccttagagatccagaaacccgctgttgcccctcgccatggcctgcagagtctcgggaaagttgccattgcccggcgtatgccacctccagccaaccttccaagcctgaaagccgagaacaaaggcaatgaccccaatgtctcactagtgccaaaagacggaacaggatgggcaagcaaacaggagcagtccgaccccaagagttccgatgcctcaaccgctcagccgccggaatcgcagccactgccggcttcacagacgcctgcctccaaccagccgaaacgacccccagcagcccccgagaacactcctttggttccaagcggggtaaagtcctgggcacaagccagcgtcacccatggagcacatggagatggtggaagggcatcaagcctactgtcacgattctctcgagaggaatttccgaccctgcaggcggctggcgaccaggacaaggctgccaaggaaagggagtctgccgaacagtcgtctgggcccggaccaagcctccgcccccaaaattctacaacttggagggacggaggtgggcgtggccctgatgagctggagggcccggactccaaacttcatcatggtcatgatccccggggtgggctacagccttcaggcccaccccagttccctccctaccgcggaatgatgccgcctttcatgtatcccccatatctcccgttccctccgccctatggaccccaggggccttaccgataccccactcctgatgggcccaggtgagcaatccaggtctgggtttgtggctgggggcaggggaagcttattgggggaggagatggttttctagccaggaggctcagtctaggatcagtctcgcatgtggttatacaacatgccatatttcattttcttttttgtgtacagccgttttccccgtgtggcgggcccccgaggctcagggccaccaatgcgcttagtagagcctgtgggtcgtccctctattctcaaagaggataatctcaaagagtttgatcagttggatcaggagaatgatgatggttgggcaggggcccatgaagaggttgactacactgaaaagctcaagttcagcgatgaggaagatgggcgagactctgatgaggagggagctgagggccacagggattcccaatcagcttctggtgaggaacggccccctgaagcagatggcaaaaagggcaactcccccaacagcgaaccgcccactcctaagacggcctgggcagaaacctctcggcctccagagacagagccgggacctcctgccccaaagcctcccctacccccacctcaccggggccccgccgggaactggggcccccctggggactacccagatcgtgggggtcctccctgcaagcccccagcacctgaagatgaggatgaggcatggcggcagcgacgaaagcagtcgtcatctgagatttccctggcagtggagcgggcccggcgacggcgagaagaagaggagcggcgcatgcaagaagagcgccgggcagcctgtgctgagaagctcaagcgactcgatgaaaagtttggggcacctgacaagcggctcaaagcagagcctgctgccccacctgctgccccttctaccccagctccaccacctgcagtccctaaagaactccctgcacctccagctccacctccagcatcagccccaacaccagagaaagaacctgaagagccagcacaggcccctcctgcccaatctactcctactccaggtgtggctgcggctcccactctggtgagtggtggtggcagtaccagtagcaccagcagtggcagcttcgaagccagcccagtggaaccacaactgccctcaaaagagggtcctgaaccaccagaagaggttcctcctcctaccacacccccagttccaaaggtggaacccaagggtgatgggattggtcccacccgccagccccctagtcagggcttgggctaccccaaatatcagaagtcgttgcctcctcgtttccagcggcagcagcaggagcagctcctgaagcagcagcagcagcaccagtggcagcagcatcaacagggctctgcccctcctaccccagtgcccccatcaccaccacagcctgtgaccctgggggctgtgccagctccacaggctccacccccgccccccaaggccctgtacccaggtgctctgggccggcccccacccatgcccccaatgaactttgatccccgatggatgatgattcctccttatgtggacccccggctcctccagggtcgtccccctctagacttctaccctcctggtgtgcatccctctggcctagttccccgagagcgttcagacagtgggggctcaagctcagagccatttgaccgtcatgcacctgctatgttacgggaacggggcactccaccggtggatccaaagttggcctgggtaggagatgtcttcaccgccacacccgctgaaccccgcccacttacctcacctctgcgccaggctgcggatgaggatgacaaggggatgaggagcgagactcctccagtacctcccccaccaccctatctggccagttatccaggctttcctgagaatggagcccctgggcccccaatctctcgctttcctctggaggaaccagggccccgtccactcccctggcccccaggcagtgatgaagtggccaagatacaaactccaccacccaagaaggagccccctaaggaggagactgcacagctgacggggccagaagcaggccgaaagcctgcccgcggagtcgggagtggaggccagggccccccaccaccacgcagagagagtcgcacagagacccgctggggccctcgtccagggagcagtcgtcgtggaatccctccagaggagccaggggccccaccccgccgggctgggcctataaagaaacctccaccacctacaaaagtagaagagctgcctcccaagcccctcgaacagggggatgaaacccccaaacccccaaagccagacccactcaagataaccaaggggaagctagggggccccaaggagaccccacccaatggaaatctttcccctgccccaaggcttcggagggactattcgtatgaaagagtgggtcctacctcttgccggggtcggggccgaggcgagtattttgccagagggaggggttttcgggggacctatgggggacgagggcggggagcccgaagccgggaattccgcagttaccgagagtttcgaggagatgatgggcgtggaggtgggacagggggaccaaaccaccctcctgctccccgaggccgcactgccagcgagacacggagcgagggttcagagtatgaggaaatccccaagcggcgccggcagcggggctcagaaacaggcagcgagacccatgagagtgatctggctccttcagacaaggaggctcccacacccaaggagggaacactcacccaggtccctctcgctcccccaccaccaggagccccaccttcaccagccccagcccgcttcactgcccggggtgggcgagtcttcactcccagaggggtgccatctcgccggggccgaggaggagggaggccccctcctcaagtttgcccaggctggagccctccagccaagtctctggctcccaagaaacctcccacaggccctttgccaccaagtaaggagcctttgaaagagaagttgatcccagggcctctgtcccctgtggcgcgcggaggcagcaatggaggtagcaatgtgggcatggaagatggggagcgaccccgaaggaggcgacatgggagggctcagcagcaggataaaccgcctcgtttccggaggctgaagcaggaacgggagaatgccgcaagggggtctgagggcaagccctccctaacccttccagcctccgctcctggacctgaggaggccctcacaacagtcacagtggccccagcacctcgccgggcagctgccaagtctcctgatctgtcaaaccagaactcagaccaagccaatgaggaatgggagactgcatcagagagcagtgacttcaccagtgagcgccgaggggacaaagaggcacccccaccagtactgctgacacccaaggctgtgggaactcctgggggaggtggaggtggagccgtaccaggtatttcagccatgtcccgcggagatctgagccagagagccaaggatttgagtaaacggagcttctcaagtcagcggccaggcatggaacggcagaatcggcgccctggcccagggggcaaggctggcagcagtggcagcagcagtggaggaggcggtgggggtcctggaggaaggaccgggccaggacgaggcgacaagaggagctggccctctcccaagaaccgaagtcgtcctccagaggagcgtcccccggggcttcccctgcctcccccacctcccagcagttctgctgtcttccgcctggaccaagttatccacagcaaccctgctggcatccaacaggctctggcccagcttagtagccgtcaagggagtgtaactgcaccagggggtcatccaaggcacaagcctgggcctccccaagcccctcagggcccctctcctaggcccccaacccgatacgagccccagagggtcaacagcggcctcagttctgacccccactttgaggagccggggccaatggtgagaggggtgggtgggactcctcgggactctgccggggttagtccctttccccctaaacgtcgggagcggcctcccagaaaaccagagctgctacaggaggaatctttgccacctcctcatagctctggattcttgggctctaagcctgagggcccaggccctcaggcagagtccagagatacaggcacagaggccctgacccctcacatctggaaccgtttacatactgccactagccgaaagagttaccggcccagctccatctccaccaccctcagatttgaacagcggtagcaccacctcctctccaggtcttcagccccacgtccctccctgaacaatcccttctcatgaaattcagcagtcaagaaatctgcagcggaagtaaatgaataaatgttttgttttcca

SEQ ID NO: 314276 - DNA, 2300 bp, Homo sapiens
cgagccggcccggttcgagctgcaggtactcaggtgcgagctgctaactcaggggcgagctgctaactcaggggcgagctgctaactcaggcgcgagctgccaagggaaaggatggaaagaagtattcctcgctcaacctgtttgatacgtataagggcaagtccttagagatccagaaacccgctgttgcccctcgccatggcctgcagagtctcgggaaagttgccattgcccggcgtatgccacctccagccaaccttccaagcctgaaagccgagaacaaaggcaatgaccccaatgtctcactagtgccaaaagacggaacaggatgggcaagcaaacaggagcagtccgaccccaagagttccgatgcctcaaccgctcagccgccggaatcgcagccactgccggcttcacagacgcctgcctccaaccagccgaaacgacccccagcagcccccgagaacactcctttggttccaagcggggtaaagtcctgggcacaagccagcgtcacccatggagcacatggagatggtggaagggcatcaagcctactgtcacgattctctcgagaggaatttccgaccctgcaggcggctggcgaccaggacaaggctgccaaggaaagggagtctgccgaacagtcgtctgggcccggaccaagcctccgcccccaaaattctacaacttggagggacggaggtgggcgtggccctgatgagctggagggcccggactccaaacttcatcatggtcatgatccccggggtgggctacagccttcaggcccaccccagttccctccctaccgcggaatgatgccgcctttcatgtatcccccatatctcccgttccctccgccctatggaccccaggggccttaccgataccccactcctgatgggcccaggtgagcaatccaggtctgggtttgtggctgggggcaggggaagcttattgggggaggagatggttttctagccaggaggctcagtctaggatcagtctcgcatgtggttatacaacatgccatatttcattttcttttttgtgtacagccgttttccccgtgtggcgggcccccgaggctcagggccaccaatgcgcttagtagagcctgtgggtcgtccctctattctcaaagaggataatctcaaagagtttgatcagttggatcaggagaatgatgatggttgggcaggggcccatgaagaggttgactacactgaaaagctcaagttcagcgatgaggaagatgggcgagactctgatgaggagggagctgagggccacagggattcccaatcagcttctggtgaggaacggccccctgaagcagatggcaaaaagggcaactcccccaacagcgaaccgcccactcctaagacggcctgggcagaaacctctcggcctccagagacagagccgggacctcctgccccaaagcctcccctacccccacctcaccggggccccgccgggaactggggcccccctggggactacccagatcgtgggggtcctccctgcaagcccccagcacctgaagatgaggatgaggcatggcggcagcgacgaaagcagtcgtcatctgagatttccctggcagtggagcgggcccggcgacggcgagaagaagaggagcggcgcatgcaagaagagcgccgggcagcctgtgctgagaagctcaagcgactcgatgaaaagtttggggcacctgacaagcggctcaaagcagagcctgctgccccacctgctgccccttctaccccagctccaccacctgcagtccctaaagaactccctgcacctccagctccacctccagcatcagccccaacaccagagaaagaacctgaagagccagcacaggcccctcctgcccaatctactcctactccaggtgtggctgcggctcccactctggtgagtggtggtggcagtaccagtagcaccagcagtggcagcttcgaagccagcccagtggaaccacaactgccctcaaaagagggtcctgaaccaccagaagaggttcctcctcctaccaccggggcttgtatatagattataaatatataagggggaaaggggtgggcggggaggggttgtggggctggggcctcacttcccctcctcccccttcccctggtcccctgtccctggggctgtttgttaaaaaagagtaataaaaggatttaaaaaaaaaaacaaacacaacaaaaaaccaaaagccaaacacaaaccacaaaaataaaaaaaccatcaatcccacaaaaaaaacaaacacaaccaatag

SEQ ID NO: 314277 - DNA, 2161 bp, Homo sapiens
cgagccggcccggttcgagctgcaggtactcaggtgcgagctgctaactcaggggcgagctgctaactcaggggcgagctgctaactcaggcgcgagctgccaagggaaaggatggaaagaagtattcctcgctcaacctgtttgatacgtataagggcaagtccttagagatccagaaacccgctgttgcccctcgccatggcctgcagagtctcgggaaagttgccattgcccggcgtatgccacctccagccaaccttccaagcctgaaagccgagaacaaaggcaatgaccccaatgtctcactagtgccaaaagacggaacaggatgggcaagcaaacaggagcagtccgaccccaagagttccgatgcctcaaccgctcagccgccggaatcgcagccactgccggcttcacagacgcctgcctccaaccagccgaaacgacccccagcagcccccgagaacactcctttggttccaagcggggtaaagtcctgggcacaagccagcgtcacccatggagcacatggagatggtggaagggcatcaagcctactgtcacgattctctcgagaggaatttccgaccctgcaggcggctggcgaccaggacaaggctgccaaggaaagggagtctgccgaacagtcgtctgggcccggaccaagcctccgcccccaaaattctacaacttggagggacggaggtgggcgtggccctgatgagctggagggcccggactccaaacttcatcatggtcatgatccccggggtgggctacagccttcaggcccaccccagttccctccctaccgcggaatgatgccgcctttcatgtatcccccatatctcccgttccctccgccctatggaccccaggggccttaccgataccccactcctgatgggcccaggtgagcaatccaggtctgggtttgtggctgggggcaggggaagcttattgggggaggagatggttttctagccaggaggctcagtctaggatcagtctcgcatgtggttatacaacatgccatatttcattttcttttttgtgtacagccgttttccccgtgtggcgggcccccgaggctcagggccaccaatgcgcttagtagagcctgtgggtcgtccctctattctcaaagaggataatctcaaagagtttgatcagttggatcaggagaatgatgatggttgggcaggggcccatgaagaggttgactacactgaaaagctcaagttcagcgatgaggaagatgggcgagactctgatgaggagggagctgagggccacagggattcccaatcagcttctggtgaggaacggccccctgaagcagatggcaaaaagggcaactcccccaacagcgaaccgcccactcctaagacggcctgggcagaaacctctcggcctccagagacagagccgggacctcctgccccaaagcctcccctacccccacctcaccggggccccgccgggaactggggcccccctggggactacccagatcgtgggggtcctccctgcaagcccccagcacctgaagatgaggatgaggcatggcggcagcgacgaaagcagtcgtcatctgagatttccctggcagtggagcgggcccggcgacggcgagaagaagaggagcggcgcatgcaagaagagcgccgggcagcctgtgctgagaagctcaagcgactcgatgaaaagtttggggcacctgacaagcggctcaaagcagagcctgctgccccacctgctgccccttctaccccagctccaccacctgcagtccctaaagaactccctgcacctccagctccacctccagcatcagccccaacaccagagaaagaacctgaagagccagcacaggcccctcctgcccaatctactcctactccaggtgtggctgcggctcccactctggtgagtggtggtggcagtaccagtagcaccagcagtggcagcttcgaagccagcccaggtatggagatggggataggtactaccagatgtcagatcactgcttcaaggtgcttaaaggtgcagggtggtaaggctggggataaatgaagtagaaggcagttgttttggtttattggactatcagtgatagtgttctatcatttgtatatctgaaggagggaaggttttgtc

SEQ ID NO: 314278 - DNA, 492 bp, Homo sapiens
gttccccgagagcgttcagacagtgggggctcaagctcagagccatttgaccgtcatgcacctgctatgttacgggaacggggcactccaccggtggatccaaagttggcctgggtaggagatgtcttcaccgccacacccgctgaaccccgcccacttacctcacctctgcgccaggctgcggatgaggatgacaaggggatgaggtgagtcttggtcatgagaaatgggtgagttcacagtgaaaggatctaggcctgggagaaaggtactttgggttagtggtagggatagggatgaacgggaaaggagaggctggatggagtggctcatgcctgtaatcccagcattttgggaggctgaggcaagaagattgcttgagcccagcagttcgagactagcctcggcaactggatgccatctctgccaaaacaaacagaaaaatagtaaaagagagtctgcatcataataaagtgttcttttcccacctag

SEQ ID NO: 314279 - DNA, 2704 bp, Homo sapiens
  misc_feature (307)..(307): n is a, c, g, or t
  misc_feature (761)..(761): n is a, c, g, or t
  misc_feature (845)..(845): n is a, c, g, or t
  misc_feature (2079)..(2079): n is a, c, g, or t
ggatgtttaatggggatgtggagattcattgtactgtttctatatttttgtggatgttgaaaaatattttcttcttttttttttttgagatggagtctccctctattgcccaggctggagtgcagttgtgcaatctctgttcactgcaacctccgcctcccgggttcaagtggttctcctgcctcagcctcccaagtagctgggactacaggcatgtgccaccatgcctggctaacttttgcatctttagtagagatggggttttaccatgttggccaggctggtatcgaactcctgaccttgtganccgcccaccttggcttcccaaagtactggaattacaggcataagccaccacacccggccgaaaaatatatttaaaaaggtaagaaacacacaagacaagcagcttggacttatcttctccatgatacctacccagtatccctgtgagcagctgacattcctttctccaagcagttgctgtattttgaacattgctcgagcaagaaactttttataatgggtttatttatccatgtcacctgctatactatgtttattgtagctcagcatgatttccaggtaccaagcacagtacttggtgtgtaatagtgctaactgaatgttggatggatggagggattaaaaaaaagaaaaacacctgaatatcagacacttaataaatgtttcttgggaggccgagatgggcggatcacgaggtcagaagttcgagaccagcctggccaacatggtaaaangccgtctctactaaaaatacaaaaattagctaggtgtggtggcaggcacctgtaatccccactgctcaggaggctgaggcaggngaatcacttgagcccgggaggcagaggttgcagtgagccgagatcacgccattgcactccagcctgggtgacagagcaagactctgtctcaaaaaaaataaaaaataaaataaataaatgttttctgaactgtattctctatctgttcttagttaatttgtgtttgccatttttaaagtcaaaaaccagggagagttctctacacaatgtaaatatttgataagtacttattaattgcttattgtgctagtctattctttaaatatcagaggttccaaaacaaagagctccaatagtaggatcacagtcaggtaaccaattatccgagtaggaaggttgccttagttgaagtaactggaggtgaatggggatttgtcaggcaggctcttccagataaaggtgaaccttccctgttgttttgatagaaggaggaaatggaatgaccatcaagagaaaggtagttgctggcttgagaggatcatctgtgcaacaggcagctaagcagaagaagactttatatatatttttaataccacccacactgttgctagtattccccaccactccattggcctggtgaactcttattcatccttcaaaacccagcttaaccatggccttcaggaaatcttgagctggcttcccaggacagagtgggtcagtcctctgcatgctcctgctgctgtgctgtactcaccatactgtactgtaatttactggtttgtaagtcatttccactgctgggttgtgagctcctccaaggcaggggctttgccttatctgcctatgttcccaggacttacacagtgcctgatgtgtagtaggtaccccatgaatgttttacataattagcaggagcgtatcaggtaaattagcaaagcaaactgtgggatgtgggatgtcagacaataggagtaggtgggcttatgggagctgaagagcacatgctcctcagctctgattgattgctctgtgcgataggggcccagtggtggtggatctaacaactttttaagagattctgacaattcagactttacatgttgaatattccggattttcaacattagcaactaattccatttggaggaaaaaatgtagcatgggtctacagacaagatctggctgtaattcatgttcagaggtaatcaggaaacgattagtttactgaaaatgtagtcgacaatcaaatggctgctaggttgccaataaaatgtgttgagtggaattcacntgccccagaaagctcctcctggtgctgtgggcaaggaagagggcccaagtgtgggaagaaggattcaggaggcagagccaactctcccagtgctgccggagccactcttgcttgagctgaagtactgtggactgttttgcagccttcttgatattgctcaaactgagccacccttgatattgtgcctatcagaatgatggattaaatgttattgtttccttatattccataggcatcagatatcaactgtcattgtgaaacatattacaatgtaagagatttgatattgtcctaacagctttagtctctggtggctttactgagctcttctggtttagaggtgaaacaacccagagaaaggatttatttatgtattcgtttttggtctgaagaccaaaaaggatgtttgcaagatattaacagtaatcattcattcaacaactgtttttaaagcacctgctgtacgatacctgctacagatacagtgatggtgaaagtatagttgtctcagtgttattatagaagcttttactctgtattttcctcgatttctattttctgtactgatcatgcataattttttacaatcattaaaaaaacaagaaagcaatgtctttttgcaaaa

SEQ ID NO: 314280 - DNA, 2494 bp, Homo sapiens
  misc_feature (97)..(97): n is a, c, g, or t
  misc_feature (551)..(551): n is a, c, g, or t
  misc_feature (635)..(635): n is a, c, g, or t
  misc_feature (1869)..(1869): n is a, c, g, or t
ggtgtgtaatagtgctaactgaatgttggatggatggagggattaaaaaaaagaaaaacacctgaatatcagacacttaataaatgtttcttgtganccgcccaccttggcttcccaaagtactggaattacaggcataagccaccacacccggccgaaaaatatatttaaaaaggtaagaaacacacaagacaagcagcttggacttatcttctccatgatacctacccagtatccctgtgagcagctgacattcctttctccaagcagttgctgtattttgaacattgctcgagcaagaaactttttataatgggtttatttatccatgtcacctgctatactatgtttattgtagctcagcatgatttccaggtaccaagcacagtacttggtgtgtaatagtgctaactgaatgttggatggatggagggattaaaaaaaagaaaaacacctgaatatcagacacttaataaatgtttcttgggaggccgagatgggcggatcacgaggtcagaagttcgagaccagcctggccaacatggtaaaangccgtctctactaaaaatacaaaaattagctaggtgtggtggcaggcacctgtaatccccactgctcaggaggctgaggcaggngaatcacttgagcccgggaggcagaggttgcagtgagccgagatcacgccattgcactccagcctgggtgacagagcaagactctgtctcaaaaaaaataaaaaataaaataaataaatgttttctgaactgtattctctatctgttcttagttaatttgtgtttgccatttttaaagtcaaaaaccagggagagttctctacacaatgtaaatatttgataagtacttattaattgcttattgtgctagtctattctttaaatatcagaggttccaaaacaaagagctccaatagtaggatcacagtcaggtaaccaattatccgagtaggaaggttgccttagttgaagtaactggaggtgaatggggatttgtcaggcaggctcttccagataaaggtgaaccttccctgttgttttgatagaaggaggaaatggaatgaccatcaagagaaaggtagttgctggcttgagaggatcatctgtgcaacaggcagctaagcagaagaagactttatatatatttttaataccacccacactgttgctagtattccccaccactccattggcctggtgaactcttattcatccttcaaaacccagcttaaccatggccttcaggaaatcttgagctggcttcccaggacagagtgggtcagtcctctgcatgctcctgctgctgtgctgtactcaccatactgtactgtaatttactggtttgtaagtcatttccactgctgggttgtgagctcctccaaggcaggggctttgccttatctgcctatgttcccaggacttacacagtgcctgatgtgtagtaggtaccccatgaatgttttacataattagcaggagcgtatcaggtaaattagcaaagcaaactgtgggatgtgggatgtcagacaataggagtaggtgggcttatgggagctgaagagcacatgctcctcagctctgattgattgctctgtgcgataggggcccagtggtggtggatctaacaactttttaagagattctgacaattcagactttacatgttgaatattccggattttcaacattagcaactaattccatttggaggaaaaaatgtagcatgggtctacagacaagatctggctgtaattcatgttcagaggtaatcaggaaacgattagtttactgaaaatgtagtcgacaatcaaatggctgctaggttgccaataaaatgtgttgagtggaattcacntgccccagaaagctcctcctggtgctgtgggcaaggaagagggcccaagtgtgggaagaaggattcaggaggcagagccaactctcccagtgctgccggagccactcttgcttgagctgaagtactgtggactgttttgcagccttcttgatattgctcaaactgagccacccttgatattgtgcctatcagaatgatggattaaatgttattgtttccttatattccataggcatcagatatcaactgtcattgtgaaacatattacaatgtaagagatttgatattgtcctaacagctttagtctctggtggctttactgagctcttctggtttagaggtgaaacaacccagagaaaggatttatttatgtattcgtttttggtctgaagaccaaaaaggatgtttgcaagatattaacagtaatcattcattcaacaactgtttttaaagcacctgctgtacgatacctgctacagatacagtgatggtgaaagtatagttgtctcagtgttattatagaagcttttactctgtattttcctcgatttctattttctgtactgatcatgcataattttttacaatcattaaaaaaacaagaaagcaatgtctttttgcaaaa

SEQ ID NO: 314281 - DNA, 2064 bp, Homo sapiens
gcgcctgcgcgctgtgtcctgcgcgctccttccctcgcgcgcgctctccgtggaagagcaggggcagcgtgggaggcgccaagggagcgcgaacctgaggaggaagaaacggggctagcgcgcaggcccagaacggtccgagccgcggcagtcggcgacgcctcagagcggaagagggaagtgaatcaggcgccgggtagtgggttgctgggctgggcttgctgaggtagaggcagcgccaagaagaggcctttgccgctggtcgggattgggatgtcgaagaacacagtgtcgtcggcccgcttccggaaggtggacgtggatgaatatgacgagaacaagttcgtggacgaagaagatgggggcgacggccaggccgggcccgacgagggcgaggtggactcctgcctgcggcaaggaaacatgacagctgccctacaggcagctctgaagaacccccctatcaacaccaagagtcaggcagtgaaggaccgggcaggcagcattgtcttgaaggtgctcatctcttttaaagctaatgatatagaaaaggcagttcaatctctggacaagaatggtgtggatctcctaatgaagtatatttataaaggatttgagagcccgtctgacaatagcagtgctatgttactgcaatggcatgaaaaggcacttgctgctggaggagtagggtccattgttcgtgtcttgactgcaagaaaaactgtgtagtctggcaggaagtggattatctgcctcgggagtgggaattgctggtacaaagaccaaaacaaccaaatgccaccgctgccctgtgggtagcatctgtttctctcagctttgccttcttgctttttcatatctgtaaagaaaaaaattacatatcagttgtcctttaatgaaaattgggataatatagaagaaattgtgttaaaatagaagtgtttcatcctttcaaaaccatttcagtgatgtttataccaatctgtatatagtataatttacattcaagtttaattgtgcaacttttaacccctgttggctggttttttgttctgttttgttttgtattatttttaactaatactgagagatttggtcagaatttgaggccagtttcctagctcattgctagtcaggaaatgatatttataaaaaatatgagagactggcagctattaacattgcaaaactggaccatatttcccttatttaataagcaaaatatgtttttggaataagtggtgggtgaataccactgctaagttatagctttgtttttgcttgcctcctgattatctgtactgtgggtttaagtatgctactttctctcagcatccaataatcatggcccctcaatttatttgtggtcacccagggttcagagcaagaagtcttgctttatacaaatgtatccataaaatatcagagcttgttgggcatgaacatcaaacttttgttccactaatatggctctgtttggaaaaaactgcaaatcagaaagaatgatttgcagaaagaaagaaaaactatggtgtaatttaaactctgggcagcctctgaatgaaatgctactttctttagaaatataatagctgccttagacattatgaggtatacaactagtatttaagataccatttaatatgccccgtaaatgtcttcagtgttcttcagggtagttgggatctcaaaagatttggttcagatccaaacaaatacacattctgtgttttagctcagtgttttctaaaaaaagaaactgccacacagcaaaaaattgtttactttgttggacaaaccaaatcagttctcaaaaaatgaccggtgcttataaaaagttataaatatcgagtagctctaaaacaaaccacctgaccaagagggaagtgagcttgtgcttagtatttacattggatgccagttttgtaatcactgacttatgtgcaaactggtgcagaaattctataaactctttgctgtttttgatacctgctttttgtttcattttgttttgttttgtaaaaatgataaaacttcagaaaataaaatgtcagtgttgaataa

SEQ ID NO: 314282 - DNA, 951 bp, Homo sapiens
  misc_feature (939)..(939): n is a, c, g, or t
  misc_feature (945)..(945): n is a, c, g, or t
gcgcctgcgcgctgtgtcctgcgcgctccttccctcgcgcgcgctctccgtggaagagcaggggcagcgtgggaggcgccaagggagcgcgaacctgaggaggaagaaacggggctagcgcgcaggcccagaacggtccgagccgcggcagtcggcgacgcctcagagcggaagagggaagtgaatcaggcgccgggtagtgggttgctgggctgggcttgctgaggtagaggcagcgccaagaagaggcctttgccgctggtcgggattgggatgtcgaagaacacagtgtcgtcggcccgcttccggaaggtggacgtggatgaatatgacgagaacaagttcgtggacgaagaagatgggggcgacggccaggccgggcccgacgagggcgaggtggactcctgcctgcggcaaggaaacatgacagctgccctacaggcagctctgaagaacccccctatcaacaccaagagtcaggcagtgaaggaccgggcaggcagcattgtcttgaaggtgctcatctcttttaaagctaatgatatagaaaaggcagttcaatctctggacaagaatggtgtggatctcctaatgaagtatatttataaaggatttgagagcccgtctgacaatagcagtgctatgttactgcaatggcatgaaaaggcacttgctgctggaggagtagggtccattgttcgtgtcttgactgcaagaaaaactgtgtagtctggcaggaagtggattatctgcctcgggagtgggaattgctggtacaaagaccaaaacaaccaaatgccaccgctgccctgtgggtagcatctgtttctctcagctttgccttcttgctttttcatatctgtaaagaaaaaaattacatatcagttgtcctttaatggatataggaagaatggtaaataaatgttaccttcaaacatnaggggnggggag

SEQ ID NO: 314283 - DNA, 989 bp, Homo sapiens
catcaatattgagagattgctaatgtgtatcattcagattgctaatctgccagcatgttctaccagcatttcagataatacagaatatggttctagcaaaagtttggtctttattttttcaattagaatcacaggaaaagacatattttggttgataataggttatttcatttgggggactaataattctgatatatattttaggatttctttaacaccactctaggtaatgtttgcatatgtatctcactgggaaatgaaagactatcaaggtgttcacttgatagttagaaccaagggtgaaacagtctttgctttattaaaaaaaagtctaatgttctattttgcttttgatattttgcctttgattaacatcctggaaaccaacacattgaatttccagtattgaacatagtgaccaaagtaattttctttttatatgtaaatcaagtcataagaaccagtggttataatgctttcctgggggccatcctttgctgttacacccttaacttccatcacaggaaacatgacagctgccctacaggcagctctgaagaacccccctatcaacaccaagagtcaggcagtgaaggtgagtcgcagactacaacacagtgatctctgctgatatcttattcttagtaaaatcctctgcagttgcaaaaaaaaatcaatattttaactgtttgctatctttgacatagaagagtttataatgtagtttgataggtaaaaatttcacgtgaaaaaatagccctataatgtagttatgataatgctgcatggtaagatacagtaagttcaaacgatagtgaaatcatttgtgtgtgtttttagaggagaccactcaggctgaatttgagcaaaggtttgaaaaataagttaaacctttacaaaaataaacagattgtaattgctttttaaagattttttaaaaccatacaaatactaaatacttattatagaaagctcagacatatgagaag

SEQ ID NO: 314284 - DNA, 641 bp, Homo sapiens
tcaagagtcccccctagattgggaaaaatttggcaattctcaaaccattttccgtcaaagagtaaacaggacagtaaacttagagccgtagactccggttgatcggcagttatggcggcctctgagtcctggtggtatttctggcgcacctgcgaggtggactcctgcctgcgcaggaaacatgacagctgccctacaggcagctctgaagaacccccctatcaacaccaagagtcaggcagtgaaggtgagtcgcagactacaacacagtgatctctgctgatatcttattcttagtaaaatcctctgcagttgcaaaaaaaaatcaatattttaactgtttgctatctttgacatagaagagtttataatgtagtttgataggtaaaaatttcacgtgaaaaaatagccctataatgtagttatgataatgctgcatggtaagatacagtaagttcaaacgatagtgaaatcatttgtgtgtgtttttagaggagaccactcaggctgaatttgagcaaaggtttgaaaaataagttaaacctttacaaaaataaacagattgtaattgctttttaaagattttttaaaaccatacaaatactaaatacttattatagaaagctcagacatatgagaag

SEQ ID NO: 314285 - DNA, 2289 bp, Homo sapiens
gcgcctgcgcgctgtgtcctgcgcgctccttccctcgcgcgcgctctccgtggaagagcaggggcagcgtgggaggcgccaagggagcgcgaacctgaggaggaagaaacggggctagcgcgcaggcccagaacggtccgagccgcggcagtcggcgacgcctcagagcggaagagggaagtgaatcaggcgccgggtagtgggttgctgggctgggcttgctgaggtagaggcagcgccaagaagaggcctttgccgctggtcgggattgggatgtcgaagaacacagtgtcgtcggcccgcttccggaaggtggacgtggatgaatatgacgagaacaagttcgtggacgaagaagatgggggcgacggccaggccgggcccgacgagggcgaggtggactcctgcctgcggcaaggaaacatgacagctgccctacaggcagctctgaagaacccccctatcaacaccaagagtcaggcagtgaaggaccgggcaggcagcattgtcttgaaggtgctcatctcttttaaagctaatgatatagaaaaggcagttcaatctctggacaagaatggtgtggatctcctaatgaagtatatttataaaggatttgagagcccgtctgacaatagcagtgctatgttactgcaatggcatgaaaaggcacttgctgctggaggagtagggtccattgttcgtgtcttgactgcaagaaaaactgtgtagtctggcaggaagtggattatctgcctcgggagtgggaattgctggtacaaagaccaaaacaaccaaatgccaccgctgccctgtgggtagcatctgtttctctcagctttgccttcttgctttttcatatctgtaaagaaaaaaattacatatcagttgtcctttaatgaaaattgggataatatagaagaaattgtgttaaaatagaagtgtttcatcctttcaaaaccatttcagtgatgtttataccaatctgtatatagtataatttacattcaagtttaattgtgcaacttttaacccctgttggctggttttttgttctgttttgttttgtattatttttaactaatactgagagatttggtcagaatttgaggccagtttcctagctcattgctagtcaggaaatgatatttataaaaaatatgagagactggcagctattaacattgcaaaactggaccatatttcccttatttaataagcaaaatatgtttttggaataagtggtgggtgaataccactgctaagttatagctttgtttttgcttgcctcctgattatctgtactgtgggtttaagtatgctactttctctcagcatccaataatcatggcccctcaatttatttgtggtcacccagggttcagagcaagaagtcttgctttatacaaatgtatccataaaatatcagagcttgttgggcatgaacatcaaacttttgttccactaatatggctctgtttggaaaaaactgcaaatcagaaagaatgatttgcagaaagaaagaaaaactatggtgtaatttaaactctgggcagcctctgaatgaaatgctactttctttagaaatataatagctgccttagacattatgaggtatacaactagtatttaagataccatttaatatgccccgtaaatgtcttcagtgttcttcagggtagttgggatctcaaaagatttggttcagatccaaacaaatacacattctgtgttttagctcagtgttttctaaaaaaagaaactgccacacagcaaaaaattgtttactttgttggacaaaccaaatcagttctcaaaaaatgaccggtgcttataaaaagttataaatatcgagtagctctaaaacaaaccacctgaccaagagggaagtgagcttgtgcttagtatttacattggatgccagttttgtaatcactgacttatgtgcaaactggtgcagaaattctataaactctttgctgtttttgatacctgctttttgtttcattttgttttgttttgtaaaaatgataaaacttcagaaaataaaatgtcagtgttgaataaatttaaaaaaaaaacaaacaaaaacaaaaacacaaaaaaacaacaacaacaaaaaaaaaaaaaagaaaaagaagagaaacaaaacacaaaaaagaaagagcgaggaggaggggagcgagagaaacagagagagataccaccaccacggggagggagcggggaggggggcgggagaaaacagaggggggaggaggggggagaagcgagggggaggagggagacggg

SEQ ID NO: 314286 - DNA, 2010 bp, Homo sapiens
gcgcctgcgcgctgtgtcctgcgcgctccttccctcgcgcgcgctctccgtggaagagcaggggcagcgtgggaggcgccaagggagcgcgaacctgaggaggaagaaacggggctagcgcgcaggcccagaacggtccgagccgcggcagtcggcgacgcctcagagcggaagagggaagtgaatcaggcgccgggtagtgggttgctgggctgggcttgctgaggtagaggcagcgccaagaagaggcctttgccgctggtcgggattgggatgtcgaagaacacagtgtcgtcggcccgcttccggaaggtggacgtggatgaatatgacgagaacaagttcgtggacgaagaagatgggggcgacggccaggccgggcccgacgagggcgaggtggactcctgcctgcggcaaggaaacatgacagctgccctacaggcagctctgaagaacccccctatcaacaccaagagtcaggcagtgaaggaccgggcaggcagcattgtcttgaaggtgctcatctcttttaaagctaatgatatagaaaaggcagttcaatctctggacaagaatggtgtggatctcctaatgaagtatatttataaaggatttgagagcccgtctgacaatagcagtgctatgttactgcaatggcatgaaaaggcacttgctgctggaggagtagggtccattgttcgtgtcttgactgcaagaaaaactgtgtagtctggcaggaagtggattatctgcctcgggagtgggaattgctggtacaaagaccaaaacaaccaaatgccaccgctgccctgtgggtagcatctgtttctctcagctttgccttcttgctttttcatatctgtaaagaaaaaaattacatatcagttgtcctttaatgaaaattgggataatatagaagaaattgtgttaaaatagaagtgtttcatcctttcaaaaccatttcagtgatgtttataccaatctgtatatagtataatttacattcaagtttaattgtgcaacttttaacccctgttggctggttttttgttctgttttgttttgtattatttttaactaatactgagagatttggtcagaatttgaggccagtttcctagctcattgctagtcaggaaatgatatttataaaaaatatgagagactggcagctattaacattgcaaaactggaccatatttcccttatttaataagctgtttttgcttgcctcctgattatctgtactgtgggtttaagtatgctactttctctcagcatccaataatcatggcccctcaatttatttgtggtcacccagggttcagagcaagaagtcttgctttatacaaatgtatccataaaatatcagagcttgttgggcatgaacatcaaacttttgttccactaatatggctctgtttggaaaaaactgcaaatcagaaagaatgatttgcagaaagaaagaaaaactatggtgtaatttaaactctgggcagcctctgaatgaaatgctactttctttagaaatataatagctgccttagacattatgaggtatacaactagtatttaagataccatttaatatgccccgtaaatgtcttcagtgttcttcagggtagttgggatctcaaaagatttggttcagatccaaacaaatacacattctgtgttttagctcagtgttttctaaaaaaagaaactgccacacagcaaaaaattgtttactttgttggacaaaccaaatcagttctcaaaaaatgaccggtgcttataaaaagttataaatatcgagtagctctaaaacaaaccacctgaccaagagggaagtgagcttgtgcttagtatttacattggatgccagttttgtaatcactgacttatgtgcaaactggtgcagaaattctataaactctttgctgtttttgatacctgctttttgtttcattttgttttgttttgtaaaaatgataaaacttcagaaaataaaatgtcagtgttgaataa

SEQ ID NO: 314287 - DNA, 1829 bp, Homo sapiens
gcgcctgcgcgctgtgtcctgcgcgctccttccctcgcgcgcgctctccgtggaagagcaggggcagcgtgggaggcgccaagggagcgcgaacctgaggaggaagaaacggggctagcgcgcaggcccagaacggtccgagccgcggcagtcggcgacgcctcagagcggaagagggaagtgaatcaggcgccgggtagtgggttgctgggctgggcttgctgaggtagaggcagcgccaagaagaggcctttgccgctggtcgggattgggatgtcgaagaacacagtgtcgtcggcccgcttccggaaggtggacgtggatgaatatgacgagaacaagttcgtggacgaagaagatgggggcgacggccaggccgggcccgacgagggcgaggtggactcctgcctgcggcaaggaaacatgacagctgccctacaggcagctctgaagaacccccctatcaacaccaagagtcaggcagtgaaggaccgggcaggcagcattgtcttgaaggtgctcatctcttttaaagctaatgatatagaaaaggcagttcaatctctggacaagaatggtgtggatctcctaatgaagtatatttataaaggatttgagagcccgtctgacaatagcagtgctatgttactgcaatggcatgaaaaggcacttgctgctggaggagtagggtccattgttcgtgtcttgactgcaagaaaaactgtgtagtctggcaggaagtggattatctgcctcgggagtgggaattgctggtacaaagaccaaaacaaccaaatgccaccgctgccctgtgggtagcatctgtttctctcagctttgccttcttgctttttcatatctgtaaagaaaaaaattacatatcagttgtcctttaatgaaaattgggataatatagaagaaattgtgttaaaatagaagtgtttcatcctttcaaaaccatttcagtgatgtttataccaatctgtatatagtataatttacattcaagtttaattgtgcaacttttaacccctgttggctggttttttgttctgttttgttttgtattatttttaactaatactgagagatttggtcagaatttgaggccagtttcctagctcattgctagtcaggaaatgatatttataaaaaatatgagagactggcagctattaacattgcaaaactggaccatatttcccttatttaataagcaaaatatgtttttggaataagtggtgggtgaataccactgctaagttatagctttgtttttgcttgcctcctgattatctgtactgtgggtttaagtatgctactttctctcagcatccaataatcatggcccctcaatttatttgtggtcacccagggttcagagcaagaagtcttgctttatacaaatgtatccataaaatatcagagcttgttgggcatgaacatcaaacttttgttccactaatatggctctgtttggaaaaaactgcaaatcagaaagaatgatttgcagaaagaaagaaactgccacacagcaaaaaattgtttactttgttggacaaaccaaatcagttctcaaaaaatgaccggtgcttataaaaagttataaatatcgagtagctctaaaacaaaccacctgaccaagagggaagtgagcttgtgcttagtatttacattggatgccagttttgtaatcactgacttatgtgcaaactggtgcagaaattctataaactctttgctgtttttgatacctgctttttgtttcattttgttttgttttgtaaaaatgataaaacttcagaaaataaaatgtcagtgttgaataa

SEQ ID NO: 314288 - DNA, 2077 bp, Homo sapiens
  misc_feature (1425)..(1425): n is a, c, g, or t
  misc_feature (1429)..(1429): n is a, c, g, or t
  misc_feature (1438)..(1438): n is a, c, g, or t
  misc_feature (1447)..(1447): n is a, c, g, or t
  misc_feature (1450)..(1450): n is a, c, g, or t
  misc_feature (1455)..(1455): n is a, c, g, or t
  misc_feature (1461)..(1461): n is a, c, g, or t
  misc_feature (1475)..(1475): n is a, c, g, or t
  misc_feature (1497)..(1497): n is a, c, g, or t
  misc_feature (1502)..(1502): n is a, c, g, or t
  misc_feature (1508)..(1508): n is a, c, g, or t
  misc_feature (1512)..(1512): n is a, c, g, or t
  misc_feature (1518)..(1518): n is a, c, g, or t
  misc_feature (1524)..(1524): n is a, c, g, or t
  misc_feature (1539)..(1539): n is a, c, g, or t
  misc_feature (1557)..(1557): n is a, c, g, or t
  misc_feature (1572)..(1572): n is a, c, g, or t
  misc_feature (1577)..(1577): n is a, c, g, or t
  misc_feature (1582)..(1582): n is a, c, g, or t
  misc_feature (1586)..(1586): n is a, c, g, or t
  misc_feature (1610)..(1610): n is a, c, g, or t
  misc_feature (1621)..(1621): n is a, c, g, or t
  misc_feature (1630)..(1630): n is a, c, g, or t
  misc_feature (1648)..(1648): n is a, c, g, or t
  misc_feature (1663)..(1663): n is a, c, g, or t
  misc_feature (1669)..(1670): n is a, c, g, or t
  misc_feature (1672)..(1672): n is a, c, g, or t
  misc_feature (1674)..(1674): n is a, c, g, or t
  misc_feature (1679)..(1680): n is a, c, g, or t
  misc_feature (1688)..(1688): n is a, c, g, or t
gcgcctgcgcgctgtgtcctgcgcgctccttccctcgcgcgcgctctccgtggaagagcaggggcagcgtgggaggcgccaagggagcgcgaacctgaggaggaagaaacggggctagcgcgcaggcccagaacggtccgagccgcggcagtcggcgacgcctcagagcggaagagggaagtgaatcaggcgccgggtagtgggttgctgggctgggcttgctgaggtagaggcagcgccaagaagaggcctttgccgctggtcgggattgggatgtcgaagaacacagtgtcgtcggcccgcttccggaaggtggacgtggatgaatatgacgagaacaagttcgtggacgaagaagatgggggcgacggccaggccgggcccgacgagggcgaggtggactcctgcctgcggcaaggaaacatgacagctgccctacaggcagctctgaagaacccccctatcaacaccaagagtcaggcagtgaaggaccgggcaggcagcattgtcttgaaggtgctcatctcttttaaagctaatgatatagaaaaggcagttcaatctctggacaagaatggtgtggatctcctaatgaagtatatttataaaggatttgagagcccgtctgacaatagcagtgctatgttactgcaatggcatgaaaaggcacttgctgctggaggagtagggtccattgttcgtgtcttgactgcaagaaaaactgtgtagtctggcaggaagtggattatctgcctcgggagtgggaattgctggtacaaagaccaaaacaaccaaatgccaccgctgccctgtgggtagcatctgtttctctcagctttgccttcttgctttttcatatctgtaaagaaaaaaattacatatcagttgtcctttaatgaaaattgggataatatagaagaaattgtgttaaaatagaagtgtttcatcctttcaaaaccatttcagtgatgtttataccaatctgtatatagtataatttacattcaagtttaattgtgcaacttttaacccctgttggctggttttttgttctgttttgttttgtattatttttaactaatactgagagatttggtcagaatttgaggccagtttcctagctcattgctagtcaggaaatgatatttataaaaaatatgagagactggcagctattaacattgcaaaactggaccatatttcccttatttaataagcaaaatatgtttttggaataagtggtgggtgaataccactgctaagttatagctttgtttttgcttgcctcctgattatctgtactgtgggtttaagtatgctactttctctcagcatccaataatcatggcccctcaatttatttgtggtcacccagggttcagagcaagaagtcttgcaaaaaacaaaagaaacacaaaaaaaaanaganaaaaaaagnaaaaaaaanaanaaaanataaanaaccaacaaaaaanacacaaaaaaggaaaaaacagnaaaanagaaanaaanaaaaanaaaaanaaagaaaaaaaaagnaaaaaaaaaaacacaagngcagccacaagaaanaaaancaaanaaanaaaagaaaaaaaaagcaaccaaanacataaagagnaaaacaacnagaaaaaaagaaacacanaaaaaaagaccccgnaaatanncnanagtanncaaacagnaaagttgggatctcaaaagatttggttcagatccaaacaaatacacattctgtgttttagctcagtgttttctaaaaaaagaaactgccacacagcaaaaaattgtttactttgttggacaaaccaaatcagttctcaaaaaatgaccggtgcttataaaaagttataaatatcgagtagctctaaaacaaaccacctgaccaagagggaagtgagcttgtgcttagtatttacattggatgccagttttgtaatcactgacttatgtgcaaactggtgcagaaattctataaactctttgctgtttttgatacctgctttttgtttcattttgttttgttttgtaaaaatgataaaacttcagaaaataaaatgtcagtgttgaataa

SEQ ID NO: 314289 - DNA, 1755 bp, Homo sapiens
ggccccagagagcaggcgctgggcagtgtggaggtcgttggagtcacttccgcgtcaccagctcctgtgcctgccagtcggtgcccctcccgctcctgcctgcggcaaggaaacatgacagctgccctacaggcagctctgaagaacccccctatcaacaccaagagtcaggcagtgaaggaccgggcaggcagcattgtcttgaaggtgctcatctcttttaaagctaatgatatagaaaaggcagttcaatctctggacaagaatggtgtggatctcctaatgaagtatatttataaaggatttgagagcccgtctgacaatagcagtgctatgttactgcaatggcatgaaaaggcacttgctgctggaggagtagggtccattgttcgtgtcttgactgcaagaaaaactgtgtagtctggcaggaagtggattatctgcctcgggagtgggaattgctggtacaaagaccaaaacaaccaaatgccaccgctgccctgtgggtagcatctgtttctctcagctttgccttcttgctttttcatatctgtaaagaaaaaaattacatatcagttgtcctttaatgaaaattgggataatatagaagaaattgtgttaaaatagaagtgtttcatcctttcaaaaccatttcagtgatgtttataccaatctgtatatagtataatttacattcaagtttaattgtgcaacttttaacccctgttggctggttttttgttctgttttgttttgtattatttttaactaatactgagagatttggtcagaatttgaggccagtttcctagctcattgctagtcaggaaatgatatttataaaaaatatgagagactggcagctattaacattgcaaaactggaccatatttcccttatttaataagcaaaatatgtttttggaataagtggtgggtgaataccactgctaagttatagctttgtttttgcttgcctcctgattatctgtactgtgggtttaagtatgctactttctctcagcatccaataatcatggcccctcaatttatttgtggtcacccagggttcagagcaagaagtcttgctttatacaaatgtatccataaaatatcagagcttgttgggcatgaacatcaaacttttgttccactaatatggctctgtttggaaaaaactgcaaatcagaaagaatgatttgcagaaagaaagaaaaactatggtgtaatttaaactctgggcagcctctgaatgaaatgctactttctttagaaatataatagctgccttagacattatgaggtatacaactagtatttaagataccatttaatatgccccgtaaatgtcttcagtgttcttcagggtagttgggatctcaaaagatttggttcagatccaaacaaatacacattctgtgttttagctcagtgttttctaaaaaaagaaactgccacacagcaaaaaattgtttactttgttggacaaaccaaatcagttctcaaaaaatgaccggtgcttataaaaagttataaatatcgagtagctctaaaacaaaccacctgaccaagagggaagtgagcttgtgcttagtatttacattggatgccagttttgtaatcactgacttatgtgcaaactggtgcagaaattctataaactctttgctgtttttgatacctgctttttgtttcattttgttttgttttgtaaaaatgataaaacttcagaaaataaaatgtcagtgttgaataa

SEQ ID NO: 314290 - DNA, 2170 bp, Homo sapiens
catcaatattgagagattgctaatgtgtatcattcagattgctaatctgccagcatgttctaccagcatttcagataatacagaatatggttctagcaaaagtttggtctttattttttcaattagaatcacaggaaaagacatattttggttgataataggttatttcatttgggggactaataattctgatatatattttaggatttctttaacaccactctaggtaatgtttgcatatgtatctcactgggaaatgaaagactatcaaggtgttcacttgatagttagaaccaagggtgaaacagtctttgctttattaaaaaaaagtctaatgttctattttgcttttgatattttgcctttgattaacatcctggaaaccaacacattgaatttccagtattgaacatagtgaccaaagtaattttctttttatatgtaaatcaagtcataagaaccagtggttataatgctttcctgggggccatcctttgctgttacacccttaacttccatcacaggaaacatgacagctgccctacaggcagctctgaagaacccccctatcaacaccaagagtcaggcagtgaaggaccgggcaggcagcattgtcttgaaggtgctcatctcttttaaagctaatgatatagaaaaggcagttcaatctctggacaagaatggtgtggatctcctaatgaagtatatttataaaggatttgagagcccgtctgacaatagcagtgctatgttactgcaatggcatgaaaaggcacttgctgctggaggagtagggtccattgttcgtgtcttgactgcaagaaaaactgtgtagtctggcaggaagtggattatctgcctcgggagtgggaattgctggtacaaagaccaaaacaaccaaatgccaccgctgccctgtgggtagcatctgtttctctcagctttgccttcttgctttttcatatctgtaaagaaaaaaattacatatcagttgtcctttaatgaaaattgggataatatagaagaaattgtgttaaaatagaagtgtttcatcctttcaaaaccatttcagtgatgtttataccaatctgtatatagtataatttacattcaagtttaattgtgcaacttttaacccctgttggctggttttttgttctgttttgttttgtattatttttaactaatactgagagatttggtcagaatttgaggccagtttcctagctcattgctagtcaggaaatgatatttataaaaaatatgagagactggcagctattaacattgcaaaactggaccatatttcccttatttaataagcaaaatatgtttttggaataagtggtgggtgaataccactgctaagttatagctttgtttttgcttgcctcctgattatctgtactgtgggtttaagtatgctactttctctcagcatccaataatcatggcccctcaatttatttgtggtcacccagggttcagagcaagaagtcttgctttatacaaatgtatccataaaatatcagagcttgttgggcatgaacatcaaacttttgttccactaatatggctctgtttggaaaaaactgcaaatcagaaagaatgatttgcagaaagaaagaaaaactatggtgtaatttaaactctgggcagcctctgaatgaaatgctactttctttagaaatataatagctgccttagacattatgaggtatacaactagtatttaagataccatttaatatgccccgtaaatgtcttcagtgttcttcagggtagttgggatctcaaaagatttggttcagatccaaacaaatacacattctgtgttttagctcagtgttttctaaaaaaagaaactgccacacagcaaaaaattgtttactttgttggacaaaccaaatcagttctcaaaaaatgaccggtgcttataaaaagttataaatatcgagtagctctaaaacaaaccacctgaccaagagggaagtgagcttgtgcttagtatttacattggatgccagttttgtaatcactgacttatgtgcaaactggtgcagaaattctataaactctttgctgtttttgatacctgctttttgtttcattttgttttgttttgtaaaaatgataaaacttcagaaaataaaatgtcagtgttgaataa

SEQ ID NO: 314291 - DNA, 495 bp, Homo sapiens
ttagacattatgaggtatacaactagtatttaagataccatttaatatgccccgtaaatgtcttcagtgttcttcagggtagttgggatctcaaaagatttggttcagatccaaacaaatacacattctgtgttttagctcagtgttttctaaaaaaagaaactgccacacagcaaaaaattgtttactttgttggacaaaccaaatcagttctcaaaaaatgaccggtgcttataaaaagttataaatatcgagtagctctaaaacaaaccacctgaccaagagggaagtgagcttgtgcttagtatttacattggatgccagttttgtaatcactgacttatgtgcaaactggtgcagaaattctataaactctttgctgtttttgatacctgctttttgtttcattttgttttgttttgtaaaaatgataaaacttcagaaaataaaatgtcagtgttgaataaaatttatttttctctgactttaacaatt

SEQ ID NO: 314292 - DNA, 1023 bp, Homo sapiens
gcgcctgcgcgctgtgtcctgcgcgctccttccctcgcgcgcgctctccgtggaagagcaggggcagcgtgggaggcgccaagggagcgcgaacctgaggaggaagaaacggggctagcgcgcaggcccagaacggtccgagccgcggcagtcggcgacgcctcagagcggaagagggaagtgaatcaggcgccgggtagtgggttgctgggctgggcttgctgaggtagaggcagcgccaagaagaggcctttgccgctggtcgggattgggatgtcgaagaacacagtgtcgtcggcccgcttccggaaggtggacgtggatgaatatgacgagaacaagttcgtggacgaagaagatgggggcgacggccaggccgggcccgacgagggcgaggtggactcctgcctgcggcaaggaaacatgacagctgccctacaggcagctctgaagaacccccctatcaacaccaagagtcaggcagtgaaggaccgggcaggcagcattgtcttgaaggtgctcatctcttttaaagctaatgatatagaaaaggcagttcaatctctggacaagaatggtgtggatctcctaatgaagtatatttataaaggatttgagagcccgtctgacaatagcagtgctatgttactgcaatggcatgaaaaggcacttgctgctggaggagtagggtccattgttcgtgtcttgactgcaagaaaaactgtgtagtctggcaggaagtggattatctgcctcgggagtgggaattgctggtacaaagaccaaaacaaccaaatgccaccgctgccctgtgggtagcatctgtttctctcaggttgctcttgtttttatttggagaaaaatctttagtgcttatgaatgggtaacttgagacctggtgctgacggttttcgtaacgttggtgttacagtttagaagcgcgggatggataacgggggtggtggggattaacggaggaaggggcctgagattagaggaaaggataaaagggggataggtgaa

SEQ ID NO: 314293 - DNA, 2226 bp, Homo sapiens
gcgcctgcgcgctgtgtcctgcgcgctccttccctcgcgcgcgctctccgtggaagagcaggggcagcgtgggaggcgccaagggagcgcgaacctgaggaggaagaaacggggctagcgcgcaggcccagaacggtccgagccgcggcagtcggcgacgcctcagagcggaagagggaagtgaatcaggcgccgggtagtgggttgctgggctgggcttgctgaggtagaggcagcgccaagaagaggcctttgccgctggtcgggattgggatgtcgaagaacacagtgtcgtcggcccgcttccggaaggtggacgtggatgaatatgacgagaacaagttcgtggacgaagaagatgggggcgacggccaggccgggcccgacgagggcgaggtggactcctgcctgcggcaaggaaacatgacagctgccctacaggcagctctgaagaacccccctatcaacaccaagagtcaggcagtgaaggaccgggcaggcagcattgtcttgaaggtgctcatctcttttaaagctaatgatatagaaaaggcagttcaatctctggacaagaatggtgtggatctcctaatgaagtatatttataaaggatttgagagcccgtctgacaatagcagtgctatgttactgcaatggcatgaaaaggcacttgctgctggaggagtagggtccattgttcgtgtcttgactgcaagaaaaactgtgtagtctggcaggaagtggattatctgcctcgggagtgggaattgctggtacaaagaccaaaacaaccaaatgccaccgctgccctgtgggtagcatctgtttctctcagctttgccttcttgctttttcatatctgtaaagaaaaaaattacatatcagttgtcctttaatgaaaattgggataatatagaagaaattgtgttaaaatagaagtgtttcatcctttcaaaaccatttcagtgatgtttataccaatctgtatatagtataatttacattcaagtttaattgtgcaacttttaacccctgttggctggttttttgttctgttttgttttgtattatttttaactaatactgagagatttggtcagaatttgaggccagtttcctagctcattgctagtcaggaaatgatatttataaaaaatatgagagactggcagctattaacattgcaaaactggaccatatttcccttatttaataagcaaaatatgtttttggaataagtggtgggtgaataccactgctaagttatagctttgtttttgcttgcctcctgattatctgtactgtgggtttaagtatgctactttctctcagcatccaataatcatggcccctcaatttatttgtggtcacccagggttcagagcaagaagtcttgctttatacaaatgtatccataaaatatcagagcttgttgggcatgaacatcaaacttttgttccactaatatggctctgtttggaaaaaactgcaaatcagaaagaatgatttgcagaaagaaagaaaaactatggtgtaatttaaactctgggcagcctctgaatgaaatgctactttctttagaaatataatagctgccttagacattatgaggtatacaactagtatttaagataccatttaatatgccccgtaaatgtcttcagtgttcttcagggtagttgggatctcaaaagatttggttcagatccaaacaaatacacattctgtgttttagctcagtgttttctaaaaaaagaaactgccacacagcaaaaaattgtttactttgttggacaaaccaaatcagttctcaaaaaatgaccggtgcttataaaaagttataaatatcgagtagctctaaaacaaaccacctgaccaagagggaagtgagcttgtgcttagtatttacattggatgccagttttgtaatcactgacttatgtgcaaactggtgcagaaattctataaactctttgctgtttttgatacctgctttttgtttcattttgttttgttttgtaaaaatgataaaacttcagaaaataaaatgtcagtgttgaataaaaaataataaaaaaaaaataaattaaaacaaaaaaacaataaaaatacaatagtaaaattaactgatagtataaaatggaaccagcttttttgacactaggaaaaaaaccttgtagagagaagttaacataaaatggagctttttggggccttttgtcttcg

SEQ ID NO: 314294 - DNA, 2009 bp, Homo sapiens
gcgcctgcgcgctgtgtcctgcgcgctccttccctcgcgcgcgctctccgtggaagagcaggggcagcgtgggaggcgccaagggagcgcgaacctgaggaggaagaaacggggctagcgcgcaggcccagaacggtccgagccgcggcagtcggcgacgcctcagagcggaagagggaagtgaatcaggcgccgggtagtgggttgctgggctgggcttgctgaggtagaggcagcgccaagaagaggcctttgccgctggtcgggattgggatgtcgaagaacacagtgtcgtcggcccgcttccggaaggtggacgtggatgaatatgacgagaacaagttcgtggacgaagaagatgggggcgacggccaggccgggcccgacgagggcgaggtggactcctgcctgcggcaaggaaacatgacagctgccctacaggcagctctgaagaacccccctatcaacaccaagagtcaggcagtgaaggaccgggcaggcagcattgtcttgaaggtgctcatctcttttaaagctaatgatatagaaaaggcagttcaatctctggacaagaatggtgtggatctcctaatgaagtatatttataaaggatttgagagcccgtctgacaatagcagtgctatgttactgcaatggcatgaaaaggcacttgctgctggaggagtagggtccattgttcgtgtcttgactgcaagaaaaactgtgtagtctggcaggaagtggattatctgcctcgggagtgggaattgctggtacaaagaccaaaacaaccaaatgccaccgctgccctgtgggtagcatctgtttctctcagctttgccttcttgctttttcatatctgtaaagaaaaaaattacatatcagttgtcctttaatgaaaattgggataatatagaagaaattgtgttaaaatagaagtgtttcatcctttcaaaaccatttcagtgatgtttataccaatctgtatatagtataatttacattcaagtttaattgtgcaacttttaacccctgttggctggttttttgttctgttttgttttgtattatttttaactaatactgagagatttggtcagaatttgaggccagtttcctagctcattgctagtcaggaaatgatatttataaaaaatatgagagactggcagctattaacattgcaaaactggaccatatttcccttatttaataagcaaaatatgtttttggaataagtggtgggtgaataccactgctaagttatagctttgtttttgcttgcctcctgattatctgtactgtgggtttaagtatgctactttctctcagcatccaataatcatggcccctcaatttatttgtggtcacccagggttcagagcaagaagtcttgctttatacaaatgtatccataaaatatcagagcttgttgggcatgaacatcaaacttttgttccactaatatggctctgtttggaaaaaactgcaaatcagaaagaatgatttgcagaaagaaagtttagaaatataatagctgccttagacattatgaggtatacaactagtatttaagataccatttaatatgccccgtaaatgtcttcagtgttcttcagggtagttgggatctcaaaagatttggttcagatccaaacaaatacacattctgtgttttagctcagtgttttctaaaaaaagaaactgccacacagcaaaaaattgtttactttgttggacaaaccaaatcagttctcaaaaaatgaccggtgcttataaaaagttataaatatcgagtagctctaaaacaaaccacctgaccaagagggaagtgagcttgtgcttagtatttacattggatgccagttttgtaatcactgacttatgtgcaaactggtgcagaaattctataaactctttgctgtttttgatacctgctttttgtttcattttgttttgttttgtaaaaatgataaaacttcagaaaataaaatgtcagtgttgaataa

SEQ ID NO: 314295 - DNA, 1800 bp, Homo sapiens
  misc_feature (3)..(3): n is a, c, g, or t
ccngctgacatttttttagtatggaatgcaccttagcgatcagctaatttgaccttccatgaatatgacgagaacaagttcgtggacgaagaagatgggggcgacggccaggccgggcccgacgagggcgaggtggactcctgcctgcggcaaggaaacatgacagctgccctacaggcagctctgaagaacccccctatcaacaccaagagtcaggcagtgaaggaccgggcaggcagcattgtcttgaaggtgctcatctcttttaaagctaatgatatagaaaaggcagttcaatctctggacaagaatggtgtggatctcctaatgaagtatatttataaaggatttgagagcccgtctgacaatagcagtgctatgttactgcaatggcatgaaaaggcacttgctgctggaggagtagggtccattgttcgtgtcttgactgcaagaaaaactgtgtagtctggcaggaagtggattatctgcctcgggagtgggaattgctggtacaaagaccaaaacaaccaaatgccaccgctgccctgtgggtagcatctgtttctctcagctttgccttcttgctttttcatatctgtaaagaaaaaaattacatatcagttgtcctttaatgaaaattgggataatatagaagaaattgtgttaaaatagaagtgtttcatcctttcaaaaccatttcagtgatgtttataccaatctgtatatagtataatttacattcaagtttaattgtgcaacttttaacccctgttggctggttttttgttctgttttgttttgtattatttttaactaatactgagagatttggtcagaatttgaggccagtttcctagctcattgctagtcaggaaatgatatttataaaaaatatgagagactggcagctattaacattgcaaaactggaccatatttcccttatttaataagcaaaatatgtttttggaataagtggtgggtgaataccactgctaagttatagctttgtttttgcttgcctcctgattatctgtactgtgggtttaagtatgctactttctctcagcatccaataatcatggcccctcaatttatttgtggtcacccagggttcagagcaagaagtcttgctttatacaaatgtatccataaaatatcagagcttgttgggcatgaacatcaaacttttgttccactaatatggctctgtttggaaaaaactgcaaatcagaaagaatgatttgcagaaagaaagaaaaactatggtgtaatttaaactctgggcagcctctgaatgaaatgctactttctttagaaatataatagctgccttagacattatgaggtatacaactagtatttaagataccatttaatatgccccgtaaatgtcttcagtgttcttcagggtagttgggatctcaaaagatttggttcagatccaaacaaatacacattctgtgttttagctcagtgttttctaaaaaaagaaactgccacacagcaaaaaattgtttactttgttggacaaaccaaatcagttctcaaaaaatgaccggtgcttataaaaagttataaatatcgagtagctctaaaacaaaccacctgaccaagagggaagtgagcttgtgcttagtatttacattggatgccagttttgtaatcactgacttatgtgcaaactggtgcagaaattctataaactctttgctgtttttgatacctgctttttgtttcattttgttttgttttgtaaaaatgataaaacttcagaaaataaaatgtcagtgttgaataa

SEQ ID NO: 314296 - DNA, 1659 bp, Homo sapiens
  misc_feature (62)..(62): n is a, c, g, or t
gtggcggcccggggacgagtcgggggggggcgtggggatcgggatcgatcgctgctgccggngacgcagcacgggggtaggggcgaccgggcaggcagcattgtcttgaaggtgctcatctcttttaaagctaatgatatagaaaaggcagttcaatctctggacaagaatggtgtggatctcctaatgaagtatatttataaaggatttgagagcccgtctgacaatagcagtgctatgttactgcaatggcatgaaaaggcacttgctgctggaggagtagggtccattgttcgtgtcttgactgcaagaaaaactgtgtagtctggcaggaagtggattatctgcctcgggagtgggaattgctggtacaaagaccaaaacaaccaaatgccaccgctgccctgtgggtagcatctgtttctctcagctttgccttcttgctttttcatatctgtaaagaaaaaaattacatatcagttgtcctttaatgaaaattgggataatatagaagaaattgtgttaaaatagaagtgtttcatcctttcaaaaccatttcagtgatgtttataccaatctgtatatagtataatttacattcaagtttaattgtgcaacttttaacccctgttggctggttttttgttctgttttgttttgtattatttttaactaatactgagagatttggtcagaatttgaggccagtttcctagctcattgctagtcaggaaatgatatttataaaaaatatgagagactggcagctattaacattgcaaaactggaccatatttcccttatttaataagcaaaatatgtttttggaataagtggtgggtgaataccactgctaagttatagctttgtttttgcttgcctcctgattatctgtactgtgggtttaagtatgctactttctctcagcatccaataatcatggcccctcaatttatttgtggtcacccagggttcagagcaagaagtcttgctttatacaaatgtatccataaaatatcagagcttgttgggcatgaacatcaaacttttgttccactaatatggctctgtttggaaaaaactgcaaatcagaaagaatgatttgcagaaagaaagaaaaactatggtgtaatttaaactctgggcagcctctgaatgaaatgctactttctttagaaatataatagctgccttagacattatgaggtatacaactagtatttaagataccatttaatatgccccgtaaatgtcttcagtgttcttcagggtagttgggatctcaaaagatttggttcagatccaaacaaatacacattctgtgttttagctcagtgttttctaaaaaaagaaactgccacacagcaaaaaattgtttactttgttggacaaaccaaatcagttctcaaaaaatgaccggtgcttataaaaagttataaatatcgagtagctctaaaacaaaccacctgaccaagagggaagtgagcttgtgcttagtatttacattggatgccagttttgtaatcactgacttatgtgcaaactggtgcagaaattctataaactctttgctgtttttgatacctgctttttgtttcattttgttttgttttgtaaaaatgataaaacttcagaaaataaaatgtcagtgttgaataa

SEQ ID NO: 314297 - DNA, 336 bp, Homo sapiens
gcggccgcctactactactactgctcgaattcaagcttctaacgatgtacggggataccagatacaggtgaatacataggaactatctgcctgtgtcctcaatctcccttcaaacaagatgctgatttgtagggtacttggcaggttaaattaaaccagaagaggtgacttaataaaaaagggaatgacatttagggtataaagatctcataagaaatgtaatatgtaaattatatcttgctttatgttgtaaaatatacattgtttgcgctagaatagaaatgatttcttttcaataaaaagaaagaaggactctaccatgtcttttgttatata

SEQ ID NO: 314298 - DNA, 5081 bp, Homo sapiens
ggaaaggaggaagaaggagattgtgatggagaaagggggtctgtgaaacgtcaggcacagcacaaaggctttgccacgtaattacaggctcctattaagtcgagatctgccctcccaggggtctccaattttcttgtattccctacaaagcctcctctgcatgccagtttgtgccttttgaagtgccagagagcttcttgatccaactgagaaggaaaaaggagcccagcaagaagagggggagagagagaaggggaaaggggggaacccaccagcaccctccgtcggactcttgaagccttttttttttaattcttaatttttttttttactctttacaaaaagtaaagtgagaatcctgctctctaatacatctgcaagacatcaccctctcctcctgaaactttagtcactcctgagaatccacaggagtgcagagaggggggaacacgttttcttgaagatgttttaaagctggaacaagccttcttctgttggtgcttgaactcttgcctgggaataacttttttaacctttaaaaaaaccattcactttgattcttctctcccaccccttcttctctcttcttctgtttgcctaactcccccgccctgctggcctccgctttcctctctcccccttgttgttatttttagtctgtgcgtgtggacacttttggagagttggaagggatttttttctcctgacttgaacatagggtgactttttaatattgtattttagtgtggattatctctttggaccgcgccggacttggcctcaggaaagcaaccaaggctgcggaaggcggctggtgcagaacgctctgctctacagaagggggtcccccgccctcttttccaattttttttttttggccttcctctccttccctccctcttcctccctctctctctctctctctccactacccccctctttcttccccactcggctcctctcccccctcgcgcccacagcgtttggtgttgattcgagcgggaagaggggggtgggtgggatcggtgggggagaccatgacctccagctacgggcacgttctggagcggcaaccggcgctgggcggccgcttggacagcccgggcaacctcgacaccctgcaggcgaaaaagaacttctccgtcagtcacctgctagacctggaggaagccggggacatggtggcggcacaggcggatgagaacgtgggcgaggctggccggagcctgctggagtcgccgggactcaccagcggcagcgacaccccgcagcaggacaatgaccagctgaactcagaagaaaaaaagaagagaaagcagcgaaggaataggacaaccttcaatagcagccagctgcaggctttggagcgtgtctttgagcggacacactatcctgatgcttttgtgcgagaagaccttgcccgccgggtgaacctcaccgaggcgagagtgcaggtgtggtttcagaaccgaagagccaagttccgcaggaatgagagagccatgctagccaataaaaacgcttccctcctcaaatcctactcaggagacgtgactgctgtggagcagcccatcgtacctcgtcctgctccgagacccaccgattatctctcctgggggacagcgtctccgtacagatcctcgtccctcccaagatgttgtttacacgaggggcttcataacggattctaacggaagacactgaaaagcgccatggctacttattctgccacatgtgccaacaatagccctgcacagggcatcaacatggccaacagcattgccaacctgagactgaaggccaaggaatatagtttacagaggaaccaggtgccaacagtcaactgaggaaaaaaaataattaaacaggcctaagaagaaatcaaaaaccataagacacctatcctgctctgttatttcttcatctgctggggggaaaaagtaaattacaaacaaacaaacaaagcagaactaaaatattgggaccatggcagagaaaagcaggagaggagcaaaatgaaaattagttaacaaatgttcctcctccctctgggataccaccaccacttgtttctgtgtgtgtttattttgtttttctttcattcatgctttgcttaatgtactccaggcttcttcagataggttcagcccacccacccccatgattgtatgaagttttaaaaaaaactacagcagccaaagaaactatatatatatatatatatatatatatccagaatgattgcctctactgtcctcattgacttgtttgaaccttagtgccttaccctgtcctcttcccagttctctttatagaagctctaggagctttcgaaaagccaaagtctttctgaagaatctgtgctggacagacataattccctttctcattgtctccatctttgttggtcatggtaaggtttttccatcagcctctgaaaaaatagttgtgcacaacatctgctcactggactgtctgatccaatgtaattggctgcgtctggctaattctaagcactaaagtctacatctaagctatagatttaagcttgaagctacagattatatcactatcaccaccacccctcaccctatgcaatcaatcaatcaatcatcttaagttaaagatatttgttgtctttgaatgatttgctgtcacagactatttggtagaagaaatatttttcacctgagagaggaagagaaatttctctagtaacacaaagagtgagttctaaaaggcatgcccacatctctttcgtgccttaaggatagtgagatgcacacttatatatatactgtatatatttatatatttatatatatatttcatatatatatataatattgcaagcttaagtttgcaatttcccaaacaatacaaaaagcaaattacacaccctcaccactgttcttatctctatagtgatgaaacattaattagggatcttgctgcttttctttttctacacgaagttttcattaaagccacagaataattgatagggcagctgtttgagaacaggtcccattttcacattagggctttaaatgaattagaaactatttgaggctataaaaatgtccttgagtttggagcctgagctctggtgaaatgctgatacatctgatctatcatgggaattgcagttagagagagtaaggaataccatttagtcatctatccgttcttcacttagcaggaatatgaaagaaaggcacatgtttaagaggaatacctaaaggtttttctaaattccaacatttaaaaggcaattgtgggctatttttattttttaatattttgaaataaagtttagtgtctagggctgggagccaggactgatcttccatttctttttctttgttcccagccatgcttttgtaacttgccaggtggacttgaccaactacattaccatgctgtgcctcagtttacccatttgtaaaatgggattaataatacttacctacctcacaggggtgttgtgaggctctattcatttgctcctttattctttcctgtattctctgtatgtccagcactttgtagccatgggaggaaagggactataaaagtgtacaatgttaatggaatgatacggtacctgaaagccttgttttctagtaagaaaatgctaccttgctgtacatacttataaccttgtatttggaaatgagaaataggtttatattttcagatctctcaaaaatcacatcatttgaccaaagaataatttaagacacatagaacagatttttttaatttatattttcatcctgaccagcttagttctaataatttttagttgtgagtgattaaaaaactttggatcaattttggtcaaacatgccaactttgtagtctgagtgacaggcaagggatttttgggtttaagatgcacttttagcacacatttgtatttcccttggcatatcagattgagctaatggtgatgttatttcaatctaacagccaccaatctgaaattgtatttcaaatgttgattctgtagttctttaaataataatgaagctcatcttatacattttgctttcaccaattgattccttcttcttttagcccactattaaaacatttcttactgaatggttcatgtaggcttgctgaacagcacgcattacttgcttcctgaagagttcccccattcatccatttgtcccattagttgctgtggattatcaagttttgaaggaactgtacatcccaacagactgaaacattctaagtgaaatgagtataatccaagtaactggtgaactttggaggtttggagcttgaagagaatggctaagaagatttgaattatagggagggaacagaaatcatacatgaaaaggttttactgagaaggggaaaaccttagatagagggacatgtgaaacaaaatcatttgaaattttgattcagacatccatttccagtggcaaacagcaaagcctgaacccataaacccaaatgataggtgaagttgggtggttttatccaatgtctcaagcaagcaatgtctgggaatatcatagagtaacaagtgctggtcagccaaagaaacattcactgctggtgaaccaataccataagcatgtattatctaagcacttgatcaagaaatatacatgttgtacaagctctcaattttgttcatttattatcaaatttttaaaatacaagtttggtatgtgatttggaaaagatgccttctggatcttaagccagttgtcagtggaggtcctcagggctgcaaatgtcaagacataaccctgttcctcaccatcatgataccagatacaggtgaatacataggaactatctgcctgtgtcctcaatctcccttcaaacaagatgctgatttgtagggtacttggcaggttaaattaaaccagaagaggtgacttaataaaaaagggaatgacatttagggtataaagatctcataagaaatgtaatatgtaaattatatcttgctttatgttgtaaaatatacattgtttgcgctagaatagaaatgatttcttttcaataaaaagaaagaaggactctaccatgtcttttgttatata

SEQ ID NO: 314299 - DNA, 4680 bp, Homo sapiens
ggaaaggaggaagaaggagattgtgatggagaaagggggtctgtgaaacgtcaggcacagcacaaaggctttgccacgtaattacaggctcctattaagtcgagatctgccctcccaggggtctccaattttcttgtattccctacaaagcctcctctgcatgccagtttgtgccttttgaagtgccagagagcttcttgatccaactgagaaggaaaaaggagcccagcaagaagagggggagagagagaaggggaaaggggggaacccaccagcaccctccgtcggactcttgaagccttttttttttaattcttaatttttttttttactctttacaaaaagtaaagtgagaatcctgctctctaatacatctgcaagacatcaccctctcctcctgaaactttagtcactcctgagaatccacaggagtgcagagaggggggaacacgttttcttgaagatgttttaaagctggaacaagccttcttctgttggtgcttgaactcttgcctgggaataacttttttaacctttaaaaaaaccattcactttgatccttccctccctcttcctccctctctctctctctctctccactacccccctctttcttccccactcggctcctctcccccctcgcgcccacagcgtttggtgttgattcgagcgggaagaggggggtgggtgggatcggtgggggagaccatgacctccagctacgggcacgttctggagcggcaaccggcgctgggcggccgcttggacagcccgggcaacctcgacaccctgcaggcgaaaaagaacttctccgtcagtcacctgctagacctggaggaagccggggacatggtggcggcacaggcggatgagaacgtgggcgaggctggccggagcctgctggagtcgccgggactcaccagcggcagcgacaccccgcagcaggacaatgaccagctgaactcagaagaaaaaaagaagagaaagcagcgaaggaataggacaaccttcaatagcagccagctgcaggctttggagcgtgtctttgagcggacacactatcctgatgcttttgtgcgagaagaccttgcccgccgggtgaacctcaccgaggcgagagtgcaggtgtggtttcagaaccgaagagccaagttccgcaggaatgagagagccatgctagccaataaaaacgcttccctcctcaaatcctactcaggagacgtgactgctgtggagcagcccatcgtacctcgtcctgctccgagacccaccgattatctctcctgggggacagcgtctccgtacagcgccatggctacttattctgccacatgtgccaacaatagccctgcacagggcatcaacatggccaacagcattgccaacctgagactgaaggccaaggaatatagtttacagaggaaccaggtgccaacagtcaactgaggaaaaaaaataattaaacaggcctaagaagaaatcaaaaaccataagacacctatcctgctctgttatttcttcatctgctggggggaaaaagtaaattacaaacaaacaaacaaagcagaactaaaatattgggaccatggcagagaaaagcaggagaggagcaaaatgaaaattagttaacaaatgttcctcctccctctgggataccaccaccacttgtttctgtgtgtgtttattttgtttttctttcattcatgctttgcttaatgtactccaggcttcttcagataggttcagcccacccacccccatgattgtatgaagttttaaaaaaaactacagcagccaaagaaactatatatatatatatatatatatatatccagaatgattgcctctactgtcctcattgacttgtttgaaccttagtgccttaccctgtcctcttcccagttctctttatagaagctctaggagctttcgaaaagccaaagtctttctgaagaatctgtgctggacagacataattccctttctcattgtctccatctttgttggtcatggtaaggtttttccatcagcctctgaaaaaatagttgtgcacaacatctgctcactggactgtctgatccaatgtaattggctgcgtctggctaattctaagcactaaagtctacatctaagctatagatttaagcttgaagctacagattatatcactatcaccaccacccctcaccctatgcaatcaatcaatcaatcatcttaagttaaagatatttgttgtctttgaatgatttgctgtcacagactatttggtagaagaaatatttttcacctgagagaggaagagaaatttctctagtaacacaaagagtgagttctaaaaggcatgcccacatctctttcgtgccttaaggatagtgagatgcacacttatatatatactgtatatatttatatatttatatatatatttcatatatatatataatattgcaagcttaagtttgcaatttcccaaacaatacaaaaagcaaattacacaccctcaccactgttcttatctctatagtgatgaaacattaattagggatcttgctgcttttctttttctacacgaagttttcattaaagccacagaataattgatagggcagctgtttgagaacaggtcccattttcacattagggctttaaatgaattagaaactatttgaggctataaaaatgtccttgagtttggagcctgagctctggtgaaatgctgatacatctgatctatcatgggaattgcagttagagagagtaaggaataccatttagtcatctatccgttcttcacttagcaggaatatgaaagaaaggcacatgtttaagaggaatacctaaaggtttttctaaattccaacatttaaaaggcaattgtgggctatttttattttttaatattttgaaataaagtttagtgtctagggctgggagccaggactgatcttccatttctttttctttgttcccagccatgcttttgtaacttgccaggtggacttgaccaactacattaccatgctgtgcctcagtttacccatttgtaaaatgggattaataatacttacctacctcacaggggtgttgtgaggctctattcatttgctcctttattctttcctgtattctctgtatgtccagcactttgtagccatgggaggaaagggactataaaagtgtacaatgttaatggaatgatacggtacctgaaagccttgttttctagtaagaaaatgctaccttgctgtacatacttataaccttgtatttggaaatgagaaataggtttatattttcagatctctcaaaaatcacatcatttgaccaaagaataatttaagacacatagaacagatttttttaatttatattttcatcctgaccagcttagttctaataatttttagttgtgagtgattaaaaaactttggatcaattttggtcaaacatgccaactttgtagtctgagtgacaggcaagggatttttgggtttaagatgcacttttagcacacatttgtatttcccttggcatatcagattgagctaatggtgatgttatttcaatctaacagccaccaatctgaaattgtatttcaaatgttgattctgtagttctttaaataataatgaagctcatcttatacattttgctttcaccaattgattccttcttcttttagcccactattaaaacatttcttactgaatggttcatgtaggcttgctgaacagcacgcattacttgcttcctgaagagttcccccattcatccatttgtcccattagttgctgtggattatcaagttttgaaggaactgtacatcccaacagactgaaacattctaagtgaaatgagtataatccaagtaactggtgaactttggaggtttggagcttgaagagaatggctaagaagatttgaattatagggagggaacagaaatcatacatgaaaaggttttactgagaaggggaaaaccttagatagagggacatgtgaaacaaaatcatttgaaattttgattcagacatccatttccagtggcaaacagcaaagcctgaacccataaacccaaatgataggtgaagttgggtggttttatccaatgtctcaagcaagcaatgtctgggaatatcatagagtaacaagtgctggtcagccaaagaaacattcactgctggtgaaccaataccataagcatgtattatctaagcacttgatcaagaaatatacatgttgtacaagctctcaattttgttcatttattatcaaatttttaaaatacaagtttggtatgtgatttggaaaagatgccttctggatcttaagccagttgtcagtggaggtcctcagggctgcaaatgtcaagacataaccctgttcctcaccatcatgataccagatacaggtgaatacataggaactatctgcctgtgtcctcaatctcccttcaaacaagatgctgatttgtagggtacttggcaggttaaattaaaccagaagaggtgacttaataaaaaagggaatgacatttagggtataaagatctcataagaaatgtaatatgtaaattatatcttgctttatgttgtaaaatatacattgtttgcgctagaatagaaatgatttcttttcaataaaaagaaagaaggactctaccatgtcttttgttatata

SEQ ID NO: 314300 - DNA, 3679 bp, Homo sapiens
agaatttatgtttattaggcactaattctgggccaattctcaaaactatcctgtgtggtttcagaaccgaagagccaagttccgcaggaatgagagagccatgctagccaataaaaacgcttccctcctcaaatcctactcaggagacgtgactgctgtggagcagcccatcgtacctcgtcctgctccgagacccaccgattatctctcctgggggacagcgtctccgtacagatcctcgtccctcccaagatgttgtttacacgaggggcttcataacggattctaacggaagacactgaaaagcgccatggctacttattctgccacatgtgccaacaatagccctgcacagggcatcaacatggccaacagcattgccaacctgagactgaaggccaaggaatatagtttacagaggaaccaggtgccaacagtcaactgaggaaaaaaaataattaaacaggcctaagaagaaatcaaaaaccataagacacctatcctgctctgttatttcttcatctgctggggggaaaaagtaaattacaaacaaacaaacaaagcagaactaaaatattgggaccatggcagagaaaagcaggagaggagcaaaatgaaaattagttaacaaatgttcctcctccctctgggataccaccaccacttgtttctgtgtgtgtttattttgtttttctttcattcatgctttgcttaatgtactccaggcttcttcagataggttcagcccacccacccccatgattgtatgaagttttaaaaaaaactacagcagccaaagaaactatatatatatatatatatatatatatccagaatgattgcctctactgtcctcattgacttgtttgaaccttagtgccttaccctgtcctcttcccagttctctttatagaagctctaggagctttcgaaaagccaaagtctttctgaagaatctgtgctggacagacataattccctttctcattgtctccatctttgttggtcatggtaaggtttttccatcagcctctgaaaaaatagttgtgcacaacatctgctcactggactgtctgatccaatgtaattggctgcgtctggctaattctaagcactaaagtctacatctaagctatagatttaagcttgaagctacagattatatcactatcaccaccacccctcaccctatgcaatcaatcaatcaatcatcttaagttaaagatatttgttgtctttgaatgatttgctgtcacagactatttggtagaagaaatatttttcacctgagagaggaagagaaatttctctagtaacacaaagagtgagttctaaaaggcatgcccacatctctttcgtgccttaaggatagtgagatgcacacttatatatatactgtatatatttatatatttatatatatatttcatatatatatataatattgcaagcttaagtttgcaatttcccaaacaatacaaaaagcaaattacacaccctcaccactgttcttatctctatagtgatgaaacattaattagggatcttgctgcttttctttttctacacgaagttttcattaaagccacagaataattgatagggcagctgtttgagaacaggtcccattttcacattagggctttaaatgaattagaaactatttgaggctataaaaatgtccttgagtttggagcctgagctctggtgaaatgctgatacatctgatctatcatgggaattgcagttagagagagtaaggaataccatttagtcatctatccgttcttcacttagcaggaatatgaaagaaaggcacatgtttaagaggaatacctaaaggtttttctaaattccaacatttaaaaggcaattgtgggctatttttattttttaatattttgaaataaagtttagtgtctagggctgggagccaggactgatcttccatttctttttctttgttcccagccatgcttttgtaacttgccaggtggacttgaccaactacattaccatgctgtgcctcagtttacccatttgtaaaatgggattaataatacttacctacctcacaggggtgttgtgaggctctattcatttgctcctttattctttcctgtattctctgtatgtccagcactttgtagccatgggaggaaagggactataaaagtgtacaatgttaatggaatgatacggtacctgaaagccttgttttctagtaagaaaatgctaccttgctgtacatacttataaccttgtatttggaaatgagaaataggtttatattttcagatctctcaaaaatcacatcatttgaccaaagaataatttaagacacatagaacagatttttttaatttatattttcatcctgaccagcttagttctaataatttttagttgtgagtgattaaaaaactttggatcaattttggtcaaacatgccaactttgtagtctgagtgacaggcaagggatttttgggtttaagatgcacttttagcacacatttgtatttcccttggcatatcagattgagctaatggtgatgttatttcaatctaacagccaccaatctgaaattgtatttcaaatgttgattctgtagttctttaaataataatgaagctcatcttatacattttgctttcaccaattgattccttcttcttttagcccactattaaaacatttcttactgaatggttcatgtaggcttgctgaacagcacgcattacttgcttcctgaagagttcccccattcatccatttgtcccattagttgctgtggattatcaagttttgaaggaactgtacatcccaacagactgaaacattctaagtgaaatgagtataatccaagtaactggtgaactttggaggtttggagcttgaagagaatggctaagaagatttgaattatagggagggaacagaaatcatacatgaaaaggttttactgagaaggggaaaaccttagatagagggacatgtgaaacaaaatcatttgaaattttgattcagacatccatttccagtggcaaacagcaaagcctgaacccataaacccaaatgataggtgaagttgggtggttttatccaatgtctcaagcaagcaatgtctgggaatatcatagagtaacaagtgctggtcagccaaagaaacattcactgctggtgaaccaataccataagcatgtattatctaagcacttgatcaagaaatatacatgttgtacaagctctcaattttgttcatttattatcaaatttttaaaatacaagtttggtatgtgatttggaaaagatgccttctggatcttaagccagttgtcagtggaggtcctcagggctgcaaatgtcaagacataaccctgttcctcaccatcatgataccagatacaggtgaatacataggaactatctgcctgtgtcctcaatctcccttcaaacaagatgctgatttgtagggtacttggcaggttaaattaaaccagaagaggtgacttaataaaaaagggaatgacatttagggtataaagatctcataagaaatgtaatatgtaaattatatcttgctttatgttgtaaaatatacattgtttgcgctagaatagaaatgatttcttttcaataaaaagaaagaaggactctaccatgtcttttgttatata

SEQ ID NO: 314301 - DNA, 3607 bp, Homo sapiens
agaatttatgtttattaggcactaattctgggccaattctcaaaactatcctgtgtggtttcagaaccgaagagccaagttccgcaggaatgagagagccatgctagccaataaaaacgcttccctcctcaaatcctactcaggagacgtgactgctgtggagcagcccatcgtacctcgtcctgctccgagacccaccgattatctctcctgggggacagcgtctccgtacagcgccatggctacttattctgccacatgtgccaacaatagccctgcacagggcatcaacatggccaacagcattgccaacctgagactgaaggccaaggaatatagtttacagaggaaccaggtgccaacagtcaactgaggaaaaaaaataattaaacaggcctaagaagaaatcaaaaaccataagacacctatcctgctctgttatttcttcatctgctggggggaaaaagtaaattacaaacaaacaaacaaagcagaactaaaatattgggaccatggcagagaaaagcaggagaggagcaaaatgaaaattagttaacaaatgttcctcctccctctgggataccaccaccacttgtttctgtgtgtgtttattttgtttttctttcattcatgctttgcttaatgtactccaggcttcttcagataggttcagcccacccacccccatgattgtatgaagttttaaaaaaaactacagcagccaaagaaactatatatatatatatatatatatatatccagaatgattgcctctactgtcctcattgacttgtttgaaccttagtgccttaccctgtcctcttcccagttctctttatagaagctctaggagctttcgaaaagccaaagtctttctgaagaatctgtgctggacagacataattccctttctcattgtctccatctttgttggtcatggtaaggtttttccatcagcctctgaaaaaatagttgtgcacaacatctgctcactggactgtctgatccaatgtaattggctgcgtctggctaattctaagcactaaagtctacatctaagctatagatttaagcttgaagctacagattatatcactatcaccaccacccctcaccctatgcaatcaatcaatcaatcatcttaagttaaagatatttgttgtctttgaatgatttgctgtcacagactatttggtagaagaaatatttttcacctgagagaggaagagaaatttctctagtaacacaaagagtgagttctaaaaggcatgcccacatctctttcgtgccttaaggatagtgagatgcacacttatatatatactgtatatatttatatatttatatatatatttcatatatatatataatattgcaagcttaagtttgcaatttcccaaacaatacaaaaagcaaattacacaccctcaccactgttcttatctctatagtgatgaaacattaattagggatcttgctgcttttctttttctacacgaagttttcattaaagccacagaataattgatagggcagctgtttgagaacaggtcccattttcacattagggctttaaatgaattagaaactatttgaggctataaaaatgtccttgagtttggagcctgagctctggtgaaatgctgatacatctgatctatcatgggaattgcagttagagagagtaaggaataccatttagtcatctatccgttcttcacttagcaggaatatgaaagaaaggcacatgtttaagaggaatacctaaaggtttttctaaattccaacatttaaaaggcaattgtgggctatttttattttttaatattttgaaataaagtttagtgtctagggctgggagccaggactgatcttccatttctttttctttgttcccagccatgcttttgtaacttgccaggtggacttgaccaactacattaccatgctgtgcctcagtttacccatttgtaaaatgggattaataatacttacctacctcacaggggtgttgtgaggctctattcatttgctcctttattctttcctgtattctctgtatgtccagcactttgtagccatgggaggaaagggactataaaagtgtacaatgttaatggaatgatacggtacctgaaagccttgttttctagtaagaaaatgctaccttgctgtacatacttataaccttgtatttggaaatgagaaataggtttatattttcagatctctcaaaaatcacatcatttgaccaaagaataatttaagacacatagaacagatttttttaatttatattttcatcctgaccagcttagttctaataatttttagttgtgagtgattaaaaaactttggatcaattttggtcaaacatgccaactttgtagtctgagtgacaggcaagggatttttgggtttaagatgcacttttagcacacatttgtatttcccttggcatatcagattgagctaatggtgatgttatttcaatctaacagccaccaatctgaaattgtatttcaaatgttgattctgtagttctttaaataataatgaagctcatcttatacattttgctttcaccaattgattccttcttcttttagcccactattaaaacatttcttactgaatggttcatgtaggcttgctgaacagcacgcattacttgcttcctgaagagttcccccattcatccatttgtcccattagttgctgtggattatcaagttttgaaggaactgtacatcccaacagactgaaacattctaagtgaaatgagtataatccaagtaactggtgaactttggaggtttggagcttgaagagaatggctaagaagatttgaattatagggagggaacagaaatcatacatgaaaaggttttactgagaaggggaaaaccttagatagagggacatgtgaaacaaaatcatttgaaattttgattcagacatccatttccagtggcaaacagcaaagcctgaacccataaacccaaatgataggtgaagttgggtggttttatccaatgtctcaagcaagcaatgtctgggaatatcatagagtaacaagtgctggtcagccaaagaaacattcactgctggtgaaccaataccataagcatgtattatctaagcacttgatcaagaaatatacatgttgtacaagctctcaattttgttcatttattatcaaatttttaaaatacaagtttggtatgtgatttggaaaagatgccttctggatcttaagccagttgtcagtggaggtcctcagggctgcaaatgtcaagacataaccctgttcctcaccatcatgataccagatacaggtgaatacataggaactatctgcctgtgtcctcaatctcccttcaaacaagatgctgatttgtagggtacttggcaggttaaattaaaccagaagaggtgacttaataaaaaagggaatgacatttagggtataaagatctcataagaaatgtaatatgtaaattatatcttgctttatgttgtaaaatatacattgtttgcgctagaatagaaatgatttcttttcaataaaaagaaagaaggactctaccatgtcttttgttatata

SEQ ID NO: 314302 - DNA, 3549 bp, Homo sapiens
tcagcagtgaagtcctcaagtgaggaatattattggtaaccagagctgcaagaaagcatgtccactaaatgaagcatagtgtgatactaatctagagcagggctcttcagagattgctgtgcacaggaaacatctgggatcgcgtgactgtgcaaactctgattcactaattccagcgccatggctacttattctgccacatgtgccaacaatagccctgcacagggcatcaacatggccaacagcattgccaacctgagactgaaggccaaggaatatagtttacagaggaaccaggtgccaacagtcaactgaggaaaaaaaataattaaacaggcctaagaagaaatcaaaaaccataagacacctatcctgctctgttatttcttcatctgctggggggaaaaagtaaattacaaacaaacaaacaaagcagaactaaaatattgggaccatggcagagaaaagcaggagaggagcaaaatgaaaattagttaacaaatgttcctcctccctctgggataccaccaccacttgtttctgtgtgtgtttattttgtttttctttcattcatgctttgcttaatgtactccaggcttcttcagataggttcagcccacccacccccatgattgtatgaagttttaaaaaaaactacagcagccaaagaaactatatatatatatatatatatatatatccagaatgattgcctctactgtcctcattgacttgtttgaaccttagtgccttaccctgtcctcttcccagttctctttatagaagctctaggagctttcgaaaagccaaagtctttctgaagaatctgtgctggacagacataattccctttctcattgtctccatctttgttggtcatggtaaggtttttccatcagcctctgaaaaaatagttgtgcacaacatctgctcactggactgtctgatccaatgtaattggctgcgtctggctaattctaagcactaaagtctacatctaagctatagatttaagcttgaagctacagattatatcactatcaccaccacccctcaccctatgcaatcaatcaatcaatcatcttaagttaaagatatttgttgtctttgaatgatttgctgtcacagactatttggtagaagaaatatttttcacctgagagaggaagagaaatttctctagtaacacaaagagtgagttctaaaaggcatgcccacatctctttcgtgccttaaggatagtgagatgcacacttatatatatactgtatatatttatatatttatatatatatttcatatatatatataatattgcaagcttaagtttgcaatttcccaaacaatacaaaaagcaaattacacaccctcaccactgttcttatctctatagtgatgaaacattaattagggatcttgctgcttttctttttctacacgaagttttcattaaagccacagaataattgatagggcagctgtttgagaacaggtcccattttcacattagggctttaaatgaattagaaactatttgaggctataaaaatgtccttgagtttggagcctgagctctggtgaaatgctgatacatctgatctatcatgggaattgcagttagagagagtaaggaataccatttagtcatctatccgttcttcacttagcaggaatatgaaagaaaggcacatgtttaagaggaatacctaaaggtttttctaaattccaacatttaaaaggcaattgtgggctatttttattttttaatattttgaaataaagtttagtgtctagggctgggagccaggactgatcttccatttctttttctttgttcccagccatgcttttgtaacttgccaggtggacttgaccaactacattaccatgctgtgcctcagtttacccatttgtaaaatgggattaataatacttacctacctcacaggggtgttgtgaggctctattcatttgctcctttattctttcctgtattctctgtatgtccagcactttgtagccatgggaggaaagggactataaaagtgtacaatgttaatggaatgatacggtacctgaaagccttgttttctagtaagaaaatgctaccttgctgtacatacttataaccttgtatttggaaatgagaaataggtttatattttcagatctctcaaaaatcacatcatttgaccaaagaataatttaagacacatagaacagatttttttaatttatattttcatcctgaccagcttagttctaataatttttagttgtgagtgattaaaaaactttggatcaattttggtcaaacatgccaactttgtagtctgagtgacaggcaagggatttttgggtttaagatgcacttttagcacacatttgtatttcccttggcatatcagattgagctaatggtgatgttatttcaatctaacagccaccaatctgaaattgtatttcaaatgttgattctgtagttctttaaataataatgaagctcatcttatacattttgctttcaccaattgattccttcttcttttagcccactattaaaacatttcttactgaatggttcatgtaggcttgctgaacagcacgcattacttgcttcctgaagagttcccccattcatccatttgtcccattagttgctgtggattatcaagttttgaaggaactgtacatcccaacagactgaaacattctaagtgaaatgagtataatccaagtaactggtgaactttggaggtttggagcttgaagagaatggctaagaagatttgaattatagggagggaacagaaatcatacatgaaaaggttttactgagaaggggaaaaccttagatagagggacatgtgaaacaaaatcatttgaaattttgattcagacatccatttccagtggcaaacagcaaagcctgaacccataaacccaaatgataggtgaagttgggtggttttatccaatgtctcaagcaagcaatgtctgggaatatcatagagtaacaagtgctggtcagccaaagaaacattcactgctggtgaaccaataccataagcatgtattatctaagcacttgatcaagaaatatacatgttgtacaagctctcaattttgttcatttattatcaaatttttaaaatacaagtttggtatgtgatttggaaaagatgccttctggatcttaagccagttgtcagtggaggtcctcagggctgcaaatgtcaagacataaccctgttcctcaccatcatgataccagatacaggtgaatacataggaactatctgcctgtgtcctcaatctcccttcaaacaagatgctgatttgtagggtacttggcaggttaaattaaaccagaagaggtgacttaataaaaaagggaatgacatttagggtataaagatctcataagaaatgtaatatgtaaattatatcttgctttatgttgtaaaatatacattgtttgcgctagaatagaaatgatttcttttcaataaaaagaaagaaggactctaccatgtcttttgttatata

SEQ ID NO: 314303 - DNA, 3518 bp, Homo sapiens
cgtggtcatggtgctgcctgacatctgctgaacgcatttggcttatttctccctttcacactttcaaaaatagatcctcgtccctcccaagatgttgtttacacgaggggcttcataacggattctaacggaagacactgaaaagcgccatggctacttattctgccacatgtgccaacaatagccctgcacagggcatcaacatggccaacagcattgccaacctgagactgaaggccaaggaatatagtttacagaggaaccaggtgccaacagtcaactgaggaaaaaaaataattaaacaggcctaagaagaaatcaaaaaccataagacacctatcctgctctgttatttcttcatctgctggggggaaaaagtaaattacaaacaaacaaacaaagcagaactaaaatattgggaccatggcagagaaaagcaggagaggagcaaaatgaaaattagttaacaaatgttcctcctccctctgggataccaccaccacttgtttctgtgtgtgtttattttgtttttctttcattcatgctttgcttaatgtactccaggcttcttcagataggttcagcccacccacccccatgattgtatgaagttttaaaaaaaactacagcagccaaagaaactatatatatatatatatatatatatatccagaatgattgcctctactgtcctcattgacttgtttgaaccttagtgccttaccctgtcctcttcccagttctctttatagaagctctaggagctttcgaaaagccaaagtctttctgaagaatctgtgctggacagacataattccctttctcattgtctccatctttgttggtcatggtaaggtttttccatcagcctctgaaaaaatagttgtgcacaacatctgctcactggactgtctgatccaatgtaattggctgcgtctggctaattctaagcactaaagtctacatctaagctatagatttaagcttgaagctacagattatatcactatcaccaccacccctcaccctatgcaatcaatcaatcaatcatcttaagttaaagatatttgttgtctttgaatgatttgctgtcacagactatttggtagaagaaatatttttcacctgagagaggaagagaaatttctctagtaacacaaagagtgagttctaaaaggcatgcccacatctctttcgtgccttaaggatagtgagatgcacacttatatatatactgtatatatttatatatttatatatatatttcatatatatatataatattgcaagcttaagtttgcaatttcccaaacaatacaaaaagcaaattacacaccctcaccactgttcttatctctatagtgatgaaacattaattagggatcttgctgcttttctttttctacacgaagttttcattaaagccacagaataattgatagggcagctgtttgagaacaggtcccattttcacattagggctttaaatgaattagaaactatttgaggctataaaaatgtccttgagtttggagcctgagctctggtgaaatgctgatacatctgatctatcatgggaattgcagttagagagagtaaggaataccatttagtcatctatccgttcttcacttagcaggaatatgaaagaaaggcacatgtttaagaggaatacctaaaggtttttctaaattccaacatttaaaaggcaattgtgggctatttttattttttaatattttgaaataaagtttagtgtctagggctgggagccaggactgatcttccatttctttttctttgttcccagccatgcttttgtaacttgccaggtggacttgaccaactacattaccatgctgtgcctcagtttacccatttgtaaaatgggattaataatacttacctacctcacaggggtgttgtgaggctctattcatttgctcctttattctttcctgtattctctgtatgtccagcactttgtagccatgggaggaaagggactataaaagtgtacaatgttaatggaatgatacggtacctgaaagccttgttttctagtaagaaaatgctaccttgctgtacatacttataaccttgtatttggaaatgagaaataggtttatattttcagatctctcaaaaatcacatcatttgaccaaagaataatttaagacacatagaacagatttttttaatttatattttcatcctgaccagcttagttctaataatttttagttgtgagtgattaaaaaactttggatcaattttggtcaaacatgccaactttgtagtctgagtgacaggcaagggatttttgggtttaagatgcacttttagcacacatttgtatttcccttggcatatcagattgagctaatggtgatgttatttcaatctaacagccaccaatctgaaattgtatttcaaatgttgattctgtagttctttaaataataatgaagctcatcttatacattttgctttcaccaattgattccttcttcttttagcccactattaaaacatttcttactgaatggttcatgtaggcttgctgaacagcacgcattacttgcttcctgaagagttcccccattcatccatttgtcccattagttgctgtggattatcaagttttgaaggaactgtacatcccaacagactgaaacattctaagtgaaatgagtataatccaagtaactggtgaactttggaggtttggagcttgaagagaatggctaagaagatttgaattatagggagggaacagaaatcatacatgaaaaggttttactgagaaggggaaaaccttagatagagggacatgtgaaacaaaatcatttgaaattttgattcagacatccatttccagtggcaaacagcaaagcctgaacccataaacccaaatgataggtgaagttgggtggttttatccaatgtctcaagcaagcaatgtctgggaatatcatagagtaacaagtgctggtcagccaaagaaacattcactgctggtgaaccaataccataagcatgtattatctaagcacttgatcaagaaatatacatgttgtacaagctctcaattttgttcatttattatcaaatttttaaaatacaagtttggtatgtgatttggaaaagatgccttctggatcttaagccagttgtcagtggaggtcctcagggctgcaaatgtcaagacataaccctgttcctcaccatcatgataccagatacaggtgaatacataggaactatctgcctgtgtcctcaatctcccttcaaacaagatgctgatttgtagggtacttggcaggttaaattaaaccagaagaggtgacttaataaaaaagggaatgacatttagggtataaagatctcataagaaatgtaatatgtaaattatatcttgctttatgttgtaaaatatacattgtttgcgctagaatagaaatgatttcttttcaataaaaagaaagaaggactctaccatgtcttttgttatata

SEQ ID NO: 314304 - DNA, 970 bp, Homo sapiens
tatgaggattctccccctcttctctcaccacctggctaaaataatatgatagggtctccatgataccactatagtatctatgcttatatggctgggcctcctggtggctcttggcactgtaatttctagtactgtttagattagtattatatgagaataagcttcctgaatagtccacatgtatccaagcatttcctgagaaaagggttagtattatatgaggagggaacagaaatcatacatgaaaaggttttactgagaaggggaaaaccttagatagagggacatgtgaaacaaaatcatttgaaattttgattcagacatccatttccagtggcaaacagcaaagcctgaacccataaacccaaatgataggtgaagttgggtggttttatccaatgtctcaagcaagcaatgtctgggaatatcatagagtaacaagtgctggtcagccaaagaaacattcactgctggtgaaccaataccataagcatgtattatctaagcacttgatcaagaaatatacatgttgtacaagctctcaattttgttcatttattatcaaatttttaaaatacaagtttggtatgtgatttggaaaagatgccttctggatcttaagccagttgtcagtggaggtcctcagggctgcaaatgtcaagacataaccctgttcctcaccatcatgataccagatacaggtgaatacataggaactatctgcctgtgtcctcaatctcccttcaaacaagatgctgatttgtagggtacttggcaggttaaattaaaccagaagaggtgacttaataaaaaagggaatgacatttagggtataaagatctcataagaaatgtaatatgtaaattatatcttgctttatgttgtaaaatatacattgtttgcgctagaatagaaatgatttcttttcaataaaaagaaagaaggactctaccatgtcttttgttatata

SEQ ID NO: 314305 - DNA, 2525 bp, Homo sapiens
ggaaaggaggaagaaggagattgtgatggagaaagggggtctgtgaaacgtcaggcacagcacaaaggctttgccacgtaattacaggctcctattaagtcgagatctgccctcccaggggtctccaattttcttgtattccctacaaagcctcctctgcatgccagtttgtgccttttgaagtgccagagagcttcttgatccaactgagaaggaaaaaggagcccagcaagaagagggggagagagagaaggggaaaggggggaacccaccagcaccctccgtcggactcttgaagccttttttttttaattcttaatttttttttttactctttacaaaaagtaaagtgagaatcctgctctctaatacatctgcaagacatcaccctctcctcctgaaactttagtcactcctgagaatccacaggagtgcagagaggggggaacacgttttcttgaagatgttttaaagctggaacaagccttcttctgttggtgcttgaactcttgcctgggaataacttttttaacctttaaaaaaaccattcactttgattcttctctcccaccccttcttctctcttcttctgtttgcctaactcccccgccctgctggcctccgctttcctctctcccccttgttgttatttttagtctgtgcgtgtggacacttttggagagttggaagggatttttttctcctgacttgaacatagggtgactttttaatattgtattttagtgtggattatctctttggaccgcgccggacttggcctcaggaaagcaaccaaggctgcggaaggcggctggtgcagaacgctctgctctacagaagggggtcccccgccctcttttccaattttttttttttggccttcctctccttccctccctcttcctccctctctctctctctctctccactacccccctctttcttccccactcggctcctctcccccctcgcgcccacagcgtttggtgttgattcgagcgggaagaggggggtgggtgggatcggtgggggagaccatgacctccagctacgggcacgttctggagcggcaaccggcgctgggcggccgcttggacagcccgggcaacctcgacaccctgcaggcgaaaaagaacttctccgtcagtcacctgctagacctggaggaagccggggacatggtggcggcacaggcggatgagaacgtgggcgaggctggccggagcctgctggagtcgccgggactcaccagcggcagcgacaccccgcagcaggacaatgaccagctgaactcagaagaaaaaaagaagagaaagcagcgaaggaataggacaaccttcaatagcagccagctgcaggctttggagcgtgtctttgagcggacacactatcctgatgcttttgtgcgagaagaccttgcccgccgggtgaacctcaccgaggcgagagtgcaggtgtggtttcagaaccgaagagccaagttccgcaggaatgagagagccatgctagccaataaaaacgcttccctcctcaaatcctactcaggagacgtgactgctgtggagcagcccatcgtacctcgtcctgctccgagacccaccgattatctctcctgggggacagcgtctccgtacagatcctcgtccctcccaagatgttgtttacacgaggggcttcataacggattctaacggaagacactgaaaagcgccatggctacttattctgccacatgtgccaacaatagccctgcacagggcatcaacatggccaacagcattgccaacctgagactgaaggccaaggaatatagtttacagaggaaccaggtgccaacagtcaactgaggaaaaaaaataattaaacaggcctaagaagaaatcaaaaaccataagacacctatcctgctctgttatttcttcatctgctggggggaaaaagtaaattacaaacaaacaaacaaagcagaactaaaatattgggaccatggcagagaaaagcaggagaggagcaaaatgaaaattagttaacaaatgttcctcctccctctgggataccaccaccacttgtttctgtgtgtgtttattttgtttttctttcattcatgctttgcttaatgtactccaggcttcttcagataggttcagcccacccacccccatgattgtaatcccagtgctttgggaggccaaggcaggtggatcacctgaggtcaggagttcgagactagcctgttccactgacatttcttagacattcagcaaaacccccaccttaacctcttttctttcttgagggttggtcctgtccccacctccaccctcccaccccctggaagaggaagggcccgggcatcagtggctagtccaaataaaatatgggcttggggatggaatgggtggtggtaagttcacagagtgtagttagatcccaactcccatgacctctggcttcagtggtgggtggggcagggcagatgaaagggcttcagtgggaacctctgagagcattttcctgttcccaat

SEQ ID NO: 314306 - DNA, 5009 bp, Homo sapiens
ggaaaggaggaagaaggagattgtgatggagaaagggggtctgtgaaacgtcaggcacagcacaaaggctttgccacgtaattacaggctcctattaagtcgagatctgccctcccaggggtctccaattttcttgtattccctacaaagcctcctctgcatgccagtttgtgccttttgaagtgccagagagcttcttgatccaactgagaaggaaaaaggagcccagcaagaagagggggagagagagaaggggaaaggggggaacccaccagcaccctccgtcggactcttgaagccttttttttttaattcttaatttttttttttactctttacaaaaagtaaagtgagaatcctgctctctaatacatctgcaagacatcaccctctcctcctgaaactttagtcactcctgagaatccacaggagtgcagagaggggggaacacgttttcttgaagatgttttaaagctggaacaagccttcttctgttggtgcttgaactcttgcctgggaataacttttttaacctttaaaaaaaccattcactttgattcttctctcccaccccttcttctctcttcttctgtttgcctaactcccccgccctgctggcctccgctttcctctctcccccttgttgttatttttagtctgtgcgtgtggacacttttggagagttggaagggatttttttctcctgacttgaacatagggtgactttttaatattgtattttagtgtggattatctctttggaccgcgccggacttggcctcaggaaagcaaccaaggctgcggaaggcggctggtgcagaacgctctgctctacagaagggggtcccccgccctcttttccaattttttttttttggccttcctctccttccctccctcttcctccctctctctctctctctctccactacccccctctttcttccccactcggctcctctcccccctcgcgcccacagcgtttggtgttgattcgagcgggaagaggggggtgggtgggatcggtgggggagaccatgacctccagctacgggcacgttctggagcggcaaccggcgctgggcggccgcttggacagcccgggcaacctcgacaccctgcaggcgaaaaagaacttctccgtcagtcacctgctagacctggaggaagccggggacatggtggcggcacaggcggatgagaacgtgggcgaggctggccggagcctgctggagtcgccgggactcaccagcggcagcgacaccccgcagcaggacaatgaccagctgaactcagaagaaaaaaagaagagaaagcagcgaaggaataggacaaccttcaatagcagccagctgcaggctttggagcgtgtctttgagcggacacactatcctgatgcttttgtgcgagaagaccttgcccgccgggtgaacctcaccgaggcgagagtgcaggtgtggtttcagaaccgaagagccaagttccgcaggaatgagagagccatgctagccaataaaaacgcttccctcctcaaatcctactcaggagacgtgactgctgtggagcagcccatcgtacctcgtcctgctccgagacccaccgattatctctcctgggggacagcgtctccgtacagcgccatggctacttattctgccacatgtgccaacaatagccctgcacagggcatcaacatggccaacagcattgccaacctgagactgaaggccaaggaatatagtttacagaggaaccaggtgccaacagtcaactgaggaaaaaaaataattaaacaggcctaagaagaaatcaaaaaccataagacacctatcctgctctgttatttcttcatctgctggggggaaaaagtaaattacaaacaaacaaacaaagcagaactaaaatattgggaccatggcagagaaaagcaggagaggagcaaaatgaaaattagttaacaaatgttcctcctccctctgggataccaccaccacttgtttctgtgtgtgtttattttgtttttctttcattcatgctttgcttaatgtactccaggcttcttcagataggttcagcccacccacccccatgattgtatgaagttttaaaaaaaactacagcagccaaagaaactatatatatatatatatatatatatatccagaatgattgcctctactgtcctcattgacttgtttgaaccttagtgccttaccctgtcctcttcccagttctctttatagaagctctaggagctttcgaaaagccaaagtctttctgaagaatctgtgctggacagacataattccctttctcattgtctccatctttgttggtcatggtaaggtttttccatcagcctctgaaaaaatagttgtgcacaacatctgctcactggactgtctgatccaatgtaattggctgcgtctggctaattctaagcactaaagtctacatctaagctatagatttaagcttgaagctacagattatatcactatcaccaccacccctcaccctatgcaatcaatcaatcaatcatcttaagttaaagatatttgttgtctttgaatgatttgctgtcacagactatttggtagaagaaatatttttcacctgagagaggaagagaaatttctctagtaacacaaagagtgagttctaaaaggcatgcccacatctctttcgtgccttaaggatagtgagatgcacacttatatatatactgtatatatttatatatttatatatatatttcatatatatatataatattgcaagcttaagtttgcaatttcccaaacaatacaaaaagcaaattacacaccctcaccactgttcttatctctatagtgatgaaacattaattagggatcttgctgcttttctttttctacacgaagttttcattaaagccacagaataattgatagggcagctgtttgagaacaggtcccattttcacattagggctttaaatgaattagaaactatttgaggctataaaaatgtccttgagtttggagcctgagctctggtgaaatgctgatacatctgatctatcatgggaattgcagttagagagagtaaggaataccatttagtcatctatccgttcttcacttagcaggaatatgaaagaaaggcacatgtttaagaggaatacctaaaggtttttctaaattccaacatttaaaaggcaattgtgggctatttttattttttaatattttgaaataaagtttagtgtctagggctgggagccaggactgatcttccatttctttttctttgttcccagccatgcttttgtaacttgccaggtggacttgaccaactacattaccatgctgtgcctcagtttacccatttgtaaaatgggattaataatacttacctacctcacaggggtgttgtgaggctctattcatttgctcctttattctttcctgtattctctgtatgtccagcactttgtagccatgggaggaaagggactataaaagtgtacaatgttaatggaatgatacggtacctgaaagccttgttttctagtaagaaaatgctaccttgctgtacatacttataaccttgtatttggaaatgagaaataggtttatattttcagatctctcaaaaatcacatcatttgaccaaagaataatttaagacacatagaacagatttttttaatttatattttcatcctgaccagcttagttctaataatttttagttgtgagtgattaaaaaactttggatcaattttggtcaaacatgccaactttgtagtctgagtgacaggcaagggatttttgggtttaagatgcacttttagcacacatttgtatttcccttggcatatcagattgagctaatggtgatgttatttcaatctaacagccaccaatctgaaattgtatttcaaatgttgattctgtagttctttaaataataatgaagctcatcttatacattttgctttcaccaattgattccttcttcttttagcccactattaaaacatttcttactgaatggttcatgtaggcttgctgaacagcacgcattacttgcttcctgaagagttcccccattcatccatttgtcccattagttgctgtggattatcaagttttgaaggaactgtacatcccaacagactgaaacattctaagtgaaatgagtataatccaagtaactggtgaactttggaggtttggagcttgaagagaatggctaagaagatttgaattatagggagggaacagaaatcatacatgaaaaggttttactgagaaggggaaaaccttagatagagggacatgtgaaacaaaatcatttgaaattttgattcagacatccatttccagtggcaaacagcaaagcctgaacccataaacccaaatgataggtgaagttgggtggttttatccaatgtctcaagcaagcaatgtctgggaatatcatagagtaacaagtgctggtcagccaaagaaacattcactgctggtgaaccaataccataagcatgtattatctaagcacttgatcaagaaatatacatgttgtacaagctctcaattttgttcatttattatcaaatttttaaaatacaagtttggtatgtgatttggaaaagatgccttctggatcttaagccagttgtcagtggaggtcctcagggctgcaaatgtcaagacataaccctgttcctcaccatcatgataccagatacaggtgaatacataggaactatctgcctgtgtcctcaatctcccttcaaacaagatgctgatttgtagggtacttggcaggttaaattaaaccagaagaggtgacttaataaaaaagggaatgacatttagggtataaagatctcataagaaatgtaatatgtaaattatatcttgctttatgttgtaaaatatacattgtttgcgctagaatagaaatgatttcttttcaataaaaagaaagaaggactctaccatgtcttttgttatata

SEQ ID NO: 314307 - DNA, 1776 bp, Homo sapiens
ggaaaggaggaagaaggagattgtgatggagaaagggggtctgtgaaacgtcaggcacagcacaaaggctttgccacgtaattacaggctcctattaagtcgagatctgccctcccaggggtctccaattttcttgtattccctacaaagcctcctctgcatgccagtttgtgccttttgaagtgccagagagcttcttgatccaactgagaaggaaaaaggagcccagcaagaagagggggagagagagaaggggaaaggggggaacccaccagcaccctccgtcggactcttgaagccttttttttttaattcttaatttttttttttactctttacaaaaagtaaagtgagaatcctgctctctaatacatctgcaagacatcaccctctcctcctgaaactttagtcactcctgagaatccacaggagtgcagagaggggggaacacgttttcttgaagatgttttaaagctggaacaagccttcttctgttggtgcttgaactcttgcctgggaataacttttttaacctttaaaaaaaccattcactttgattcttctctcccaccccttcttctctcttcttctgtttgcctaactcccccgccctgctggcctccgctttcctctctcccccttgttgttatttttagtctgtgcgtgtggacacttttggagagttggaagggatttttttctcctgacttgaacatagggtgactttttaatattgtattttagtgtggattatctctttggaccgcgccggacttggcctcaggaaagcaaccaaggctgcggaaggcggctggtgcagaacgctctgctctacagaagggggtcccccgccctcttttccaattttttttttttggccttcctctccttccctccctcttcctccctctctctctctctctctccactacccccctctttcttccccactcggctcctctcccccctcgcgcccacagcgtttggtgttgattcgagcgggaagaggggggtgggtgggatcggtgggggagaccatgacctccagctacgggcacgttctggagcggcaaccggcgctgggcggccgcttggacagcccgggcaacctcgacaccctgcaggcgaaaaagaacttctccgtcagtcacctgctagacctggaggaagccggggacatggtggcggcacaggcggatgagaacgtgggcgaggctggccggagcctgctggagtcgccgggactcaccagcggcagcgacaccccgcagcaggacaatgaccagctgaactcagaagaaaaaaagaagagaaagcagcgaaggaataggacaaccttcaatagcagccagctgcaggctttggagcgtgtctttgagcggacacactatcctgatgcttttgtgcgagaagaccttgcccgccgggtgaacctcaccgaggcgagagtgcaggtgtggtttcagaaccgaagagccaagttccgcaggaatgagagagccatgctagccaataaaaacgcttccctcctcaaatcctactcaggagacgtgactgctgtggagcagcccatcgtacctcgtcctgctccgagacccaccgattatctctcctgggggacagcgtctccgtacaggtgaatgactggcccactctcccttgctccacttccacatgtttctcagcggtcggtcatgtttcaagctgcttgtgcagctcaccgacatttcttactgggttaatctcttcagagacattcaacttgctgacatcccc

SEQ ID NO: 314308 - DNA, 741 bp, Homo sapiens
ggcttcagacaagtcggaggggagggagacgcagaggcggacaagatggcggcggcagctgtacagggcgggagaagcggtggtagcggaggctgtagtggggctggtggtgcttccaactgcgggacaggaagtggccgtagcggcttgttggataagtggaagatagatgataagcctgtaaaaattgacaagtgggatggatcagctgtgaaaaactctttggatgattctgccaaaaaggtacttctggaaaaatacaaatatgtggagaattttggtctaattgatggtcgcctcaccatctgtacaatctcctgtttctttgccatagtggctttgatttgggattatatgcacccctttccagagtccaaacccgttttggctttgtgtgtcatatcctattttgtgatgatggggattctgaccatttatacctcatataaggagaagagcatctttctcgtggcccacaggaaagatcctacaggaatggatcctgatgatatttggcagctgtcctccagtcttaaaaggtttgatgacaaatacaccttgaagctgaccttcatcagtgggagaacaaagcagcagcgggaagccgagttcacaaagtccattgctaagttttttgaccacagtgggacactggtcatggatgcatatgagcctgaaatatccaggctccatgacagtcttgccatagaaagaaaaataaagtagccaattctaaaagta

SEQ ID NO: 314309 - DNA, 491 bp, Homo sapiens
gagatgagagaagatggtccacgtggtttaaaagtctacaacaaggtaaaggaggtacacagtaattaaagtaggaaagatatgtcaacacctaagaatcagaactagtatcttgaaaagttaggagccctggggttttgtttttgcttttgcttttaaaggatgtgtttgttccctgtatcaccgtgcccagcttactccttttcttcggaaacacttggtgccgtattgttactggttgaatctctgtgtttggtttttaatttgttatctttgcccccatgcttaggtttgatgacaaatacaccttgaagctgaccttcatcagtgggagaacaaagcagcagcgggaagccgagttcacaaagtccattgctaagttttttgaccacagtgggacactggtcatggatgcatatgagcctgaaatatccaggctccatgacagtcttgccatagaaagaaaaataaagtagccaattctaaaagta

SEQ ID NO: 314310 - DNA, 1424 bp, Homo sapiens
ggcttcagacaagtcggaggggagggagacgcagaggcggacaagatggcggcggcagctgtacagggcgggagaagcggtggtagcggaggctgtagtggggctggtggtgcttccaactgcgggacaggaagtggccgtagcggcttgttggataagtggaagatagatgataagcctgtaaaaattgacaagtgggatggatcagctgtgaaaaactctttggatgattctgccaaaaaggtacttctggaaaaatacaaatatgtggagaattttggtctaattgatggtcgcctcaccatctgtacaatctcctgtttctttgccatagtggctttgatttgggattatatgcacccctttccagagtccaaacccgttttggctttgtgtgtcatatcctattttgtgatgatggggattctgaccatttatacctcatataaggagaagagcatctttctcgtggcccacaggaaagatcctacaggaatggatcctgatgatatttggcagctgtcctccagtcttaaaaggtttgatgacaaatacaccttgaagctgaccttcatcagtgggagaacaaagcagcagcgggaagccgagttcacaaagtccattgctaagttttttgaccacagtgggacactggtcatggatgcatatgagcctgaaatatccaggctccatgacagtcttgccatagaaagaaaaataaagtagccaattctaaaagtagccctctttctcctggatcttgctgaattagtggcttggggggtgggggagataaaaagaacttaaaatgggtaaagtaagaaatgttaaaaagtccctgttttgtcctgaaattttagtctattctgggtaaataggattttctgacacagatatgagaagttgtagctctgatgtctagctgtagtctccttgatctgctgattgcattattttaatttgcttttctgggaaagcagttttgctaaaagctgtacagactttttcttttgtacctagcagtactttatatagtatagctttgggccatgtagcattttaagactcaattttaaaaaattattaatctgttgctgactcttaattcctatttcaatatgtgtttccttgaagaattcaggatacaacttcttgtgtatgacagctttccttcacacactatttttgtgggtgtgtatatatctgatttgggaagaatttaaaaaacacatagctttttaatttgtttgaaacagactttctgcctgttacatttttgcttttaaccaattaaagaagccaatggcattttagttttatattgtgttttccactagtatatccctgttgatttgtttgtgccttttattaactgccattttctaaaatttttttcaataaaaggaaggaagatgtgaaaaaaa

SEQ ID NO: 314311 - DNA, 1486 bp, Homo sapiens
ggcttcagacaagtcggaggggagggagacgcagaggcggacaagatggcggcggcagctgtacagggcgggagaagcggtggtagcggaggctgtagtggggctggtggtgcttccaactgcgggacaggaagtggccgtagcggcttgttggataagtggaagatagatgataagcctgtaaaaattgacaagtgggatggatcagctgtgaaaaactctttggatgattctgccaaaaaggtacttctggaaaaatacaaatatgtggagaattttggtctaattgatggtcgcctcaccatctgtacaatctcctgtttctttgccatagtggctttgatttgggattatatgcacccctttccagagtccaaacccgttttggctttgtgtgtcatatcctattttgtgatgatggggattctgaccatttatacctcatataaggagaagagcatctttctcgtggcccacaggaaagatcctacaggaatggatcctgatgatatttggcagctgtcctccagtcttaaaaggtttgatgacaaatacaccttgaagctgaccttcatcagtgggagaacaaagcagcagcgggaagccgagttcacaaagtccattgctaagttttttgaccacagtgggacactggtcatggatgcatatgagcctgaaatatccaggctccatgacagtcttgccatagaaagaaaaataaagtagccaattctaaaagtagccctctttctcctggatcttgctgaattagtggcttggggggtgggggagataaaaagaacttaaaatgggtaaagtaagaaatgttaaaaagtccctgttttgtcctgaaattttagtctattctgggtaaataggattttctgacacagatatgagaagttgtagctctgatgtctagctgtagtctccttgatctgctgattgcattattttaatttgcttttctgggaaagcagttttgctaaaagctgtacagactttttcttttgtacctagcagtactttatatagtatagctttgggccatgtagcattttaagactcaattttaaaaaattattaatctgttgctgactcttaattcctatttcaatatgtgtttccttgaagaattcaggatacaacttcttgtgtatgacagctttccttcacacactatttttgtgggtgtgtatatatctgatttgggaagaatttaaaaaacacatagctttttaatttgtttgaaacagactttctgcctgttacatttttgcttttaaccaattaaagaagccaatggcattttagttttatattgtgttttccactagtatatccctgttgatttgtttgtgccttttattaactgccattttctaaaatttttttcaataaaaggaaggaagatgtgaaaaaaaaaaaagcaaaaaaaaaaggggggggcggcaaaaaaatacccggggggggcccatttgggttc

SEQ ID NO: 314312 - DNA, 1319 bp, Homo sapiens
ggcttcagacaagtcggaggggagggagacgcagaggcggacaagatggcggcggcagctgtacagggcgggagaagcggtggtagcggaggctgtagtggggctggtggtgcttccaactgcgggacaggaagtggccgtagcggcttgttggataagtggaagatagatgataagcctgtaaaaattgacaagtgggatggatcagctgtgaaaaactctttggatgattctgccaaaaaggtacttctggaaaaatacaaatatgtggagaattttggtctaattgatggtcgcctcaccatctgtacaatctcctgtttctttgccatagtggctttgatttgggattatatgcacccctttccagagtccaaacccgttttggctttgtgtgtcatatcctattttgtgatgatggggattctgaccatttatacctcatataaggagaagagcatctttctcgtggcccacaggaaagatcctacaggaatggatcctgatgatatttggcagctgtcctccagtcttaaaaggtttgatgacaaatacaccttgaagctgaccttcatcagtgggagaacaaagcagcagcgggaagccgagttcacaaagtccattgctaagttttttgaccacagtgggacactggtcatggatgcatatgagcctgaaatatccaggctccatgacagtcttgccatagaaagaaaaataaagtagccaattctaaaagtagccctctttctcctggatcttgctgaattagtggcttggggggtgggggagataaaaagaacttaaaatgggtaaagtaagaaatgttaaaaagtccctgttttgtcctgaaattttagtctattctgggtaaataggattttctgacacagatatgagaagttgtagctctgatgtctagctgtagtctccttgatctgctgattgcattattttaatttgcttttctgggaaagcagttttgctaaaagctgtacagactttttcttttgtacctagcagtactttatatagtatagctttgggccatgtagcattttaagactcaattttaaaaaattattaatctgttgctgactcttaattcctatttcaatatgtgtttccttgaagaattcaggatacaacttcttgtgtatgacagctttccttcacacactatttttgtgggtgtgtatatatctgatttgggaagaatttaaaaaacacatagctttttaatttgtttgaaacagactttctgcctgttacatttttgcttttaaccaattaaagaagccaatggcattttagtttta

SEQ ID NO: 314313 - DNA, 1084 bp, Homo sapiens
  misc_feature (1068)..(1069): n is a, c, g, or t
ggcttcagacaagtcggaggggagggagacgcagaggcggacaagatggcggcggcagctgtacagggcgggagaagcggtggtagcggaggctgtagtggggctggtggtgcttccaactgcgggacaggaagtggccgtagcggcttgttggataagtggaagatagatgataagcctgtaaaaattgacaagtgggatggatcagctgtgaaaaactctttggatgattctgccaaaaaggtacttctggaaaaatacaaatatgtggagaattttggtctaattgatggtcgcctcaccatctgtacaatctcctgtttctttgccatagtggctttgatttgggattatatgcacccctttccagagtccaaacccgttttggctttgtgtgtcatatcctattttgtgatgatggggattctgaccatttatacctcatataaggagaagagcatctttctcgtggcccacaggaaagatcctacaggaatggatcctgatgatatttggcagctgtcctccagtcttaaaaggtttgatgacaaatacaccttgaagctgaccttcatcagtgggagaacaaagcagcagcgggaagccgagttcacaaagtccattgctaagttttttgaccacagtgggacactggtcatggatgcatatgagcctgaaatatccaggctccatgacagtcttgccatagaaagaaaaataaagtagccaattctaaaagtagccctctttctcctggatcttgctgaattagtggcttggggggtgggggagataaaaagaacttaaaatgggtaaagtaagaaatgttaaaaagtccctgttttgtcctgaaattttagtctattctgggtaaataggattttctgacacagatatgagaagttgtagctctgatgtctagctgtagtctccttgatctgctgattgcattattttaatttgcttttctgggaaagcagttttgctaaaagctgtacagactttttcttttgtacctagcagtactttatatagtatagctttgggccatgtagcattttaagggtnntgtgggtgcagctca

SEQ ID NO: 314314 - DNA, 1949 bp, Homo sapiens
  misc_feature (301)..(301): n is a, c, g, or t
ggggcacacattttatatacagacctctgagaaacctctcagcagaaaacctgcaggaaggaagtcttcagttaactaaagaagagttaatgtcctagaagagtattctaggcagagattacagcaaatgcaaaagctctcaagtgggagagtacttggggtgtttgaggactatcaaggattgaagaggctgttgtggctggagggaccagggcgagtgaggattgctgagaggtgaggtcagagtgcaaagggccttagggctgggcgaggtgctcacgcctgtaatcccagcactttnagacgcagaggcggacaagatggcggcggcagctgtacagggcgggagaagcggtggtagcggaggctgtagtggggctggtggtgcttccaactgcgggacaggaagtggccgtagcggcttgttggataaggtgaggagccggttcttgggaacagttgaatcctggggaggcctgggaggcggcgagccaaccttcccatcccggtctcccttattttctacggccttttgaggggagcccttgtgtgaccactatcacaaccctacgcacgcttggagcctgcccttgccctcatcacacttcaaacctggacccggtcctctttagaacttcttcttttctcgcaagtgttctggtcctggtcgccacacctttttcgtggaagatagatgataagcctgtaaaaattgacaagtgggatggatcagctgtgaaaaactctttggatgattctgccaaaaaggtacttctggaaaaatacaaatatgtggagaattttggtctaattgatggtcgcctcaccatctgtacaatctcctgtttctttgccatagtggctttgatttgggattatatgcacccctttccagagtccaaacccgttttggctttgtgtgtcatatcctattttgtgatgatggggattctgaccatttatacctcatataaggagaagagcatctttctcgtggcccacaggaaagatcctacaggaatggatcctgatgatatttggcagctgtcctccagtcttaaaaggtttgatgacaaatacaccttgaagctgaccttcatcagtgggagaacaaagcagcagcgggaagccgagttcacaaagtccattgctaagttttttgaccacagtgggacactggtcatggatgcatatgagcctgaaatatccaggctccatgacagtcttgccatagaaagaaaaataaagtagccaattctaaaagtagccctctttctcctggatcttgctgaattagtggcttggggggtgggggagataaaaagaacttaaaatgggtaaagtaagaaatgttaaaaagtccctgttttgtcctgaaattttagtctattctgggtaaataggattttctgacacagatatgagaagttgtagctctgatgtctagctgtagtctccttgatctgctgattgcattattttaatttgcttttctgggaaagcagttttgctaaaagctgtacagactttttcttttgtacctagcagtactttatatagtatagctttgggccatgtagcattttaagactcaattttaaaaaattattaatctgttgctgactcttaattcctatttcaatatgtgtttccttgaagaattcaggatacaacttcttgtgtatgacagctttccttcacacactatttttgtgggtgtgtatatatctgatttgggaagaatttaaaaaacacatagctttttaatttgtttgaaacagactttctgcctgttacatttttgcttttaaccaattaaagaagccaatggcattttagttttatattgtgttttccactagtatatccctgttgatttgtttgtgccttttattaactgccattttctaaaatttttttcaataaaaggaaggaagatgtgaaaaaaa

SEQ ID NO: 314315 - DNA, 1863 bp, Homo sapiens
  misc_feature (301)..(301): n is a, c, g, or t
ggggcacacattttatatacagacctctgagaaacctctcagcagaaaacctgcaggaaggaagtcttcagttaactaaagaagagttaatgtcctagaagagtattctaggcagagattacagcaaatgcaaaagctctcaagtgggagagtacttggggtgtttgaggactatcaaggattgaagaggctgttgtggctggagggaccagggcgagtgaggattgctgagaggtgaggtcagagtgcaaagggccttagggctgggcgaggtgctcacgcctgtaatcccagcactttnagacgcagaggcggacaagatggcggcggcagctgtacagggcgggagaagcggtggtagcggaggctgtagtggggctggtggtgcttccaactgcgggacaggaagtggccgtagcggcttgttggataaggtgaggagccggttcttgggaacagttgaatcctggggaggcctgggaggcggcgagccaaccttcccatcccggtctcccttattttctacggccttttgaggggagcccttgtgtgaccactatcacaaccctacgcacgcttggagcctgcccttgccctcatcacacttcaaacctggacccggtcctctttagaacttcttcttttctcgcaagtgttctggtcctggtcgccacacctttttcgtggaagatagatgataagcctgtaaaaattgacaagtgggatggatcagctgtgaaaaactctttggatgattctgccaaaaagcatagtggctttgatttgggattatatgcacccctttccagagtccaaacccgttttggctttgtgtgtcatatcctattttgtgatgatggggattctgaccatttatacctcatataaggagaagagcatctttctcgtggcccacaggaaagatcctacaggaatggatcctgatgatatttggcagctgtcctccagtcttaaaaggtttgatgacaaatacaccttgaagctgaccttcatcagtgggagaacaaagcagcagcgggaagccgagttcacaaagtccattgctaagttttttgaccacagtgggacactggtcatggatgcatatgagcctgaaatatccaggctccatgacagtcttgccatagaaagaaaaataaagtagccaattctaaaagtagccctctttctcctggatcttgctgaattagtggcttggggggtgggggagataaaaagaacttaaaatgggtaaagtaagaaatgttaaaaagtccctgttttgtcctgaaattttagtctattctgggtaaataggattttctgacacagatatgagaagttgtagctctgatgtctagctgtagtctccttgatctgctgattgcattattttaatttgcttttctgggaaagcagttttgctaaaagctgtacagactttttcttttgtacctagcagtactttatatagtatagctttgggccatgtagcattttaagactcaattttaaaaaattattaatctgttgctgactcttaattcctatttcaatatgtgtttccttgaagaattcaggatacaacttcttgtgtatgacagctttccttcacacactatttttgtgggtgtgtatatatctgatttgggaagaatttaaaaaacacatagctttttaatttgtttgaaacagactttctgcctgttacatttttgcttttaaccaattaaagaagccaatggcattttagttttatattgtgttttccactagtatatccctgttgatttgtttgtgccttttattaactgccattttctaaaatttttttcaataaaaggaaggaagatgtgaaaaaaa

SEQ ID NO: 314316 - DNA, 1492 bp, Homo sapiens
  misc_feature (301)..(301): n is a, c, g, or t
ggggcacacattttatatacagacctctgagaaacctctcagcagaaaacctgcaggaaggaagtcttcagttaactaaagaagagttaatgtcctagaagagtattctaggcagagattacagcaaatgcaaaagctctcaagtgggagagtacttggggtgtttgaggactatcaaggattgaagaggctgttgtggctggagggaccagggcgagtgaggattgctgagaggtgaggtcagagtgcaaagggccttagggctgggcgaggtgctcacgcctgtaatcccagcactttnagacgcagaggcggacaagatggcggcggcagctgtacagggcgggagaagcggtggtagcggaggctgtagtggggctggtggtgcttccaactgcgggacaggaagtggccgtagcggcttgttggataagtggaagatagatgataagcctgtaaaaattgacaagtgggatggatcagctgtgaaaaactctttggatgattctgccaaaaaggagaagagcatctttctcgtggcccacaggaaagatcctacaggaatggatcctgatgatatttggcagctgtcctccagtcttaaaaggtttgatgacaaatacaccttgaagctgaccttcatcagtgggagaacaaagcagcagcgggaagccgagttcacaaagtccattgctaagttttttgaccacagtgggacactggtcatggatgcatatgagcctgaaatatccaggctccatgacagtcttgccatagaaagaaaaataaagtagccaattctaaaagtagccctctttctcctggatcttgctgaattagtggcttggggggtgggggagataaaaagaacttaaaatgggtaaagtaagaaatgttaaaaagtccctgttttgtcctgaaattttagtctattctgggtaaataggattttctgacacagatatgagaagttgtagctctgatgtctagctgtagtctccttgatctgctgattgcattattttaatttgcttttctgggaaagcagttttgctaaaagctgtacagactttttcttttgtacctagcagtactttatatagtatagctttgggccatgtagcattttaagactcaattttaaaaaattattaatctgttgctgactcttaattcctatttcaatatgtgtttccttgaagaattcaggatacaacttcttgtgtatgacagctttccttcacacactatttttgtgggtgtgtatatatctgatttgggaagaatttaaaaaacacatagctttttaatttgtttgaaacagactttctgcctgttacatttttgcttttaaccaattaaagaagccaatggcattttagttttatattgtgttttccactagtatatccctgttgatttgtttgtgccttttattaactgccattttctaaaatttttttcaataaaaggaaggaagatgtgaaaaaaa

SEQ ID NO: 314317 - DNA, 1463 bp, Homo sapiens
  misc_feature (301)..(301): n is a, c, g, or t
ggggcacacattttatatacagacctctgagaaacctctcagcagaaaacctgcaggaaggaagtcttcagttaactaaagaagagttaatgtcctagaagagtattctaggcagagattacagcaaatgcaaaagctctcaagtgggagagtacttggggtgtttgaggactatcaaggattgaagaggctgttgtggctggagggaccagggcgagtgaggattgctgagaggtgaggtcagagtgcaaagggccttagggctgggcgaggtgctcacgcctgtaatcccagcactttnagacgcagaggcggacaagatggcggcggcagctgtacagggcgggagaagcggtggtagcggaggctgtagtggggctggtggtgcttccaactgcgggacaggaagtggccgtagcggcttgttggataagtggaagatagatgataagcctgtaaaaattgacaagtgggatggatcagctgtgaaaaactctttggatgattctgccaaaaaggaaagatcctacaggaatggatcctgatgatatttggcagctgtcctccagtcttaaaaggtttgatgacaaatacaccttgaagctgaccttcatcagtgggagaacaaagcagcagcgggaagccgagttcacaaagtccattgctaagttttttgaccacagtgggacactggtcatggatgcatatgagcctgaaatatccaggctccatgacagtcttgccatagaaagaaaaataaagtagccaattctaaaagtagccctctttctcctggatcttgctgaattagtggcttggggggtgggggagataaaaagaacttaaaatgggtaaagtaagaaatgttaaaaagtccctgttttgtcctgaaattttagtctattctgggtaaataggattttctgacacagatatgagaagttgtagctctgatgtctagctgtagtctccttgatctgctgattgcattattttaatttgcttttctgggaaagcagttttgctaaaagctgtacagactttttcttttgtacctagcagtactttatatagtatagctttgggccatgtagcattttaagactcaattttaaaaaattattaatctgttgctgactcttaattcctatttcaatatgtgtttccttgaagaattcaggatacaacttcttgtgtatgacagctttccttcacacactatttttgtgggtgtgtatatatctgatttgggaagaatttaaaaaacacatagctttttaatttgtttgaaacagactttctgcctgttacatttttgcttttaaccaattaaagaagccaatggcattttagttttatattgtgttttccactagtatatccctgttgatttgtttgtgccttttattaactgccattttctaaaatttttttcaataaaaggaaggaagatgtgaaaaaaa

SEQ ID NO: 314318 - DNA, 1836 bp, Homo sapiens
  misc_feature (301)..(301): n is a, c, g, or t
ggggcacacattttatatacagacctctgagaaacctctcagcagaaaacctgcaggaaggaagtcttcagttaactaaagaagagttaatgtcctagaagagtattctaggcagagattacagcaaatgcaaaagctctcaagtgggagagtacttggggtgtttgaggactatcaaggattgaagaggctgttgtggctggagggaccagggcgagtgaggattgctgagaggtgaggtcagagtgcaaagggccttagggctgggcgaggtgctcacgcctgtaatcccagcactttnagacgcagaggcggacaagatggcggcggcagctgtacagggcgggagaagcggtggtagcggaggctgtagtggggctggtggtgcttccaactgcgggacaggaagtggccgtagcggcttgttggataagctgtgcaagcataggatcgactcaagcctcgtacaaacatggacaagtgcgcgcatggatcaggctcgtgcacaaagactctttgggatgatctctgccaagaacaggtagcttctgggaacacaataccaaattatggtgcgagcacattataggatcgtagagttggagtggctcgccgtcgacacatcgtggtacgaagtctccgtggttgtcgtgttgcacactagatggacttatgcatcttgggcgtattaattagtgcgactcgcctatatgcgcaggagtgcgccaaaggcccgttctctggcattctgtagtgtgcataagtcctacatgttgatggatgatcgcggggatatcttgactcgattatatgatccttcattagtatagggacgaaggagctagtctgttctacgatggacccatcgacgcgaaatgattccttaccagtgaatgggagtccgtggatgactatgttggtcagactgtgtcctccagatctgtacaaacggtttgatgacaaatacaccttgaagctgaccttcatcagtgggagaacaaagcagcagcgggaagccgagttcacaaagtccattgctaagttttttgaccacagtgggacactggtcatggatgcatatgagcctgaaatatccaggctccatgacagtcttgccatagaaagaaaaataaagtagccaattctaaaagtagccctctttctcctggatcttgctgaattagtggcttggggggtgggggagataaaaagaacttaaaatgggtaaagtaagaaatgttaaaaagtccctgttttgtcctgaaattttagtctattctgggtaaataggattttctgacacagatatgagaagttgtagctctgatgtctagctgtagtctccttgatctgctgattgcattattttaatttgcttttctgggaaagcagttttgctaaaagctgtacagactttttcttttgtacctagcagtactttatatagtatagctttgggccatgtagcattttaagactcaattttaaaaaattattaatctgttgctgactcttaattcctatttcaatatgtgtttccttgaagaattcaggatacaacttcttgtgtatgacagctttccttcacacactatttttgtgggtgtgtatatatctgatttgggaagaatttaaaaaacacatagctttttaatttgtttgaaacagactttctgcctgttacatttttgcttttaaccaattaaagaagccaatggcattttagttttatattgtgttttccactagtatatccctgttgatttgtttgtgccttttattaactgccattttctaaaatttttttcaataaaaggaaggaagatgtgaaaaaaa

SEQ ID NO: 314319 - DNA, 1156 bp, Homo sapiens
  misc_feature (301)..(301): n is a, c, g, or t
ggggcacacattttatatacagacctctgagaaacctctcagcagaaaacctgcaggaaggaagtcttcagttaactaaagaagagttaatgtcctagaagagtattctaggcagagattacagcaaatgcaaaagctctcaagtgggagagtacttggggtgtttgaggactatcaaggattgaagaggctgttgtggctggagggaccagggcgagtgaggattgctgagaggtgaggtcagagtgcaaagggccttagggctgggcgaggtgctcacgcctgtaatcccagcactttnagacgcagaggcggacaagatggcggcggcagctgtacagggcgggagaagcggtggtagcggaggctgtagtggggctggtggtgcttccaactgcgggacaggaagtggccgtagcggcttgttggataagtggaagatagatgataagcctgtaaaaattgacaagtgggatggatcagctgtgaaaaactctttggatgattctgccaaaaaggtacttctggaaaaatacaaatatgtggagaattttggtctaattgatggtcgcctcaccatctgtacaatctcctgtttctttgccatagtggctttgatttgggattatatgcacccctttccagagtccaaacccgttttggctttgtgtgtcatatcctattttgtgatgatggggattctgaccatttatacctcatataaggagaagagcatctttctcgtggcccacaggaaagatcctacaggaatggatcctgatgatatttggcagctgtcctccagtcttaaaaggtttgatgacaaatacaccttgaagctgaccttcatcagtgggagaacaaagcagcagcgggaagccgagttcacaaagtccattgcatgagaccaatgaaatcgcaatggcaactcccgtcaggcagatccggaagctcatcagagatgggctgatcatccgcaagccctgtgacggtccattccgggctcgattgccggaaaaacaccttgggccgcggaagggcaggccatgggctaggtagggaaggtacagcatggccgatgcaagaggtccttgtggggacagaggatttggcgtgaaaacgggattaaaaaaggtgttacttcgaagggggtctc

SEQ ID NO: 314320 - DNA, 914 bp, Homo sapiens
  misc_feature (301)..(301): n is a, c, g, or t
ggggcacacattttatatacagacctctgagaaacctctcagcagaaaacctgcaggaaggaagtcttcagttaactaaagaagagttaatgtcctagaagagtattctaggcagagattacagcaaatgcaaaagctctcaagtgggagagtacttggggtgtttgaggactatcaaggattgaagaggctgttgtggctggagggaccagggcgagtgaggattgctgagaggtgaggtcagagtgcaaagggccttagggctgggcgaggtgctcacgcctgtaatcccagcactttnagacgcagaggcggacaagatggcggcggcagctgtacagggcgggagaagcggtggtagcggaggctgtagtgggggtgggggagataaaaagaacttaaaatgggtaaagtaagaaatgttaaaaagtccctgttttgtcctgaaattttagtctattctgggtaaataggattttctgacacagatatgagaagttgtagctctgatgtctagctgtagtctccttgatctgctgattgcattattttaatttgcttttctgggaaagcagttttgctaaaagctgtacagactttttcttttgtacctagcagtactttatatagtatagctttgggccatgtagcattttaagactcaattttaaaaaattattaatctgttgctgactcttaattcctatttcaatatgtgtttccttgaagaattcaggatacaacttcttgtgtatgacagctttccttcacacactatttttgtgggtgtgtatatatctgatttgggaagaatttaaaaaacacatagctttttaatttgtttgaaacagactttctgcctgttacatttttgcttttaaccaattaaagaagccaatggcattttagtttta

SEQ ID NO: 314321 - DNA, 1699 bp, Homo sapiens
  misc_feature (301)..(301): n is a, c, g, or t
ggggcacacattttatatacagacctctgagaaacctctcagcagaaaacctgcaggaaggaagtcttcagttaactaaagaagagttaatgtcctagaagagtattctaggcagagattacagcaaatgcaaaagctctcaagtgggagagtacttggggtgtttgaggactatcaaggattgaagaggctgttgtggctggagggaccagggcgagtgaggattgctgagaggtgaggtcagagtgcaaagggccttagggctgggcgaggtgctcacgcctgtaatcccagcactttnagacgcagaggcggacaagatggcggcggcagctgtacagggcgggagaagcggtggtagcggaggctgtagtggggctggtggtgcttccaactgcgggacaggaagtggccgtagcggcttgttggataagtggaagatagatgataagcctgtaaaaattgacaagtgggatggatcagctgtgaaaaactctttggatgattctgccaaaaaggtacttctggaaaaatacaaatatgtggagaattttggtctaattgatggtcgcctcaccatctgtacaatctcctgtttctttgccatagtggctttgatttgggattatatgcacccctttccagagtccaaacccgttttggctttgtgtgtcatatcctattttgtgatgatggggattctgaccatttatacctcatataaggagaagagcatctttctcgtggcccacaggaaagatcctacaggaatggatcctgatgatatttggcagctgtcctccagtcttaaaaggtttgatgacaaatacaccttgaagctgaccttcatcagtgggagaacaaagcagcagcgggaagccgagttcacaaagtccattgctaagttttttgaccacagtgggacactggtcatggatgcatatgagcctgaaatatccaggctccatgacagtcttgccatagaaagaaaaataaagtagccaattctaaaagtagccctctttctcctggatcttgctgaattagtggcttggggggtgggggagataaaaagaacttaaaatgggtaaagtaagaaatgttaaaaagtccctgttttgtcctgaaattttagtctattctgggtaaataggattttctgacacagatatgagaagttgtagctctgatgtctagctgtagtctccttgatctgctgattgcattattttaatttgcttttctgggaaagcagttttgctaaaagctgtacagactttttcttttgtacctagcagtactttatatagtatagctttgggccatgtagcattttaagactcaattttaaaaaattattaatctgttgctgactcttaattcctatttcaatatgtgtttccttgaagaattcaggatacaacttcttgtgtatgacagctttccttcacacactatttttgtgggtgtgtatatatctgatttgggaagaatttaaaaaacacatagctttttaatttgtttgaaacagactttctgcctgttacatttttgcttttaaccaattaaagaagccaatggcattttagttttatattgtgttttccactagtatatccctgttgatttgtttgtgccttttattaactgccattttctaaaatttttttcaataaaaggaaggaagatgtgaaaaaaa

SEQ ID NO: 314322 - DNA, 1403 bp, Homo sapiens
ggcttcagacaagtcggaggggagggagacgcagaggcggacaagatggcggcggcagctgtacagggcgggagaagcggtggtagcggaggctgtagtggggctggtggtgcttccaactgcgggacaggaagtggccgtagcggcttgttggataagtggaagatagatgataagcctgtaaaaattgacaagtgggatggatcagctgtgaaaaactctttggatgattctgccaaaaaggtacttctggaaaaatacaaatatgtggagaattttggtctaattgatggtcgcctcaccatctgtacaatctcctgtttctttgccatagtggctttgatttgggattatatgcacccctttccagagtccaaacccgttttggctttgtgtgtcatatcctattttgtgatgatggggattctgaccatttatacctcatataaggagaagagcatctttctcgtggcccacaggaaagatcctacaggaatggatcctgatgatatttggcagctgtcctccagtcttaaaaggtttgatgacaaatacaccttgaagctgaccttcatcagtgggagaacaaagcagcagcgggaagccgagttcacaaagtccattgctaagttttttgaccacagtgggacactggtcatggatgcatatgagcctgaaatatccaggctccatgacagtcttgccatagaaagaaaaataaagtagccaattctaaaagtagccctctttctcctggatcttgctgaattagtggcttggggggtgggggagataaaaagaacttaaaatgggtaaagtaagaaatgttaaaaagtccctgttttgtcctgaaattttagtctattctgggtaaataggattttctgacacagatatgagaagttgtagctctgatgtctagctgtagtctccttgatctgctgattgcattattttaatttgcttttctgggaaagcagttttgctaaaagctgtacagactttttcttttgtacctagcagtactttatatagtatagctttgggccatgtagcattttaagactcaattttaaaaaattattaatctgttgctgactcttaattcctatttcaatatgtgtttccttgaagaattcaggatacaacttcttgtgtatgacagctttccttcacacactatttttgtgggtgtgtatatatctgatttgggaagaatttaaaaaacacatagctttttaatttgtttgaaacagactttctgcctgttacatttttgcttttaaccaattaaagaagccaatggcattttagttttatattgtgttttccactagtatatccctgttgatttgtttgtgccttttattaactgcttggggatcctctagagtcagacccga

SEQ ID NO: 314323 - DNA, 1792 bp, Homo sapiens
  misc_feature (301)..(301): n is a, c, g, or t
ggggcacacattttatatacagacctctgagaaacctctcagcagaaaacctgcaggaaggaagtcttcagttaactaaagaagagttaatgtcctagaagagtattctaggcagagattacagcaaatgcaaaagctctcaagtgggagagtacttggggtgtttgaggactatcaaggattgaagaggctgttgtggctggagggaccagggcgagtgaggattgctgagaggtgaggtcagagtgcaaagggccttagggctgggcgaggtgctcacgcctgtaatcccagcactttnagacgcagaggcggacaagatggcggcggcagctgtacagggcgggagaagcggtggtagcggaggctgtagtggggctggtggtgcttccaactgcgggacaggaagtggccgtagcggcttgttggataagagacaagctctcactatattgcccaggctggactcgagctcctgggctcaagctgttctgccacctcagcctcccaagtatctgggatggcagtggaagatagatgataagcctgtaaaaattgacaagtgggatggatcagctgtgaaaaactctttggatgattctgccaaaaaggtacttctggaaaaatacaaatatgtggagaattttggtctaattgatggtcgcctcaccatctgtacaatctcctgtttctttgccatagtggctttgatttgggattatatgcacccctttccagagtccaaacccgttttggctttgtgtgtcatatcctattttgtgatgatggggattctgaccatttatacctcatataaggagaagagcatctttctcgtggcccacaggaaagatcctacaggaatggatcctgatgatatttggcagctgtcctccagtcttaaaaggtttgatgacaaatacaccttgaagctgaccttcatcagtgggagaacaaagcagcagcgggaagccgagttcacaaagtccattgctaagttttttgaccacagtgggacactggtcatggatgcatatgagcctgaaatatccaggctccatgacagtcttgccatagaaagaaaaataaagtagccaattctaaaagtagccctctttctcctggatcttgctgaattagtggcttggggggtgggggagataaaaagaacttaaaatgggtaaagtaagaaatgttaaaaagtccctgttttgtcctgaaattttagtctattctgggtaaataggattttctgacacagatatgagaagttgtagctctgatgtctagctgtagtctccttgatctgctgattgcattattttaatttgcttttctgggaaagcagttttgctaaaagctgtacagactttttcttttgtacctagcagtactttatatagtatagctttgggccatgtagcattttaagactcaattttaaaaaattattaatctgttgctgactcttaattcctatttcaatatgtgtttccttgaagaattcaggatacaacttcttgtgtatgacagctttccttcacacactatttttgtgggtgtgtatatatctgatttgggaagaatttaaaaaacacatagctttttaatttgtttgaaacagactttctgcctgttacatttttgcttttaaccaattaaagaagccaatggcattttagttttatattgtgttttccactagtatatccctgttgatttgtttgtgccttttattaactgccattttctaaaatttttttcaataaaaggaaggaagatgtgaaaaaaa

SEQ ID NO: 314324 - DNA, 1612 bp, Homo sapiens
gcaccgcagtggagcggctccgagatccccggggggctcgcaggcgcgcatccctcctgactgggacgtcgcctccgcagacccctcggaggctgaagcgacgccggaggcaggccaaggacactggttagtggttcagaaaggtaacctcaatgaagaagcccaagggtttggttggagcacaagctgaacgtcgggaaagcctgaaggcgacttcttttgagttcaaggggaagaaagagtctcggcgggaaaatcaggtggaccttcctggacatatcctggaccaggcttttctgctgaagcaccactgtgtgaggaagccatcagatctgtgcaccattaattggaagatagatgataagcctgtaaaaattgacaagtgggatggatcagctgtgaaaaactctttggatgattctgccaaaaaggtacttctggaaaaatacaaatatgtggagaattttggtctaattgatggtcgcctcaccatctgtacaatctcctgtttctttgccatagtggctttgatttgggattatatgcacccctttccagagtccaaacccgttttggctttgtgtgtcatatcctattttgtgatgatggggattctgaccatttatacctcatataaggagaagagcatctttctcgtggcccacaggaaagatcctacaggaatggatcctgatgatatttggcagctgtcctccagtcttaaaaggtttgatgacaaatacaccttgaagctgaccttcatcagtgggagaacaaagcagcagcgggaagccgagttcacaaagtccattgctaagttttttgaccacagtgggacactggtcatggatgcatatgagcctgaaatatccaggctccatgacagtcttgccatagaaagaaaaataaagtagccaattctaaaagtagccctctttctcctggatcttgctgaattagtggcttggggggtgggggagataaaaagaacttaaaatgggtaaagtaagaaatgttaaaaagtccctgttttgtcctgaaattttagtctattctgggtaaataggattttctgacacagatatgagaagttgtagctctgatgtctagctgtagtctccttgatctgctgattgcattattttaatttgcttttctgggaaagcagttttgctaaaagctgtacagactttttcttttgtacctagcagtactttatatagtatagctttgggccatgtagcattttaagactcaattttaaaaaattattaatctgttgctgactcttaattcctatttcaatatgtgtttccttgaagaattcaggatacaacttcttgtgtatgacagctttccttcacacactatttttgtgggtgtgtatatatctgatttgggaagaatttaaaaaacacatagctttttaatttgtttgaaacagactttctgcctgttacatttttgcttttaaccaattaaagaagccaatggcattttagttttatattgtgttttccactagtatatccctgttgatttgtttgtgccttttattaactgccattttctaaaatttttttcaataaaaggaaggaagatgtgaaaaaaa

SEQ ID NO: 314325 - DNA, 1082 bp, Homo sapiens
acaattcagctcggacccacaccacctgagtccaaacccgttttggctttgtgtgtcatatcctattttgtgatgatggggattctgaccatttatacctcatataaggagaagagcatctttctcgtggcccacaggaaagatcctacaggaatggatcctgatgatatttggcagctgtcctccagtcttaaaaggtttgatgacaaatacaccttgaagctgaccttcatcagtgggagaacaaagcagcagcgggaagccgagttcacaaagtccattgctaagttttttgaccacagtgggacactggtcatggatgcatatgagcctgaaatatccaggctccatgacagtcttgccatagaaagaaaaataaagtagccaattctaaaagtagccctctttctcctggatcttgctgaattagtggcttggggggtgggggagataaaaagaacttaaaatgggtaaagtaagaaatgttaaaaagtccctgttttgtcctgaaattttagtctattctgggtaaataggattttctgacacagatatgagaagttgtagctctgatgtctagctgtagtctccttgatctgctgattgcattattttaatttgcttttctgggaaagcagttttgctaaaagctgtacagactttttcttttgtacctagcagtactttatatagtatagctttgggccatgtagcattttaagactcaattttaaaaaattattaatctgttgctgactcttaattcctatttcaatatgtgtttccttgaagaattcaggatacaacttcttgtgtatgacagctttccttcacacactatttttgtgggtgtgtatatatctgatttgggaagaatttaaaaaacacatagctttttaatttgtttgaaacagactttctgcctgttacatttttgcttttaaccaattaaagaagccaatggcattttagttttatattgtgttttccactagtatatccctgttgatttgtttgtgccttttattaactgccattttctaaaatttttttcaataaaaggaaggaagatgtgaaaaaaa

SEQ ID NO: 314326 - DNA, 923 bp, Homo sapiens
  misc_feature (923)..(923): n is a, c, g, or t
ggcttcagacaagtcggaggggagggagacgcagaggcggacaagatggcggcggcagctgtacagggcgggagaagcggtggtagcggaggctgtagtggggctggtggtgcttccaactgcgggacaggaagtggccgtagcggcttgttggataagtggaagatagatgataagcctgtaaaaattgacaagtgggatggatcagctgtgaaaaactctttggatgattctgccaaaaaggtacttctggaaaaatacaaatatgtggagaattttggtctaattgatggtcgcctcaccatctgtacaatctcctgtttctttgccatagtggctttgatttgggattatatgcacccctttccagagtccaaacccgttttggctttgtgtgtcatatcctattttgtgatgatggggattctgaccatttatacctcatataaggagaagagcatctttctcgtggcccacaggaaagatcctacaggaatggatcctgatgatatttggcagctgtcctccagtcttaaaaggtttgatgacaaatacaccttgaagctgaccttcatcagtgggagaacaaagcagcagcgggaagccgagttcacaaagtccattgctaagttttttgaccacagtgggacactggtcatggatgcatatgagcctgaaatatccaggctccatgacagtcttgccatagaaagaaaaataaagtagccaattctaaaagtagccctctttctcctggattgtgataggtgggggggggggtaacgacttcatggtcgtgaagtaagccgtgccggattgcttccgggaagatttgaaaattaagggcgtagggcgaacgggggataaggggagaggagatttgccatattgggtacaggcctgtggagcctggggggaaatgn

SEQ ID NO: 314327 - DNA, 814 bp, Homo sapiens
ggcttcagacaagtcggaggggagggagacgcagaggcggacaagatggcggcggcagctgtacagggcgggagaagcggtggtagcggaggctgtagtggggctggtggtgcttccaactgcgggacaggaagtggccgtagcggcttgttggataagtggaagatagatgataagcctgtaaaaattgacaagtgggatggatcagctgtgaaaaactctttggatgattctgccaaaaaggtacttctggaaaaatacaaatatgtggagaattttggtctaattgatggtcgcctcaccatctgtacaatctcctgtttctttgccatagtggctttgatttgggattatatgcacccctttccagagtccaaacccgttttggctttgtgtgtcatatcctattttgtgatgatggggattctgaccatttatacctcatataaggagaagagcatctttctcgtggcccacaggaaagatcctacaggaatggatcctgatgatatttggcagctgtcctccagtcttaaaaggtttgatgacaaatacaccttgaagctgaccttcatcagtgggagaacaaagcagcagcgggaagccgagttcacaaagtccattgctaagttttttgaccacagtgggacactggtcatggatgcatatgagcctgaaatatccaggctccatgacagtcttgccatagaaagaaaaataaagtagccaattctaaaagtaaaaaaaacacacacaaaaaattttgggcgctcgccctgaaagtttaaacactgtggggcgcggcccctagagt

SEQ ID NO: 314328 - DNA, 1060 bp, Homo sapiens
  misc_feature (301)..(301): n is a, c, g, or t
ggggcacacattttatatacagacctctgagaaacctctcagcagaaaacctgcaggaaggaagtcttcagttaactaaagaagagttaatgtcctagaagagtattctaggcagagattacagcaaatgcaaaagctctcaagtgggagagtacttggggtgtttgaggactatcaaggattgaagaggctgttgtggctggagggaccagggcgagtgaggattgctgagaggtgaggtcagagtgcaaagggccttagggctgggcgaggtgctcacgcctgtaatcccagcactttnagacgcagaggcggacaagatggcggcggcagctgtacagggcgggagctggtggtgcttccaactgcgggacaggaagtggccgtagcggcttgttggataagtggaagatagatgataagcctgtaaaaattgacaagtgggatggatcagctgtgaaaaactctttggatgattctgccaaaaaggtacttctggaaaaatacaaatatgtggagaattttggtctaattgatggtcgcctcaccatctgtacaatctcctgtttctttgccatagtggctttgatttgggattatatgcacccctttccagagtccaaacccgttttggctttgtgtgtcatatcctattttgtgatgatggggattctgaccatttatacctcatataaggagaagagcatctttctcgtggcccacaggaaagatcctacaggaatggatcctgatgatatttggcagctgtcctccagtcttaaaaggtttgatgacaaatacaccttgaagctgaccttcatcagtgggagaacaaagcagcagcgggaagccgagttcacaaagtccattgctaagttttttgaccacagtgggacactggtcatggatgcatatgagcctgaaatatccaggctccatgacagtcttgccatagaaagaaaaataaagtagccaattctaaaagtaaaaaaaacacacacaaaaaattttgggcgctcgccctgaaagtttaaacactgtggggcgcggcccctagagt

SEQ ID NO: 314329 - DNA, 750 bp, Homo sapiens
  misc_feature (718)..(718): n is a, c, g, or t
ggcgtttccacggacgcccaggagacagccggttgctgagccgggagcgctgactggcccggctgggcaggtcttgactcgtctgctgaacaaatcctctgacctcaggccggctgtgaacgtagttcctgagagatagcaaacatgcccaacagtgagcccgcatctctgctggagctgttcaacagcatcgccacacaaggggagctcgtaaggtccctcaaagcgggaaatgcgtcaaaggatgaaattgattctgcagtaaagatgttggtgtcattaaaaatgagctacaaagctgccgcgggggaggattacaaggctgactgtcctccagggaacccagcacctaccagtaatcatggcccagatgccacagaagctgaagaggattttgtggacccatggacagtacagacaagcagtgcaaaaggcatagactacgataagctcattgttcggtttggaagtagtaaaattgacaaagagctaataaaccgaatagagagagccaccggccaaagaccacaccacttcctgcgcagaggcatcttcttctcacacagagatatgaatcaggttcttgatgcctatgaaaataagaagccattttatctgtacacgggccggggcccctcttctgaagcaatgcatgtaggtcacctcattccatttattttcacaaaaagttggctcccaggaatgttattttaaccgnttgcccctttgggttccatcccaaaaattaaa

SEQ ID NO: 314330 - DNA, 490 bp, Homo sapiens
ttgctgcccgccgcgttctggcactgtgaggcgcggagcctgccaccgacccctcgcccctttcctctgagcgccgccgacccaccccgtctccctttcccactggcacccttcatcgtctccgcctgttcgcttttcccgaggagagaggcccccatttttatttagcgcctgccatgtgccagaggctttgcgtagtgttgcacttagtcccctcaacggtaatgttagcaggcttctccatgcccattccacagatgaggaaaccgaaggggaagcagaaaagtaatgcgacccttgcccaaggtttcgaataagtccaagctgggattgaaacccaggcgtctgtgaccccagaactcctgatctttccactgcactgtgccgcctcggtgaacagatgcggggaatttacagtttctctttccaccgcccacgactacacaaaatcagtcacactgacgctgagggtggggaacgggaagagggt

SEQ ID NO: 314331 - DNA, 2813 bp, Homo sapiens
caatgaccagctaatggctcgattctcaagagggtttcattggtctcaacctggccccccaggcaacccacccctgattggacagtctcatcaagaagaagggaaactgaaagaaagaggggaagagtattaaagaccatttctggctgggcagggcactctcagcagctcaactgcccagcgtgaccagtggccacctctgcagtgtcttccacaacctggtcttgactcgtctgctgaacaaatcctctgacctcaggccggctgtgaacgtagttcctgagagatagcaaacatgcccaacagtgagcccgcatctctgctggagctgttcaacagcatcgccacacaaggggagctcgtaaggtccctcaaagcgggaaatgcgtcaaaggatgaaattgattctgcagtaaagatgttggtgtcattaaaaatgagctacaaagctgccgcgggggaggattacaaggctgactgtcctccagggaacccagcacctaccagtaatcatggcccagatgccacagaagctgaagaggattttgtggacccatggacagtacagacaagcagtgcaaaaggcatagactacgataagctcattgttcggtttggaagtagtaaaattgacaaagagctaataaaccgaatagagagagccaccggccaaagaccacaccacttcctgcgcagaggcatcttcttctcacacagagatatgaatcaggttcttgatgcctatgaaaataagaagccattttatctgtacacgggccggggcccctcttctgaagcaatgcatgtaggtcacctcattccatttattttcacaaagtggctccaggatgtatttaacgtgcccttggtcatccagatgacggatgacgagaagtatctgtggaaggacctgaccctggaccaggcctatagctatgctgtggagaatgccaaggacatcatcgcctgtggctttgacatcaacaagactttcatattctctgacctggactacatggggatgagctcaggtttctacaaaaatgtggtgaagattcaaaagcatgttaccttcaaccaagtgaaaggcattttcggcttcactgacagcgactgcattgggaagatcagttttcctgccatccaggctgctccctccttcagcaactcattcccacagatcttccgagacaggacggatatccagtgccttatcccatgtgccattgaccaggatccttactttagaatgacaagggacgtcgcccccaggatcggctatcctaaaccagccctgttgcactccaccttcttcccagccctgcagggcgcccagaccaaaatgagtgccagcgaccccaactcctccatcttcctcaccgacacggccaagcagatcaaaaccaaggtcaataagcatgcgttttctggagggagagacaccatcgaggagcacaggcagtttgggggcaactgtgatgtggacgtgtctttcatgtacctgaccttcttcctcgaggacgacgacaagctcgagcagatcaggaaggattacaccagcggagccatgctcaccggtgagctcaagaaggcactcatagaggttctgcagcccttgatcgcagagcaccaggcccggcgcaaggaggtcacggatgagatagtgaaagagttcatgactccccggaagctgtccttcgactttcagtagcactcgttttacatatgcttataaaagaagtgatgtatcagtaatgtatcaataatcccagcccagtcaaagcaccgccacctgtaggcttctgtctcatggtaattactgggcctggcctctgtaagcctgtgtatgttatcaatactgtttcttcctgtgagttccattatttctatctcttatgggcaaagcattgtgggtaattggtgctggctaacattgcatggtcggatagagaagtccagctgtgagtctctccccaaagcagccccacagtggagcctttggctggaagtccatgggccaccctgttcttgtccatggaggactccgagggttccaagtatactcttaagacccactctgtttaaaaatatatattctatgtatgcgtatatggaattgaaatgtcattattgtaacctagaaagtgctttgaaatattgatgtggggaggtttattgagcacaagatgtatttcagcccatgccccctcccaaaaagaaattgataagtaaaagcttcgttatacatttgactaagaaatcacccagctttaaagctgcttttaacaatgaagattgaacagagttcagcaattttgattaaattaagacttgggggtgaaactttccagtttactgaactccagaccatgcatgtagtccactccagaaatcatgctcgcttcccttggcacaccagtgttctcctgccaaatgaccctagaccctctgtcctgcagagtcagggtggcttttcccctgactgtgtccgatgccaaggagtcctggcctccgcagatgcttcattttgacccttggctgcagtggaagtcagcacagagcagtgccctggctgtgtccctggacgggtggacttagctagggagaaagtcgaggcagcagccctcgaggccctcacagatgtctaggcaggcctcatttcatcacgcagcatgtgcaggcctggaagagcaaagccaaatctcagggaagtccttggttgatgtatctgggtctcctctggagcactctgccctcctgtcacccagtagagtaaataaacttccttggctcctgaactcttgtcattgtgc

SEQ ID NO: 314332 - DNA, 2662 bp, Homo sapiens
ggcgtttccacggacgcccaggagacagccggttgctgagccgggagcgctgactggcccggctgggcaggtcttgactcgtctgctgaacaaatcctctgacctcaggccggctgtgaacgtagttcctgagagatagcaaacatgcccaacagtgagcccgcatctctgctggagctgttcaacagcatcgccacacaaggggagctcgtaaggtccctcaaagcgggaaatgcgtcaaaggatgaaattgattctgcagtaaagatgttggtgtcattaaaaatgagctacaaagctgccgcgggggaggattacaaggctgactgtcctccagggaacccagcacctaccagtaatcatggcccagatgccacagaagctgaagaggattttgtggacccatggacagtacagacaagcagtgcaaaaggcatagactacgataagctcattgttcggtttggaagtagtaaaattgacaaagagctaataaaccgaatagagagagccaccggccaaagaccacaccacttcctgcgcagaggcatcttcttctcacacagagatatgaatcaggttcttgatgcctatgaaaataagaagccattttatctgtacacgggccggggcccctcttctgaagcaatgcatgtaggtcacctcattccatttattttcacaaagtggctccaggatgtatttaacgtgcccttggtcatccagatgacggatgacgagaagtatctgtggaaggacctgaccctggaccaggcctatagctatgctgtggagaatgccaaggacatcatcgcctgtggctttgacatcaacaagactttcatattctctgacctggactacatggggatgagctcaggtttctacaaaaatgtggtgaagattcaaaagcatgttaccttcaaccaagtgaaaggcattttcggcttcactgacagcgactgcattgggaagatcagttttcctgccatccaggctgctccctccttcagcaactcattcccacagatcttccgagacaggacggatatccagtgccttatcccatgtgccattgaccaggatccttactttagaatgacaagggacgtcgcccccaggatcggctatcctaaaccagccctgttgcactccaccttcttcccagccctgcagggcgcccagaccaaaatgagtgccagcgaccccaactcctccatcttcctcaccgacacggccaagcagatcaaaaccaaggtcaataagcatgcgttttctggagggagagacaccatcgaggagcacaggcagtttgggggcaactgtgatgtggacgtgtctttcatgtacctgaccttcttcctcgaggacgacgacaagctcgagcagatcaggaaggattacaccagcggagccatgctcaccggtgagctcaagaaggcactcatagaggttctgcagcccttgatcgcagagcaccaggcccggcgcaaggaggtcacggatgagatagtgaaagagttcatgactccccggaagctgtccttcgactttcagtagcactcgttttacatatgcttataaaagaagtgatgtatcagtaatgtatcaataatcccagcccagtcaaagcaccgccacctgtaggcttctgtctcatggtaattactgggcctggcctctgtaagcctgtgtatgttatcaatactgtttcttcctgtgagttccattatttctatctcttatgggcaaagcattgtgggtaattggtgctggctaacattgcatggtcggatagagaagtccagctgtgagtctctccccaaagcagccccacagtggagcctttggctggaagtccatgggccaccctgttcttgtccatggaggactccgagggttccaagtatactcttaagacccactctgtttaaaaatatatattctatgtatgcgtatatggaattgaaatgtcattattgtaacctagaaagtgctttgaaatattgatgtggggaggtttattgagcacaagatgtatttcagcccatgccccctcccaaaaagaaattgataagtaaaagcttcgttatacatttgactaagaaatcacccagctttaaagctgcttttaacaatgaagattgaacagagttcagcaattttgattaaattaagacttgggggtgaaactttccagtttactgaactccagaccatgcatgtagtccactccagaaatcatgctcgcttcccttggcacaccagtgttctcctgccaaatgaccctagaccctctgtcctgcagagtcagggtggcttttcccctgactgtgtccgatgccaaggagtcctggcctccgcagatgcttcattttgacccttggctgcagtggaagtcagcacagagcagtgccctggctgtgtccctggacgggtggacttagctagggagaaagtcgaggcagcagccctcgaggccctcacagatgtctaggcaggcctcatttcatcacgcagcatgtgcaggcctggaagagcaaagccaaatctcagggaagtccttggttgatgtatctgggtctcctctggagcactctgccctcctgtcacccagtagagtaaataaacttccttggctcctgaactcttgtcattgtgc

SEQ ID NO: 314333 - DNA, 2723 bp, Homo sapiens
ggcgtttccacggacgcccaggagacagccggttgctgagccgggagcgctgactggcccggctgggcaggtcagcagctcaactgcccagcgtgaccagtggccacctctgcagtgtcttccacaacctggtcttgactcgtctgctgaacaaatcctctgacctcaggccggctgtgaacgtagttcctgagagatagcaaacatgcccaacagtgagcccgcatctctgctggagctgttcaacagcatcgccacacaaggggagctcgtaaggtccctcaaagcgggaaatgcgtcaaaggatgaaattgattctgcagtaaagatgttggtgtcattaaaaatgagctacaaagctgccgcgggggaggattacaaggctgactgtcctccagggaacccagcacctaccagtaatcatggcccagatgccacagaagctgaagaggattttgtggacccatggacagtacagacaagcagtgcaaaaggcatagactacgataagctcattgttcggtttggaagtagtaaaattgacaaagagctaataaaccgaatagagagagccaccggccaaagaccacaccacttcctgcgcagaggcatcttcttctcacacagagatatgaatcaggttcttgatgcctatgaaaataagaagccattttatctgtacacgggccggggcccctcttctgaagcaatgcatgtaggtcacctcattccatttattttcacaaagtggctccaggatgtatttaacgtgcccttggtcatccagatgacggatgacgagaagtatctgtggaaggacctgaccctggaccaggcctatagctatgctgtggagaatgccaaggacatcatcgcctgtggctttgacatcaacaagactttcatattctctgacctggactacatggggatgagctcaggtttctacaaaaatgtggtgaagattcaaaagcatgttaccttcaaccaagtgaaaggcattttcggcttcactgacagcgactgcattgggaagatcagttttcctgccatccaggctgctccctccttcagcaactcattcccacagatcttccgagacaggacggatatccagtgccttatcccatgtgccattgaccaggatccttactttagaatgacaagggacgtcgcccccaggatcggctatcctaaaccagccctgttgcactccaccttcttcccagccctgcagggcgcccagaccaaaatgagtgccagcgaccccaactcctccatcttcctcaccgacacggccaagcagatcaaaaccaaggtcaataagcatgcgttttctggagggagagacaccatcgaggagcacaggcagtttgggggcaactgtgatgtggacgtgtctttcatgtacctgaccttcttcctcgaggacgacgacaagctcgagcagatcaggaaggattacaccagcggagccatgctcaccggtgagctcaagaaggcactcatagaggttctgcagcccttgatcgcagagcaccaggcccggcgcaaggaggtcacggatgagatagtgaaagagttcatgactccccggaagctgtccttcgactttcagtagcactcgttttacatatgcttataaaagaagtgatgtatcagtaatgtatcaataatcccagcccagtcaaagcaccgccacctgtaggcttctgtctcatggtaattactgggcctggcctctgtaagcctgtgtatgttatcaatactgtttcttcctgtgagttccattatttctatctcttatgggcaaagcattgtgggtaattggtgctggctaacattgcatggtcggatagagaagtccagctgtgagtctctccccaaagcagccccacagtggagcctttggctggaagtccatgggccaccctgttcttgtccatggaggactccgagggttccaagtatactcttaagacccactctgtttaaaaatatatattctatgtatgcgtatatggaattgaaatgtcattattgtaacctagaaagtgctttgaaatattgatgtggggaggtttattgagcacaagatgtatttcagcccatgccccctcccaaaaagaaattgataagtaaaagcttcgttatacatttgactaagaaatcacccagctttaaagctgcttttaacaatgaagattgaacagagttcagcaattttgattaaattaagacttgggggtgaaactttccagtttactgaactccagaccatgcatgtagtccactccagaaatcatgctcgcttcccttggcacaccagtgttctcctgccaaatgaccctagaccctctgtcctgcagagtcagggtggcttttcccctgactgtgtccgatgccaaggagtcctggcctccgcagatgcttcattttgacccttggctgcagtggaagtcagcacagagcagtgccctggctgtgtccctggacgggtggacttagctagggagaaagtcgaggcagcagccctcgaggccctcacagatgtctaggcaggcctcatttcatcacgcagcatgtgcaggcctggaagagcaaagccaaatctcagggaagtccttggttgatgtatctgggtctcctctggagcactctgccctcctgtcacccagtagagtaaataaacttccttggctcctgaactcttgtcattgtgc

SEQ ID NO: 314334 - DNA, 3026 bp, Homo sapiens
caatgaccagctaatggctcgattctcaagagggtttcattggtctcaacctggccccccaggcaacccacccctgattggacagtctcatcaagaaggttggtcaagagctcaagtgtttctgagaatctgggtgatttataagaaacccttagctgaatgcagggtggggagaacgaaagacaaaagcatcttttttcagaagggaaactgaaagaaagaggggaagagtattaaagaccatttctggctgggcagggcactctcagcagctcaactgcccagcgtgaccagtggccacctctgcagtgtcttccacaacctgggtgaatctacttctcttaacaaagtctcaatgtcctatttgcaatttatgtggtaaacactgaagacaatggtccttaaccttttggcatctcagcctcctttcgaaagtcttgactcgtctgctgaacaaatcctctgacctcaggccggctgtgaacgtagttcctgagagatagcaaacatgcccaacagtgagcccgcatctctgctggagctgttcaacagcatcgccacacaaggggagctcgtaaggtccctcaaagcgggaaatgcgtcaaaggatgaaattgattctgcagtaaagatgttggtgtcattaaaaatgagctacaaagctgccgcgggggaggattacaaggctgactgtcctccagggaacccagcacctaccagtaatcatggcccagatgccacagaagctgaagaggattttgtggacccatggacagtacagacaagcagtgcaaaaggcatagactacgataagctcattgttcggtttggaagtagtaaaattgacaaagagctaataaaccgaatagagagagccaccggccaaagaccacaccacttcctgcgcagaggcatcttcttctcacacagagatatgaatcaggttcttgatgcctatgaaaataagaagccattttatctgtacacgggccggggcccctcttctgaagcaatgcatgtaggtcacctcattccatttattttcacaaagtggctccaggatgtatttaacgtgcccttggtcatccagatgacggatgacgagaagtatctgtggaaggacctgaccctggaccaggcctatagctatgctgtggagaatgccaaggacatcatcgcctgtggctttgacatcaacaagactttcatattctctgacctggactacatggggatgagctcaggtttctacaaaaatgtggtgaagattcaaaagcatgttaccttcaaccaagtgaaaggcattttcggcttcactgacagcgactgcattgggaagatcagttttcctgccatccaggctgctccctccttcagcaactcattcccacagatcttccgagacaggacggatatccagtgccttatcccatgtgccattgaccaggatccttactttagaatgacaagggacgtcgcccccaggatcggctatcctaaaccagccctgttgcactccaccttcttcccagccctgcagggcgcccagaccaaaatgagtgccagcgaccccaactcctccatcttcctcaccgacacggccaagcagatcaaaaccaaggtcaataagcatgcgttttctggagggagagacaccatcgaggagcacaggcagtttgggggcaactgtgatgtggacgtgtctttcatgtacctgaccttcttcctcgaggacgacgacaagctcgagcagatcaggaaggattacaccagcggagccatgctcaccggtgagctcaagaaggcactcatagaggttctgcagcccttgatcgcagagcaccaggcccggcgcaaggaggtcacggatgagatagtgaaagagttcatgactccccggaagctgtccttcgactttcagtagcactcgttttacatatgcttataaaagaagtgatgtatcagtaatgtatcaataatcccagcccagtcaaagcaccgccacctgtaggcttctgtctcatggtaattactgggcctggcctctgtaagcctgtgtatgttatcaatactgtttcttcctgtgagttccattatttctatctcttatgggcaaagcattgtgggtaattggtgctggctaacattgcatggtcggatagagaagtccagctgtgagtctctccccaaagcagccccacagtggagcctttggctggaagtccatgggccaccctgttcttgtccatggaggactccgagggttccaagtatactcttaagacccactctgtttaaaaatatatattctatgtatgcgtatatggaattgaaatgtcattattgtaacctagaaagtgctttgaaatattgatgtggggaggtttattgagcacaagatgtatttcagcccatgccccctcccaaaaagaaattgataagtaaaagcttcgttatacatttgactaagaaatcacccagctttaaagctgcttttaacaatgaagattgaacagagttcagcaattttgattaaattaagacttgggggtgaaactttccagtttactgaactccagaccatgcatgtagtccactccagaaatcatgctcgcttcccttggcacaccagtgttctcctgccaaatgaccctagaccctctgtcctgcagagtcagggtggcttttcccctgactgtgtccgatgccaaggagtcctggcctccgcagatgcttcattttgacccttggctgcagtggaagtcagcacagagcagtgccctggctgtgtccctggacgggtggacttagctagggagaaagtcgaggcagcagccctcgaggccctcacagatgtctaggcaggcctcatttcatcacgcagcatgtgcaggcctggaagagcaaagccaaatctcagggaagtccttggttgatgtatctgggtctcctctggagcactctgccctcctgtcacccagtagagtaaataaacttccttggctcctgaactcttgtcattgtgc

SEQ ID NO: 314335 - DNA, 2689 bp, Homo sapiens
caatgaccagctaatggctcgattctcaagagggtttcattggtctcaacctggccccccaggcaacccacccctgattggacagtctcatcaagaagtcttgactcgtctgctgaacaaatcctctgacctcaggccggctgtgaacgtagttcctgagagatagcaaacatgcccaacagtgagcccgcatctctgctggagctgttcaacagcatcgccacacaaggggagctcgtaaggtccctcaaagcgggaaatgcgtcaaaggatgaaattgattctgcagtaaagatgttggtgtcattaaaaatgagctacaaagctgccgcgggggaggattacaaggctgactgtcctccagggaacccagcacctaccagtaatcatggcccagatgccacagaagctgaagaggattttgtggacccatggacagtacagacaagcagtgcaaaaggcatagactacgataagctcattgttcggtttggaagtagtaaaattgacaaagagctaataaaccgaatagagagagccaccggccaaagaccacaccacttcctgcgcagaggcatcttcttctcacacagagatatgaatcaggttcttgatgcctatgaaaataagaagccattttatctgtacacgggccggggcccctcttctgaagcaatgcatgtaggtcacctcattccatttattttcacaaagtggctccaggatgtatttaacgtgcccttggtcatccagatgacggatgacgagaagtatctgtggaaggacctgaccctggaccaggcctatagctatgctgtggagaatgccaaggacatcatcgcctgtggctttgacatcaacaagactttcatattctctgacctggactacatggggatgagctcaggtttctacaaaaatgtggtgaagattcaaaagcatgttaccttcaaccaagtgaaaggcattttcggcttcactgacagcgactgcattgggaagatcagttttcctgccatccaggctgctccctccttcagcaactcattcccacagatcttccgagacaggacggatatccagtgccttatcccatgtgccattgaccaggatccttactttagaatgacaagggacgtcgcccccaggatcggctatcctaaaccagccctgttgcactccaccttcttcccagccctgcagggcgcccagaccaaaatgagtgccagcgaccccaactcctccatcttcctcaccgacacggccaagcagatcaaaaccaaggtcaataagcatgcgttttctggagggagagacaccatcgaggagcacaggcagtttgggggcaactgtgatgtggacgtgtctttcatgtacctgaccttcttcctcgaggacgacgacaagctcgagcagatcaggaaggattacaccagcggagccatgctcaccggtgagctcaagaaggcactcatagaggttctgcagcccttgatcgcagagcaccaggcccggcgcaaggaggtcacggatgagatagtgaaagagttcatgactccccggaagctgtccttcgactttcagtagcactcgttttacatatgcttataaaagaagtgatgtatcagtaatgtatcaataatcccagcccagtcaaagcaccgccacctgtaggcttctgtctcatggtaattactgggcctggcctctgtaagcctgtgtatgttatcaatactgtttcttcctgtgagttccattatttctatctcttatgggcaaagcattgtgggtaattggtgctggctaacattgcatggtcggatagagaagtccagctgtgagtctctccccaaagcagccccacagtggagcctttggctggaagtccatgggccaccctgttcttgtccatggaggactccgagggttccaagtatactcttaagacccactctgtttaaaaatatatattctatgtatgcgtatatggaattgaaatgtcattattgtaacctagaaagtgctttgaaatattgatgtggggaggtttattgagcacaagatgtatttcagcccatgccccctcccaaaaagaaattgataagtaaaagcttcgttatacatttgactaagaaatcacccagctttaaagctgcttttaacaatgaagattgaacagagttcagcaattttgattaaattaagacttgggggtgaaactttccagtttactgaactccagaccatgcatgtagtccactccagaaatcatgctcgcttcccttggcacaccagtgttctcctgccaaatgaccctagaccctctgtcctgcagagtcagggtggcttttcccctgactgtgtccgatgccaaggagtcctggcctccgcagatgcttcattttgacccttggctgcagtggaagtcagcacagagcagtgccctggctgtgtccctggacgggtggacttagctagggagaaagtcgaggcagcagccctcgaggccctcacagatgtctaggcaggcctcatttcatcacgcagcatgtgcaggcctggaagagcaaagccaaatctcagggaagtccttggttgatgtatctgggtctcctctggagcactctgccctcctgtcacccagtagagtaaataaacttccttggctcctgaactcttgtcattgtgc

SEQ ID NO: 314336 - DNA, 2747 bp, Homo sapiens
ggcgtttccacggacgcccaggagacagccggttgctgagccgggagcgctgactggcccggctgggcaggatgttcctgaactccaagttgaaaaacctctgaagttcaactcaattctgaaagtcaacaaagaaataaaggaggatgtcaatagtcttgactcgtctgctgaacaaatcctctgacctcaggccggctgtgaacgtagttcctgagagatagcaaacatgcccaacagtgagcccgcatctctgctggagctgttcaacagcatcgccacacaaggggagctcgtaaggtccctcaaagcgggaaatgcgtcaaaggatgaaattgattctgcagtaaagatgttggtgtcattaaaaatgagctacaaagctgccgcgggggaggattacaaggctgactgtcctccagggaacccagcacctaccagtaatcatggcccagatgccacagaagctgaagaggattttgtggacccatggacagtacagacaagcagtgcaaaaggcatagactacgataagctcattgttcggtttggaagtagtaaaattgacaaagagctaataaaccgaatagagagagccaccggccaaagaccacaccacttcctgcgcagaggcatcttcttctcacacagagatatgaatcaggttcttgatgcctatgaaaataagaagccattttatctgtacacgggccggggcccctcttctgaagcaatgcatgtaggtcacctcattccatttattttcacaaagtggctccaggatgtatttaacgtgcccttggtcatccagatgacggatgacgagaagtatctgtggaaggacctgaccctggaccaggcctatagctatgctgtggagaatgccaaggacatcatcgcctgtggctttgacatcaacaagactttcatattctctgacctggactacatggggatgagctcaggtttctacaaaaatgtggtgaagattcaaaagcatgttaccttcaaccaagtgaaaggcattttcggcttcactgacagcgactgcattgggaagatcagttttcctgccatccaggctgctccctccttcagcaactcattcccacagatcttccgagacaggacggatatccagtgccttatcccatgtgccattgaccaggatccttactttagaatgacaagggacgtcgcccccaggatcggctatcctaaaccagccctgttgcactccaccttcttcccagccctgcagggcgcccagaccaaaatgagtgccagcgaccccaactcctccatcttcctcaccgacacggccaagcagatcaaaaccaaggtcaataagcatgcgttttctggagggagagacaccatcgaggagcacaggcagtttgggggcaactgtgatgtggacgtgtctttcatgtacctgaccttcttcctcgaggacgacgacaagctcgagcagatcaggaaggattacaccagcggagccatgctcaccggtgagctcaagaaggcactcatagaggttctgcagcccttgatcgcagagcaccaggcccggcgcaaggaggtcacggatgagatagtgaaagagttcatgactccccggaagctgtccttcgactttcagtagcactcgttttacatatgcttataaaagaagtgatgtatcagtaatgtatcaataatcccagcccagtcaaagcaccgccacctgtaggcttctgtctcatggtaattactgggcctggcctctgtaagcctgtgtatgttatcaatactgtttcttcctgtgagttccattatttctatctcttatgggcaaagcattgtgggtaattggtgctggctaacattgcatggtcggatagagaagtccagctgtgagtctctccccaaagcagccccacagtggagcctttggctggaagtccatgggccaccctgttcttgtccatggaggactccgagggttccaagtatactcttaagacccactctgtttaaaaatatatattctatgtatgcgtatatggaattgaaatgtcattattgtaacctagaaagtgctttgaaatattgatgtggggaggtttattgagcacaagatgtatttcagcccatgccccctcccaaaaagaaattgataagtaaaagcttcgttatacatttgactaagaaatcacccagctttaaagctgcttttaacaatgaagattgaacagagttcagcaattttgattaaattaagacttgggggtgaaactttccagtttactgaactccagaccatgcatgtagtccactccagaaatcatgctcgcttcccttggcacaccagtgttctcctgccaaatgaccctagaccctctgtcctgcagagtcagggtggcttttcccctgactgtgtccgatgccaaggagtcctggcctccgcagatgcttcattttgacccttggctgcagtggaagtcagcacagagcagtgccctggctgtgtccctggacgggtggacttagctagggagaaagtcgaggcagcagccctcgaggccctcacagatgtctaggcaggcctcatttcatcacgcagcatgtgcaggcctggaagagcaaagccaaatctcagggaagtccttggttgatgtatctgggtctcctctggagcactctgccctcctgtcacccagtagagtaaataaacttccttggctcctgaactcttgtcattgtgc

SEQ ID NO: 314337 - DNA, 2650 bp, Homo sapiens
  misc_feature (28)..(28): n is a, c, g, or t
  misc_feature (49)..(49): n is a, c, g, or t
cgctgactggcccggctgggcaggagtntactatttgttaaacagcctnctttcgaaagtcttgactcgtctgctgaacaaatcctctgacctcaggccggctgtgaacgtagttcctgagagatagcaaacatgcccaacagtgagcccgcatctctgctggagctgttcaacagcatcgccacacaaggggagctcgtaaggtccctcaaagcgggaaatgcgtcaaaggatgaaattgattctgcagtaaagatgttggtgtcattaaaaatgagctacaaagctgccgcgggggaggattacaaggctgactgtcctccagggaacccagcacctaccagtaatcatggcccagatgccacagaagctgaagaggattttgtggacccatggacagtacagacaagcagtgcaaaaggcatagactacgataagctcattgttcggtttggaagtagtaaaattgacaaagagctaataaaccgaatagagagagccaccggccaaagaccacaccacttcctgcgcagaggcatcttcttctcacacagagatatgaatcaggttcttgatgcctatgaaaataagaagccattttatctgtacacgggccggggcccctcttctgaagcaatgcatgtaggtcacctcattccatttattttcacaaagtggctccaggatgtatttaacgtgcccttggtcatccagatgacggatgacgagaagtatctgtggaaggacctgaccctggaccaggcctatagctatgctgtggagaatgccaaggacatcatcgcctgtggctttgacatcaacaagactttcatattctctgacctggactacatggggatgagctcaggtttctacaaaaatgtggtgaagattcaaaagcatgttaccttcaaccaagtgaaaggcattttcggcttcactgacagcgactgcattgggaagatcagttttcctgccatccaggctgctccctccttcagcaactcattcccacagatcttccgagacaggacggatatccagtgccttatcccatgtgccattgaccaggatccttactttagaatgacaagggacgtcgcccccaggatcggctatcctaaaccagccctgttgcactccaccttcttcccagccctgcagggcgcccagaccaaaatgagtgccagcgaccccaactcctccatcttcctcaccgacacggccaagcagatcaaaaccaaggtcaataagcatgcgttttctggagggagagacaccatcgaggagcacaggcagtttgggggcaactgtgatgtggacgtgtctttcatgtacctgaccttcttcctcgaggacgacgacaagctcgagcagatcaggaaggattacaccagcggagccatgctcaccggtgagctcaagaaggcactcatagaggttctgcagcccttgatcgcagagcaccaggcccggcgcaaggaggtcacggatgagatagtgaaagagttcatgactccccggaagctgtccttcgactttcagtagcactcgttttacatatgcttataaaagaagtgatgtatcagtaatgtatcaataatcccagcccagtcaaagcaccgccacctgtaggcttctgtctcatggtaattactgggcctggcctctgtaagcctgtgtatgttatcaatactgtttcttcctgtgagttccattatttctatctcttatgggcaaagcattgtgggtaattggtgctggctaacattgcatggtcggatagagaagtccagctgtgagtctctccccaaagcagccccacagtggagcctttggctggaagtccatgggccaccctgttcttgtccatggaggactccgagggttccaagtatactcttaagacccactctgtttaaaaatatatattctatgtatgcgtatatggaattgaaatgtcattattgtaacctagaaagtgctttgaaatattgatgtggggaggtttattgagcacaagatgtatttcagcccatgccccctcccaaaaagaaattgataagtaaaagcttcgttatacatttgactaagaaatcacccagctttaaagctgcttttaacaatgaagattgaacagagttcagcaattttgattaaattaagacttgggggtgaaactttccagtttactgaactccagaccatgcatgtagtccactccagaaatcatgctcgcttcccttggcacaccagtgttctcctgccaaatgaccctagaccctctgtcctgcagagtcagggtggcttttcccctgactgtgtccgatgccaaggagtcctggcctccgcagatgcttcattttgacccttggctgcagtggaagtcagcacagagcagtgccctggctgtgtccctggacgggtggacttagctagggagaaagtcgaggcagcagccctcgaggccctcacagatgtctaggcaggcctcatttcatcacgcagcatgtgcaggcctggaagagcaaagccaaatctcagggaagtccttggttgatgtatctgggtctcctctggagcactctgccctcctgtcacccagtagagtaaataaacttccttggctcctgaactcttgtcattgtgc

SEQ ID NO: 314338 - DNA, 2880 bp, Homo sapiens
caatgaccagctaatggctcgattctcaagagggtttcattggtctcaacctggccccccaggcaacccacccctgattggacagtctcatcaagaaggttggtcaagagctcaagtgtttctgagaatctgggtgatttataagaaacccttagctgaatgcagggtggggagaacgaaagacaaaagcatcttttttcagaagggaaactgaaagaaagaggggaagagtattaaagaccatttctggctgggcagggcactctcagcagctcaactgcccagcgtgaccagtggccacctctgcagtgtcttccacaacctgggccggctgtgaacgtagttcctgagagatagcaaacatgcccaacagtgagcccgcatctctgctggagctgttcaacagcatcgccacacaaggggagctcgtaaggtccctcaaagcgggaaatgcgtcaaaggatgaaattgattctgcagtaaagatgttggtgtcattaaaaatgagctacaaagctgccgcgggggaggattacaaggctgactgtcctccagggaacccagcacctaccagtaatcatggcccagatgccacagaagctgaagaggattttgtggacccatggacagtacagacaagcagtgcaaaaggcatagactacgataagctcattgttcggtttggaagtagtaaaattgacaaagagctaataaaccgaatagagagagccaccggccaaagaccacaccacttcctgcgcagaggcatcttcttctcacacagagatatgaatcaggttcttgatgcctatgaaaataagaagccattttatctgtacacgggccggggcccctcttctgaagcaatgcatgtaggtcacctcattccatttattttcacaaagtggctccaggatgtatttaacgtgcccttggtcatccagatgacggatgacgagaagtatctgtggaaggacctgaccctggaccaggcctatagctatgctgtggagaatgccaaggacatcatcgcctgtggctttgacatcaacaagactttcatattctctgacctggactacatggggatgagctcaggtttctacaaaaatgtggtgaagattcaaaagcatgttaccttcaaccaagtgaaaggcattttcggcttcactgacagcgactgcattgggaagatcagttttcctgccatccaggctgctccctccttcagcaactcattcccacagatcttccgagacaggacggatatccagtgccttatcccatgtgccattgaccaggatccttactttagaatgacaagggacgtcgcccccaggatcggctatcctaaaccagccctgttgcactccaccttcttcccagccctgcagggcgcccagaccaaaatgagtgccagcgaccccaactcctccatcttcctcaccgacacggccaagcagatcaaaaccaaggtcaataagcatgcgttttctggagggagagacaccatcgaggagcacaggcagtttgggggcaactgtgatgtggacgtgtctttcatgtacctgaccttcttcctcgaggacgacgacaagctcgagcagatcaggaaggattacaccagcggagccatgctcaccggtgagctcaagaaggcactcatagaggttctgcagcccttgatcgcagagcaccaggcccggcgcaaggaggtcacggatgagatagtgaaagagttcatgactccccggaagctgtccttcgactttcagtagcactcgttttacatatgcttataaaagaagtgatgtatcagtaatgtatcaataatcccagcccagtcaaagcaccgccacctgtaggcttctgtctcatggtaattactgggcctggcctctgtaagcctgtgtatgttatcaatactgtttcttcctgtgagttccattatttctatctcttatgggcaaagcattgtgggtaattggtgctggctaacattgcatggtcggatagagaagtccagctgtgagtctctccccaaagcagccccacagtggagcctttggctggaagtccatgggccaccctgttcttgtccatggaggactccgagggttccaagtatactcttaagacccactctgtttaaaaatatatattctatgtatgcgtatatggaattgaaatgtcattattgtaacctagaaagtgctttgaaatattgatgtggggaggtttattgagcacaagatgtatttcagcccatgccccctcccaaaaagaaattgataagtaaaagcttcgttatacatttgactaagaaatcacccagctttaaagctgcttttaacaatgaagattgaacagagttcagcaattttgattaaattaagacttgggggtgaaactttccagtttactgaactccagaccatgcatgtagtccactccagaaatcatgctcgcttcccttggcacaccagtgttctcctgccaaatgaccctagaccctctgtcctgcagagtcagggtggcttttcccctgactgtgtccgatgccaaggagtcctggcctccgcagatgcttcattttgacccttggctgcagtggaagtcagcacagagcagtgccctggctgtgtccctggacgggtggacttagctagggagaaagtcgaggcagcagccctcgaggccctcacagatgtctaggcaggcctcatttcatcacgcagcatgtgcaggcctggaagagcaaagccaaatctcagggaagtccttggttgatgtatctgggtctcctctggagcactctgccctcctgtcacccagtagagtaaataaacttccttggctcctgaactcttgtcattgtgc

SEQ ID NO: 314339 - DNA, 2745 bp, Homo sapiens
caatgaccagctaatggctcgattctcaagagggtttcattggtctcaacctggccccccaggcaacccacccctgattggacagtctcatcaagaaggttggtcaagagctcaagtgtttctgagaatctgggtgatttataagaaacccttagctgaatgcagggtggggagaacgaaagacaaaagcatcttttttcagaagggaaactgaaagaaagaggggaagagtattaaagaccatttctggctgggcagggcactctcagcagctcaactgcccagcgtgaccagtggccacctctgcagtgtcttccacaacctgggatgaaattgattctgcagtaaagatgttggtgtcattaaaaatgagctacaaagctgccgcgggggaggattacaaggctgactgtcctccagggaacccagcacctaccagtaatcatggcccagatgccacagaagctgaagaggattttgtggacccatggacagtacagacaagcagtgcaaaaggcatagactacgataagctcattgttcggtttggaagtagtaaaattgacaaagagctaataaaccgaatagagagagccaccggccaaagaccacaccacttcctgcgcagaggcatcttcttctcacacagagatatgaatcaggttcttgatgcctatgaaaataagaagccattttatctgtacacgggccggggcccctcttctgaagcaatgcatgtaggtcacctcattccatttattttcacaaagtggctccaggatgtatttaacgtgcccttggtcatccagatgacggatgacgagaagtatctgtggaaggacctgaccctggaccaggcctatagctatgctgtggagaatgccaaggacatcatcgcctgtggctttgacatcaacaagactttcatattctctgacctggactacatggggatgagctcaggtttctacaaaaatgtggtgaagattcaaaagcatgttaccttcaaccaagtgaaaggcattttcggcttcactgacagcgactgcattgggaagatcagttttcctgccatccaggctgctccctccttcagcaactcattcccacagatcttccgagacaggacggatatccagtgccttatcccatgtgccattgaccaggatccttactttagaatgacaagggacgtcgcccccaggatcggctatcctaaaccagccctgttgcactccaccttcttcccagccctgcagggcgcccagaccaaaatgagtgccagcgaccccaactcctccatcttcctcaccgacacggccaagcagatcaaaaccaaggtcaataagcatgcgttttctggagggagagacaccatcgaggagcacaggcagtttgggggcaactgtgatgtggacgtgtctttcatgtacctgaccttcttcctcgaggacgacgacaagctcgagcagatcaggaaggattacaccagcggagccatgctcaccggtgagctcaagaaggcactcatagaggttctgcagcccttgatcgcagagcaccaggcccggcgcaaggaggtcacggatgagatagtgaaagagttcatgactccccggaagctgtccttcgactttcagtagcactcgttttacatatgcttataaaagaagtgatgtatcagtaatgtatcaataatcccagcccagtcaaagcaccgccacctgtaggcttctgtctcatggtaattactgggcctggcctctgtaagcctgtgtatgttatcaatactgtttcttcctgtgagttccattatttctatctcttatgggcaaagcattgtgggtaattggtgctggctaacattgcatggtcggatagagaagtccagctgtgagtctctccccaaagcagccccacagtggagcctttggctggaagtccatgggccaccctgttcttgtccatggaggactccgagggttccaagtatactcttaagacccactctgtttaaaaatatatattctatgtatgcgtatatggaattgaaatgtcattattgtaacctagaaagtgctttgaaatattgatgtggggaggtttattgagcacaagatgtatttcagcccatgccccctcccaaaaagaaattgataagtaaaagcttcgttatacatttgactaagaaatcacccagctttaaagctgcttttaacaatgaagattgaacagagttcagcaattttgattaaattaagacttgggggtgaaactttccagtttactgaactccagaccatgcatgtagtccactccagaaatcatgctcgcttcccttggcacaccagtgttctcctgccaaatgaccctagaccctctgtcctgcagagtcagggtggcttttcccctgactgtgtccgatgccaaggagtcctggcctccgcagatgcttcattttgacccttggctgcagtggaagtcagcacagagcagtgccctggctgtgtccctggacgggtggacttagctagggagaaagtcgaggcagcagccctcgaggccctcacagatgtctaggcaggcctcatttcatcacgcagcatgtgcaggcctggaagagcaaagccaaatctcagggaagtccttggttgatgtatctgggtctcctctggagcactctgccctcctgtcacccagtagagtaaataaacttccttggctcctgaactcttgtcattgtgc

SEQ ID NO: 314340 - DNA, 3028 bp, Homo sapiens
caatgaccagctaatggctcgattctcaagagggtttcattggtctcaacctggccccccaggcaacccacccctgattggacagtctcatcaagaaggttggtcaagagctcaagtgtttctgagaatctgggtgatttataagaaacccttagctgaatgcagggtggggagaacgaaagacaaaagcatcttttttcagaagggaaactgaaagaaagaggggaagagtattaaagaccatttctggctgggcagggcactctcagcagctcaactgcccagcgtgaccagtggccacctctgcagtgtcttccacaacctggagtgtactatttgttaaacaggtgaatctacttctcttaacaaagtctcaatgtcctatttgcaatttatgtggtaaacactgaagacaatggtccttaaccttttggcatctcagcctcctttcgaaagtcttgactcgtctgctgaacaaatcctctgacctcaggccggctgtgaacgtagttcctgagagatagcaaacatgcccaacagtgagcccgcatctctgctggagctgttcaacagcatcgccacacaaggggagctcgtaaggtccctcaaagcgggaaatgcgtcaaagtaaagatgttggtgtcattaaaaatgagctacaaagctgccgcgggggaggattacaaggctgactgtcctccagggaacccagcacctaccagtaatcatggcccagatgccacagaagctgaagaggattttgtggacccatggacagtacagacaagcagtgcaaaaggcatagactacgataagctcattgttcggtttggaagtagtaaaattgacaaagagctaataaaccgaatagagagagccaccggccaaagaccacaccacttcctgcgcagaggcatcttcttctcacacagagatatgaatcaggttcttgatgcctatgaaaataagaagccattttatctgtacacgggccggggcccctcttctgaagcaatgcatgtaggtcacctcattccatttattttcacaaagtggctccaggatgtatttaacgtgcccttggtcatccagatgacggatgacgagaagtatctgtggaaggacctgaccctggaccaggcctatagctatgctgtggagaatgccaaggacatcatcgcctgtggctttgacatcaacaagactttcatattctctgacctggactacatggggatgagctcaggtttctacaaaaatgtggtgaagattcaaaagcatgttaccttcaaccaagtgaaaggcattttcggcttcactgacagcgactgcattgggaagatcagttttcctgccatccaggctgctccctccttcagcaactcattcccacagatcttccgagacaggacggatatccagtgccttatcccatgtgccattgaccaggatccttactttagaatgacaagggacgtcgcccccaggatcggctatcctaaaccagccctgttgcactccaccttcttcccagccctgcagggcgcccagaccaaaatgagtgccagcgaccccaactcctccatcttcctcaccgacacggccaagcagatcaaaaccaaggtcaataagcatgcgttttctggagggagagacaccatcgaggagcacaggcagtttgggggcaactgtgatgtggacgtgtctttcatgtacctgaccttcttcctcgaggacgacgacaagctcgagcagatcaggaaggattacaccagcggagccatgctcaccggtgagctcaagaaggcactcatagaggttctgcagcccttgatcgcagagcaccaggcccggcgcaaggaggtcacggatgagatagtgaaagagttcatgactccccggaagctgtccttcgactttcagtagcactcgttttacatatgcttataaaagaagtgatgtatcagtaatgtatcaataatcccagcccagtcaaagcaccgccacctgtaggcttctgtctcatggtaattactgggcctggcctctgtaagcctgtgtatgttatcaatactgtttcttcctgtgagttccattatttctatctcttatgggcaaagcattgtgggtaattggtgctggctaacattgcatggtcggatagagaagtccagctgtgagtctctccccaaagcagccccacagtggagcctttggctggaagtccatgggccaccctgttcttgtccatggaggactccgagggttccaagtatactcttaagacccactctgtttaaaaatatatattctatgtatgcgtatatggaattgaaatgtcattattgtaacctagaaagtgctttgaaatattgatgtggggaggtttattgagcacaagatgtatttcagcccatgccccctcccaaaaagaaattgataagtaaaagcttcgttatacatttgactaagaaatcacccagctttaaagctgcttttaacaatgaagattgaacagagttcagcaattttgattaaattaagacttgggggtgaaactttccagtttactgaactccagaccatgcatgtagtccactccagaaatcatgctcgcttcccttggcacaccagtgttctcctgccaaatgaccctagaccctctgtcctgcagagtcagggtggcttttcccctgactgtgtccgatgccaaggagtcctggcctccgcagatgcttcattttgacccttggctgcagtggaagtcagcacagagcagtgccctggctgtgtccctggacgggtggacttagctagggagaaagtcgaggcagcagccctcgaggccctcacagatgtctaggcaggcctcatttcatcacgcagcatgtgcaggcctggaagagcaaagccaaatctcagggaagtccttggttgatgtatctgggtctcctctggagcactctgccctcctgtcacccagtagagtaaataaacttccttggctcctgaactcttgtcattgtgc

SEQ ID NO: 314341 - DNA, 2889 bp, Homo sapiens
caatgaccagctaatggctcgattctcaagagggtttcattggtctcaacctggccccccaggcaacccacccctgattggacagtctcatcaagaaggttggtcaagagctcaagtgtttctgagaatctgggtgatttataagaaacccttagctgaatgcagggtggggagaacgaaagacaaaagcatcttttttcagaagggaaactgaaagaaagaggggaagagtattaaagaccatttctggctgggcagggcactctcagcagctcaactgcccagcgtgaccagtggccacctctgcagtgtcttccacaacctggtcttgactcgtctgctgaacaaatcctctgacctcaggccggctgtgaacgtagttcctgagagatagcaaacatgcccaacagtgagcccgcatctctgctggagctgttcaacagcatcgccacacaaggggagctcgtaaggtccctcaaagcgggaaatgcgtcaaaggatgaaattgattctgcagtaaagatgttggtgtcattaaaaatgagctacaaagctgccgcgggggaggattacaaggctgactgtcctccagggaacccagcacctaccagtaatcatggcccagatgccacagaagctgaagaggattttgtggacccatggacagtacagacaagcagtgcaaaaggcatagactacgataagctcattgttcggtttggaagtagtaaaattgacaaagagctaataaaccgaatagagagagccaccggccaaagaccacaccacttcctgcgcagaggcatcttcttctcacacagagatatgaatcaggttcttgatgcctatgaaaataagaagccattttatctgtacacgggccggggcccctcttctgaagcaatgcatgtaggtcacctcattccatttattttcacaaagtggctccaggatgtatttaacgtgcccttggtcatccagatgacggatgacgagaagtatctgtggaaggacctgaccctggaccaggcctatagctatgctgtggagaatgccaaggacatcatcgcctgtggctttgacatcaacaagactttcatattctctgacctggactacatggggatgagctcaggtttctacaaaaatgtggtgaagattcaaaagcatgttaccttcaaccaagtgaaaggcattttcggcttcactgacagcgactgcattgggaagatcagttttcctgccatccaggctgctccctccttcagcaactcattcccacagatcttccgagacaggacggatatccagtgccttatcccatgtgccattgaccaggatccttactttagaatgacaagggacgtcgcccccaggatcggctatcctaaaccagccctgttgcactccaccttcttcccagccctgcagggcgcccagaccaaaatgagtgccagcgaccccaactcctccatcttcctcaccgacacggccaagcagatcaaaaccaaggtcaataagcatgcgttttctggagggagagacaccatcgaggagcacaggcagtttgggggcaactgtgatgtggacgtgtctttcatgtacctgaccttcttcctcgaggacgacgacaagctcgagcagatcaggaaggattacaccagcggagccatgctcaccggtgagctcaagaaggcactcatagaggttctgcagcccttgatcgcagagcaccaggcccggcgcaaggaggtcacggatgagatagtgaaagagttcatgactccccggaagctgtccttcgactttcagtagcactcgttttacatatgcttataaaagaagtgatgtatcagtattgataacatacacaggcttacagaggccaggcccagtaattaccatgagacagaagcctgtgtatgttatcaatactgtttcttcctgtgagttccattatttctatctcttatgggcaaagcattgtgggtaattggtgctggctaacattgcatggtcggatagagaagtccagctgtgagtctctccccaaagcagccccacagtggagcctttggctggaagtccatgggccaccctgttcttgtccatggaggactccgagggttccaagtatactcttaagacccactctgtttaaaaatatatattctatgtatgcgtatatggaattgaaatgtcattattgtaacctagaaagtgctttgaaatattgatgtggggaggtttattgagcacaagatgtatttcagcccatgccccctcccaaaaagaaattgataagtaaaagcttcgttatacatttgactaagaaatcacccagctttaaagctgcttttaacaatgaagattgaacagagttcagcaattttgattaaattaagacttgggggtgaaactttccagtttactgaactccagaccatgcatgtagtccactccagaaatcatgctcgcttcccttggcacaccagtgttctcctgccaaatgaccctagaccctctgtcctgcagagtcagggtggcttttcccctgactgtgtccgatgccaaggagtcctggcctccgcagatgcttcattttgacccttggctgcagtggaagtcagcacagagcagtgccctggctgtgtccctggacgggtggacttagctagggagaaagtcgaggcagcagccctcgaggccctcacagatgtctaggcaggcctcatttcatcacgcagcatgtgcaggcctggaagagcaaagccaaatctcagggaagtccttggttgatgtatctgggtctcctctggagcactctgccctcctgtcacccagtagagtaaataaacttccttggctcctgaactcttgtcattgtgc

SEQ ID NO: 314342 - DNA, 2688 bp, Homo sapiens
  misc_feature (584)..(584): n is a, c, g, or t
caatgaccagctaatggctcgattctcaagagggtttcattggtctcaacctggccccccaggcaacccacccctgattggacagtctcatcaagaaggttggtcaagagctcaagtgtttctgagaatctgggtgatttataagaaacccttagctgaatgcagggtggggagaacgaaagacaaaagcatcttttttcagaagggaaactgaaagaaagaggggaagagtattaaagaccatttctggctgggcagggcactctcagcagctcaactgcccagcgtgaccagtggccacctctgcagtgtcttccacaacctgggatgaaattgattctgcagtaaagatgttggtgtcattaaaaatgagctacaaagctgccgcgggggaggattacaaggctgactgtcctccagggaacccagcacctaccagtaatcatggcccagatgccacagaagctgaagaggattttgtggacccatggacagtacagacaagcagtgcaaaaggcatagactacgataagctcattgttcgttttgaagtggtccaattcttgccacaggggattttcttntcacacagagatatgaatcaggttcttgatgcctatgaaaataagaagccattttatctgtacacgggccggggcccctcttctgaagcaatgcatgtaggtcacctcattccatttattttcacaaagtggctccaggatgtatttaacgtgcccttggtcatccagatgacggatgacgagaagtatctgtggaaggacctgaccctggaccaggcctatagctatgctgtggagaatgccaaggacatcatcgcctgtggctttgacatcaacaagactttcatattctctgacctggactacatggggatgagctcaggtttctacaaaaatgtggtgaagattcaaaagcatgttaccttcaaccaagtgaaaggcattttcggcttcactgacagcgactgcattgggaagatcagttttcctgccatccaggctgctccctccttcagcaactcattcccacagatcttccgagacaggacggatatccagtgccttatcccatgtgccattgaccaggatccttactttagaatgacaagggacgtcgcccccaggatcggctatcctaaaccagccctgttgcactccaccttcttcccagccctgcagggcgcccagaccaaaatgagtgccagcgaccccaactcctccatcttcctcaccgacacggccaagcagatcaaaaccaaggtcaataagcatgcgttttctggagggagagacaccatcgaggagcacaggcagtttgggggcaactgtgatgtggacgtgtctttcatgtacctgaccttcttcctcgaggacgacgacaagctcgagcagatcaggaaggattacaccagcggagccatgctcaccggtgagctcaagaaggcactcatagaggttctgcagcccttgatcgcagagcaccaggcccggcgcaaggaggtcacggatgagatagtgaaagagttcatgactccccggaagctgtccttcgactttcagtagcactcgttttacatatgcttataaaagaagtgatgtatcagtaatgtatcaataatcccagcccagtcaaagcaccgccacctgtaggcttctgtctcatggtaattactgggcctggcctctgtaagcctgtgtatgttatcaatactgtttcttcctgtgagttccattatttctatctcttatgggcaaagcattgtgggtaattggtgctggctaacattgcatggtcggatagagaagtccagctgtgagtctctccccaaagcagccccacagtggagcctttggctggaagtccatgggccaccctgttcttgtccatggaggactccgagggttccaagtatactcttaagacccactctgtttaaaaatatatattctatgtatgcgtatatggaattgaaatgtcattattgtaacctagaaagtgctttgaaatattgatgtggggaggtttattgagcacaagatgtatttcagcccatgccccctcccaaaaagaaattgataagtaaaagcttcgttatacatttgactaagaaatcacccagctttaaagctgcttttaacaatgaagattgaacagagttcagcaattttgattaaattaagacttgggggtgaaactttccagtttactgaactccagaccatgcatgtagtccactccagaaatcatgctcgcttcccttggcacaccagtgttctcctgccaaatgaccctagaccctctgtcctgcagagtcagggtggcttttcccctgactgtgtccgatgccaaggagtcctggcctccgcagatgcttcattttgacccttggctgcagtggaagtcagcacagagcagtgccctggctgtgtccctggacgggtggacttagctagggagaaagtcgaggcagcagccctcgaggccctcacagatgtctaggcaggcctcatttcatcacgcagcatgtgcaggcctggaagagcaaagccaaatctcagggaagtccttggttgatgtatctgggtctcctctggagcactctgccctcctgtcacccagtagagtaaataaacttccttggctcctgaactcttgtcattgtgc

SEQ ID NO: 314343 - DNA, 2318 bp, Homo sapiens
caatgaccagctaatggctcgattctcaagagggtttcattggtctcaacctggccccccaggcaacccacccctgattggacagtctcatcaagaaggttggtcaagagctcaagtgtttctgagaatctgggtgatttataagaaacccttagctgaatgcagggtggggagaacgaaagacaaaagcatcttttttcagaagggaaactgaaagaaagaggggaagagtattaaagaccatttctggctgggcagggcactctcagcagctcaactgcccagcgtgaccagtggccacctctgcagtgtcttccacaacctggtcttgactcgtctgctgaacaaatcctctgacctcaggccggctgtgaacgtagttcctgagagatagcaaacatgcccaacagtgagcccgcatctctgctggagctgttcaacagcatcgccacacaaggggagctcgtaaggtccctcaaagcgggaaatgcgtcaaaggatgaaattgattctgcagtaaagatgttggtgtcattaaaaatgagctacaaagctgccgcgggggaggattacaaggctgactgtcctccagggaacccagcacctaccagtaatcatggcccagatgccacagaagctgaagaggattttgtggacccatggacagtacagacaagcagtgcaaaaggcatagactacgataagctcattgttcggtttggaagtagtaaaattgacaaagagctaataaaccgaatagagagagccaccggccaaagaccacaccacttcctgcgcagaggcatcttcttctcacacagagatatgaatcaggttcttgatgcctatgaaaataagaagccattttatctgtacacgggccggggcccctcttctgaagcaatgcatgtaggtcacctcattccatttattttcacaaagtggctccaggatgtatttaacgtgcccttggtcatccagatgacggatgacgagaagtatctgtggaaggacctgaccctggaccaggcctatagctatgctgtggagaatgccaaggacatcatcgcctgtggctttgacatcaacaagactttcatattctctgacctggactacatggggatgagctcaggtttctacaaaaatgtggtgaagattcaaaagcatgttaccttcaaccaagtgaaaggcattttcggcttcactgacagcgactgcattgggaagatcagttttcctgccatccaggctgctccctccttcagcaactcattcccacagatcttccgagacaggacggatatccagtgccttatcccatgtgccattgaccaggatccttactttagaatgacaagggacgtcgcccccaggatcggctatcctaaaccagccctgttgcactccaccttcttcccagccctgcagggcgcccagaccaaaatgagtgccagcgaccccaactcctccatcttcctcaccgacacggccaagcagatcaaaaccaaggtcaataagcatgcgttttctggagggagagacaccatcgaggagcacaggcagtttgggggcaactgtgatgtggacgtgtctttcatgtacctgaccttcttcctcgaggacgacgacaagctcgagcagatcaggaaggattacaccagcggagccatgctcaccggtgagctcaagaaggcactcatagaggttctgcagcccttgatcgcagagcaccaggcccggcgcaaggaggtcacggatgagatagtgaaagagttcatgactccccggaagctgtccttcgactttcagtagcactcgttttacatatgcttataaaagaagtgatgtatcagtaatgtatcaataatcccagcccagtcaaagcaccgccacctgtaggcttctgtctcatggtaattactgggcctggcctctgtaagcctgtgtatgttatcaatactgtttcttcctgtgagttccattatttctatctcttatgggcaaagcattgtgggtaattggtgctggctaacattgcatggtcggatagagaagtccagctgtgagtctctccccaaagcagccccacagtggagcctttggctggaagtccatgggccaccctgttcttgtccatggaggactccgagggttccaagtatactcttaagacccactctgtttaaaaatatatattctatgtatgcgtatatggaattgaaatgtcattattgtcactctacgcacctgctctcgaagatacttgaccatggggacggtatccatctgcccgtcttgtaacctctggaacagct

SEQ ID NO: 314344 - DNA, 1758 bp, Homo sapiens
tccagcatcatgtcttcttcctgcacgtcataggacttcgtggttactgtgaaaacgatggcgttgggaagatcagttttcctgccatccaggctgctccctccttcagcaactcattcccacagatcttccgagacaggacggatatccagtgccttatcccatgtgccattgaccaggatccttactttagaatgacaagggacgtcgcccccaggatcggctatcctaaaccagccctgttgcactccaccttcttcccagccctgcagggcgcccagaccaaaatgagtgccagcgaccccaactcctccatcttcctcaccgacacggccaagcagatcaaaaccaaggtcaataagcatgcgttttctggagggagagacaccatcgaggagcacaggcagtttgggggcaactgtgatgtggacgtgtctttcatgtacctgaccttcttcctcgaggacgacgacaagctcgagcagatcaggaaggattacaccagcggagccatgctcaccggtgagctcaagaaggcactcatagaggttctgcagcccttgatcgcagagcaccaggcccggcgcaaggaggtcacggatgagatagtgaaagagttcatgactccccggaagctgtccttcgactttcagtagcactcgttttacatatgcttataaaagaagtgatgtatcagtaatgtatcaataatcccagcccagtcaaagcaccgccacctgtaggcttctgtctcatggtaattactgggcctggcctctgtaagcctgtgtatgttatcaatactgtttcttcctgtgagttccattatttctatctcttatgggcaaagcattgtgggtaattggtgctggctaacattgcatggtcggatagagaagtccagctgtgagtctctccccaaagcagccccacagtggagcctttggctggaagtccatgggccaccctgttcttgtccatggaggactccgagggttccaagtatactcttaagacccactctgtttaaaaatatatattctatgtatgcgtatatggaattgaaatgtcattattgtaacctagaaagtgctttgaaatattgatgtggggaggtttattgagcacaagatgtatttcagcccatgccccctcccaaaaagaaattgataagtaaaagcttcgttatacatttgactaagaaatcacccagctttaaagctgcttttaacaatgaagattgaacagagttcagcaattttgattaaattaagacttgggggtgaaactttccagtttactgaactccagaccatgcatgtagtccactccagaaatcatgctcgcttcccttggcacaccagtgttctcctgccaaatgaccctagaccctctgtcctgcagagtcagggtggcttttcccctgactgtgtccgatgccaaggagtcctggcctccgcagatgcttcattttgacccttggctgcagtggaagtcagcacagagcagtgccctggctgtgtccctggacgggtggacttagctagggagaaagtcgaggcagcagccctcgaggccctcacagatgtctaggcaggcctcatttcatcacgcagcatgtgcaggcctggaagagcaaagccaaatctcagggaagtccttggttgatgtatctgggtctcctctggagcactctgccctcctgtcacccagtagagtaaataaacttccttggctcctgaactcttgtcattgtgc

SEQ ID NO: 314345 - DNA, 1936 bp, Homo sapiens
caatgaccagctaatggctcgattctcaagagggtttcattggtctcaacctggccccccaggcaacccacccctgattggacagtctcatcaagaaggttggtcaagagctcaagtgtttctgagaatctgggtgatttataagaaacccttagctgaatgcagggtggggagaacgaaagacaaaagcatcttttttcagaagggaaactgaaagaaagaggggaagagtattaaagaccatttctggctgggcagggcactctcagcagctcaactgcccagcgtgaccagtggccacctctgcagtgtcttccacaacctggtcttgactcgtctgctgaacaaatcctctgacctcaggccggctgtgaacgtagttcctgagagatagcaaacatgcccaacagtgagcccgcatctctgctggagctgttcaacagcatcgccacacaaggggagctcgtaaggtccctcaaagcgggaaatgcgtcaaaggatgaaattgattctgcagtaaagatgttggtgtcattaaaaatgagctacaaagctgccgcgggggaggattacaaggctgactgtcctccagggaacccagcacctaccagtaatcatggcccagatgccacagaagctgaagaggattttgtggacccatggacagtacagacaagcagtgcaaaaggcatagactacgataagctcattgttcggtttggaagtagtaaaattgacaaagagctaataaaccgaatagagagagccaccggccaaagaccacaccacttcctgcgcagaggcatcttcttctcacacagagatatgaatcaggttcttgatgcctatgaaaataagaagccattttatctgtacacgggccggggcccctcttctgaagcaatgcatgtaggtcacctcattccatttattttcacaaagtggctccaggatgtatttaacgtgcccttggtcatccagatgacggatgacgagaagtatctgtggaaggacctgaccctggaccaggcctatagctatgctgtggagaatgccaaggacatcatcgcctgtggctttgacatcaacaagactttcatattctctgacctggactacatggggatgagctcaggtttctacaaaaatgtggtgaagattcaaaagcatgttaccttcaaccaagtgaaaggcattttcggcttcactgacagcgactgcattgggaagatcagttttcctgccatccaggctgctccctccttcagcaactcattcccacagatcttccgagacaggacggatatccagtgccttatcccatgtgccattgaccaggatccttactttagaatgacaagggacgtcgcccccaggatcggctatcctaaaccagccctgttgcactccaccttcttcccagccctgcagggcgcccagaccaaaatgagtgccagcgaccccaactcctccatcttcctcaccgacacggccaagcagatcaaaaccaagaaatcatgctcgcttcccttggcacaccagtgttctcctgccaaatgaccctagaccctctgtcctgcagagtcagggtggcttttcccctgactgtgtccgatgccaaggagtcctggcctccgcagatgcttcattttgacccttggctgcagtggaagtcagcacagagcagtgccctggctgtgtccctggacgggtggacttagctagggagaaagtcgaggcagcagccctcgaggccctcacagatgtctaggcaggcctcatttcatcacgcagcatgtgcaggcctggaagagcaaagccaaatctcagggaagtccttggttgatgtatctgggtctcctctggagcactctgccctcctgtcacccagtagagtaaataaacttccttggctcctgaactcttgtcattgtgc

SEQ ID NO: 314346 - DNA, 2426 bp, Homo sapiens
caatgaccagctaatggctcgattctcaagagggtttcattggtctcaacctggccccccaggcaacccacccctgattggacagtctcatcaagaaggttggtcaagagctcaagtgtttctgagaatctgggtgatttataagaaacccttagctgaatgcagggtggggagaacgaaagacaaaagcatcttttttcagaagggaaactgaaagaaagaggggaagagtattaaagaccatttctggctgggcagggcactctcagcagctcaactgcccagcgtgaccagtggccacctctgcagtgtcttccacaacctggtcttgactcgtctgctgaacaaatcctctgacctcaggccggctgtgaacgtagttcctgagagatagcaaacatgcccaacagtgagcccgcatctctgctggagctgttcaacagcatcgccacacaaggggagctcgtaaggtccctcaaagcgggaaatgcgtcaaaggatgaaattgattctgcagtaaagatgttggtgtcattaaaaatgagctacaaagctgccgcgggggaggattacaaggctgactgtcctccagggaacccagcacctaccagtaatcatggcccagatgccacagaagctgaagaggattttgtggacccatggacagtacagacaagcagtgcaaaaggcatagactacgataagctcattgttcggtttggaagtagtaaaattgacaaagagctaataaaccgaatagagagagccaccggccaaagaccacaccacttcctgcgcagaggcatcttcttctcacacagagatatgaatcaggttcttgatgcctatgaaaataagaagccattttatctgtacacgggccggggcccctcttctgaagcaatgcatgtaggtcacctcattccatttattttcacaaagtggctccaggatgtatttaacgtgcccttggtcatccagatgacggatgacgagaagtatctgtggaaggacctgaccctggaccaggcctatagctatgctgtggagaatgccaaggacatcatcgcctgtggctttgacatcaacaagactttcatattctctgacctggactacatggggatgagctcaggtttctacaaaaatgtggtgaagattcaaaagcatgttaccttcaaccaagtgaaaggcattttcggcttcactgacagcgactgcattgggaagatcagttttcctgccatccaggctgctccctccttcagcaactcattcccacagatcttccgagacaggacggatatccagtgccttatcccatgtgccattgaccaggatccttactttagaatgacaagggacgtcgcccccaggatcggctatcctaaaccagccctgttgcactccaccttcttcccagccctgcagggcgcccagaccaaaatgagtgccagcgaccccaactcctccatcttcctcaccgacacggccaagcagatcaaaaccaaggtcaataagcatgcgttttctggagggagagacaccatcgaggagcacaggcagtttgggggcaactgtgatgtggacgtgtctttcatgtacctgaccttcttcctcgaggacgacgacaagctcgagcagatcaggaaggtgagcagggaaccccaagggcccacagccgcctcctgccacccactcctgcccatggggcctggaaggctccaacagccaggcatgaaggcttggtcggaggtgctcaactgaaacaaggtgaaaactgagtagactcgccctcatggtttttaggcctgggctcagaagcctcatgaacaaatctcgaaagagcagatacaaatcactattcatttaggagccacccaaaacagtcttgctttattagtcatcagagaaatgtaagttaacgtgatcaaagctaagacagttgagtatagaattagtaggggcttttgtgttgccattgactattttcagtgattatgaagcagatgcttcaaggcacactcaagtgagcagagtgtttatcagcacagcctcaggaagcagtttggtactgggtacaaagagcccaaaaatgttcagagcttctcctcaggttttctcattcttagattttttccaaggaaataatcctgagtaagagaaagctttccacacgaagatgttaaaaatgataatagcaaaaagttcaacacagactcagtacaacagaggaaacgttaaattagaattgttacagggtggattattatgcgggcatgaactattttaagtgttcatatgcagggcatggtggcacacatctgtagcccctgctacttgggaagctgagacaggaggatcccttgagcccaggagttcaaatccagcctgggcgacatagcaagaccctcatttctttcttt

SEQ ID NO: 314347 - DNA, 1999 bp, Homo sapiens
  misc_feature (1999)..(1999): n is a, c, g, or t
caatgaccagctaatggctcgattctcaagagggtttcattggtctcaacctggccccccaggcaacccacccctgattggacagtctcatcaagaaggttggtcaagagctcaagtgtttctgagaatctgggtgatttataagaaacccttagctgaatgcagggtggggagaacgaaagacaaaagcatcttttttcagaagggaaactgaaagaaagaggggaagagtattaaagaccatttctggctgggcagggcactctcagcagctcaactgcccagcgtgaccagtggccacctctgcagtgtcttccacaacctggtcttgactcgtctgctgaacaaatcctctgacctcaggccggctgtgaacgtagttcctgagagatagcaaacatgcccaacagtgagcccgcatctctgctggagctgttcaacagcatcgccacacaaggggagctcgtaaggtccctcaaagcgggaaatgcgtcaaaggatgaaattgattctgcagtaaagatgttggtgtcattaaaaatgagctacaaagctgccgcgggggaggattacaaggctgactgtcctccagggaacccagcacctaccagtaatcatggcccagatgccacagaagctgaagaggattttgtggacccatggacagtacagacaagcagtgcaaaaggcatagactacgataagctcattgttcggtttggaagtagtaaaattgacaaagagctaataaaccgaatagagagagccaccggccaaagaccacaccacttcctgcgcagaggcatcttcttctcacacagagatatgaatcaggttcttgatgcctatgaaaataagaagccattttatctgtacacgggccggggcccctcttctgaagcaatgcatgtaggtcacctcattccatttattttcacaaagtggctccaggatgtatttaacgtgcccttggtcatccagatgacggatgacgagaagtatctgtggaaggacctgaccctggaccaggcctatagctatgctgtggagaatgccaaggacatcatcgcctgtggctttgacatcaacaagactttcatattctctgacctggactacatggggatgagctcaggtttctacaaaaatgtggtgaagattcaaaagcatgttaccttcaaccaagtgaaaggcattttcggcttcactgacagcgactgcattgggaagatcagttttcctgccatccaggctgctccctccttcagcaactcattcccacagatcttccgagacaggacggatatccagtgccttatcccatgtgccattgaccaggatccttactttagaatgacaagggacgtcgcccccaggatcggctatcctaaaccagccctgttgcactccaccttcttcccagccctgcagggcgcccagaccaaaatgagtgccagcgaccccaactcctccatcttcctcaccgacacggccaagcagatcaaaaccaaggtcaataagcatgcgttttctggagggagagacaccatcgaggagcacaggcagtttgggggcaactgtgatgtggacgtgtctttcatgtacctgaccttcttcctcgaggacgacgacaagctcgagcagatcaggaaggattacaccagggagccaggtcacgggagctccagaagcacccataaggttctggaggcctggtcgggaagcccaggccgggcatgaggtcccgtggaatcggacaagagatgatcccggaggggcctcgaattcaggacgcccgttaatatgctgtacaaagcgtggtcgagggcaaatccggcacgaagaacagccatgtgggtttggcatggatatggcggctgagcgggtgtcgaaacgatgccgggacgactatcagcaacagatacggagacagaggggaaatggccacacaacggggagccggcagacgaaacaaaagtgagagagggcgccggcgaan

SEQ ID NO: 314348 - DNA, 893 bp, Homo sapiens
ggacggctttggggagagactcacagctggacttctctatccgaccatgcaatgttagccagccccacagtggagcctttggctggaagtccatgggccaccctgttcttgtccatggaggactccgagggttccaagtatactcttaagacccactctgtttaaaaatatatattctatgtatgcgtatatggaattgaaatgtcattattgtaacctagaaagtgctttgaaatattgatgtggggaggtttattgagcacaagatgtatttcagcccatgccccctcccaaaaagaaattgataagtaaaagcttcgttatacatttgactaagaaatcacccagctttaaagctgcttttaacaatgaagattgaacagagttcagcaattttgattaaattaagacttgggggtgaaactttccagtttactgaactccagaccatgcatgtagtccactccagaaatcatgctcgcttcccttggcacaccagtgttctcctgccaaatgaccctagaccctctgtcctgcagagtcagggtggcttttcccctgactgtgtccgatgccaaggagtcctggcctccgcagatgcttcattttgacccttggctgcagtggaagtcagcacagagcagtgccctggctgtgtccctggacgggtggacttagctagggagaaagtcgaggcagcagccctcgaggccctcacagatgtctaggcaggcctcatttcatcacgcagcatgtgcaggcctggaagagcaaagccaaatctcagggaagtccttggttgatgtatctgggtctcctctggagcactctgccctcctgtcacccagtagagtaaataaacttccttggctcctgaactcttgtcattgtgc

SEQ ID NO: 314349 - DNA, 2566 bp, Homo sapiens
caatgaccagctaatggctcgattctcaagagggtttcattggtctcaacctggccccccaggcaacccacccctgattggacagtctcatcaagaaggttggtcaagagctcaagtgtttctgagaatctgggtgatttataagaaacccttagctgaatgcagggtggggagaacgaaagacaaaagcatcttttttcagaagggaaactgaaagaaagaggggaagagtattaaagaccatttctggctgggcagggcactctcagcagctcaactgcccagcgtgaccagtggccacctctgcagtgtcttccacaacctggtcttgactcgtctgctgaacaaatcctctgacctcaggccggctgtgaacgtagttcctgagagatagcaaacatgcccaacagtgagcccgcatctctgctggagctgttcaacagcatcgccacacaaggggagctcgtaaggtccctcaaagcgggaaatgcgtcaaaggatgaaattgattctgcagtaaagatgttggtgtcattaaaaatgagctacaaagctgccgcgggggaggattacaaggctgactgtcctccagggaacccagcacctaccagtaatcatggcccagatgccacagaagctgaagaggattttgtggacccatggacagtacagacaagcagtgcaaaaggcatagactacgataagctcattgttcggtttggaagtagtaaaattgacaaagagctaataaaccgaatagagagagccaccggccaaagaccacaccacttcctgcgcagaggcatcttcttctcacacagagatatgaatcaggttcttgatgcctatgaaaataagaagccattttatctgtacacgggccggggcccctcttctgaagcaatgcatgtaggtcacctcattccatttattttcacaaagtggctccaggatgtatttaacgtgcccttggtcatccagatgacggatgacgagaagtatctgtggaaggacctgaccctggaccaggcctatagctatgctgtggagaatgccaaggacatcatcgcctgtggctttgacatcaacaagactttcatattctctgacctggactacatggggatgagctcaggtttctacaaaaatgtggtgaagattcaaaagcatgttaccttcaaccaagtgaaaggcattttcggcttcactgacagcgactgcattgggaagatcagttttcctgccatccaggctgctccctccttcagcaactcattcccacagatcttccgagacaggacggatatccagtgccttatcccatgtgccattgaccaggatccttactttagaatgacaagggacgtcgcccccaggatcggctatcctaaaccagccctgttgcactccaccttcttcccagccctgcagggcgcccagaccaaaatgagtgccagcgaccccaactcctccatcttcctcaccgacacggccaagcagatcaaaaccaagggtgagcagtggcccaggcagagggcagccagcgggatcagaaacatgccctggggggcacacgcacacacacaccactgcacagtgctttgggcctcagccacccagccaccgtagcaatgctgaactccaggattgccaactttgctccctgcagaactcaaggcagcctgtccttcccacatgaatcaggtgaatttgttttgtgtcctttcatttaggtaaaattttgaatttttttttctttttttccttttctgcttttcttatcagcactgttctgcaggcaaagtcatggcaatttccttaaagttataattagtgtggatgttattaaataatggaaaagattgtgtatatttctcatcatcagctgtgttccagcggctggacccggtgccttatttatgttttctcatgtttcattctcactgggaggtggtggtgctattccctttaaagatgagatgatgaggcttagagaagcccagccacttgaccaagtttccaccaccaggaatcagcagcactgctctcctggccctgagcagccattaccaagcaggggttatgagctggtcttctcccagagagcgttctcactgagagacatagaacggagaaacgtccatccacgggacagtcctgctggccccaggagggatgcatgcagcaggcattcagcaaacatttgacaaatcactagagaaactaaaaggagaagttagtttgagcttccttattttgcatggccccagttctgttgcctggttcctcaacagccagtgtatatataattgcctcactgttacacaaagcagttgacattttctttggaatcaagtgtgtgtttgcaggctagaagattgcagtgggaatgctgggaactgtatttgaggcatgtcacatgccctctgagtcactgcccctgaccgttctggaaagtcccaagcaggttctggttgacaatggggaagcctttcatatcaaaacttcctaagacatgccctccaccaactctccccactcagttggaagctggtataattgaaga

SEQ ID NO: 314350 - DNA, 1363 bp, Homo sapiens
caatgaccagctaatggctcgattctcaagagggtttcattggtctcaacctggccccccaggcaacccacccctgattggacagtctcatcaagaaggttggtcaagagctcaagtgtttctgagaatctgggtgatttataagaaacccttagctgaatgcagggtggggagaacgaaagacaaaagcatcttttttcagaagggaaactgaaagaaagaggggaagagtattaaagaccatttctggctgggcagggcactctcagcagctcaactgcccagcgtgaccagtggccacctctgcagtgtcttccacaacctggtcttgactcgtctgctgaacaaatcctctgacctcaggccggctgtgaacgtagttcctgagagatagcaaacatgcccaacagtgagcccgcatctctgctggagctgttcaacagcatcgccacacaaggggagctcgtaaggtccctcaaagcgggaaatgcgtcaaaggatgaaattgattctgcagtaaagatgttggtgtcattaaaaatgagctacaaagctgccgcgggggaggattacaaggctgactgtcctccagggaacccagcacctaccagtaatcatggcccagatgccacagaagctgaagaggattttgtggacccatggacagtacagacaagcagtgcaaaaggcatagactacgataagctcattgttcggtttggaagtagtaaaattgacaaagagctaataaaccgaatagagagagccaccggccaaagaccacaccacttcctgcgcagaggcatcttcttctcacacagagatatgaatcaggttcttgatgcctatgaaaataagaagccattttatctgtacacgggccggggcccctcttctgaagcaatgcatgtaggtcacctcattccatttattttcacaaagtggctccaggatgtatttaacgtgcccttggtcatccagatgacggatgacgagaagtatctgtggaaggacctgaccctggaccaggcctatagctatgctgtggagaatgccaaggacatcatcgcctgtggctttgacatcaacaagactttcatattctctgacctggactacatgggaaatttaaaatatgggctcagccacagcatgatggcatctcagatcttcatcctcagctgtgccaggaagtcctgccttgcagtttcttgccaaggatagtcagtcttccagagttatgtcttcctccttttcaacgcaccttttcctcacagagaaaagactcagtggttacacagtttcctcagtctagttcttttaatcagccatttaataaaccaaaatatttcattctgaaaat

SEQ ID NO: 314351 - DNA, 1135 bp, Homo sapiens
caatgaccagctaatggctcgattctcaagagggtttcattggtctcaacctggccccccaggcaacccacccctgattggacagtctcatcaagaaggttggtcaagagctcaagtgtttctgagaatctgggtgatttataagaaacccttagctgaatgcagggtggggagaacgaaagacaaaagcatcttttttcagaagggaaactgaaagaaagaggggaagagtattaaagaccatttctggctgggcagggcactctcagcagctcaactgcccagcgtgaccagtggccacctctgcagtgtcttccacaacctggtcttgactcgtctgctgaacaaatcctctgacctcaggccggctgtgaacgtagttcctgagagatagcaaacatgcccaacagtgagcccgcatctctgctggagctgttcaacagcatcgccacacaaggggagctcgtaaggtccctcaaagcgggaaatgcgtcaaaggatgaaattgattctgcagtaaagatgttggtgtcattaaaaatgagctacaaagctgccgcgggggaggattacaaggctgactgtcctccagggaacccagcacctaccagtaatcatggcccagatgccacagaagctgaagaggattttgtggacccatggacagtacagacaagcagtgcaaaaggcatagactacgataagctcattgttcggtttggaagtagtaaaattgacaaagagctaataaaccgaatagagagagccaccggccaaagaccacaccacttcctgcgcagaggcatcttcttctcacacagagatatgaatcaggttcttgatgcctatgaaaataagaagccattttatctgtacacgggccggggcccctcttctgaagcaatgcatgtaggtcacctcattccatttattttcacaaagtggctccaggatgtatttaacgtgcccttggtcatccagatgacggatgacgagaagtatctgtggaagagcaaagccaaatctcagggaagtccttggttgatgtatctgggtctcctctggagcactctgccctcctgtcacccagtagagtaaataaacttccttggctcctgaactcttgtcattgtgc

SEQ ID NO: 314352 - DNA, 543 bp, Homo sapiens
caatgaccagctaatggctcgattctcaagagggtttcattggtctcaacctggccccccaggcaacccacccctgattggacagtctcatcaagaaggttggtcaagagctcaagtgtttctgagaatctgggtgatttataagaaacccttagctgaatgcagggtggggagaacgaaagacaaaagcatcttttttcagaagggaaactgaaagaaagaggggaagagtattaaagaccatttctggctgggcagggcactctcagcagctcaactgcccagcgtgaccagtggccacctctgcagtgtcttccacaacctgggtatgtattgccatctttgccaggcttagagcttgttcgtgtttttagcaaagtgctgaaaaccttggtttagggggtcaggacttgtgtcttaggattagggtgttatgcattttacttcttccattgacccaaagttcaggtgattcactgctcccatagggaacagagatcctggctgagcagtcgcgggcttggatccgtagcttgcctctca

SEQ ID NO: 314353 - DNA, 487 bp, Homo sapiens
caacatgatgaaacctcatctctactaaaaatacaaaaatcagctgggtgtggtacgcacctgtagtcccagctactcgggagcctgaggcaggagaatcacttgaaccccaggaggcagaggtagcggtgagctgagatcgagccaccacactccagcctggcaacaaagcgagactccttctgagaaaaaaaaaaggaaaagaaaaagccaaggaaagaccaaatatagtgtaatcacaacaaaaatgcatagagtaaaatatataaagaaaatggatgaaatcagacacattgcaactgtacagcttgttctttctacttttctgtattttttagatttattttaatgattgttttataatgggagaaaacctgtttttgttcattcctttattaactaagcagaacaggaactcatctcacgtgtaaaaatactttttctcattttcagggaagatcagttttcctgccatccaggctgctcc

SEQ ID NO: 314354 - DNA, 467 bp, Homo sapiens
ggcgtttccacggacgcccaggagacagccggttgctgagccgggagcgctgactggcccggctgggcagggtaagcgaggggagtaaggccggggcggagtgaggaaacaagggagggagtgatggagggacgctggcgcggcgcccagtggcctggccctcccgggagtatccttagagcccggcttgctgcccgccgcgttctggcactgtgaggcgcggagcctgccaccgacccctcgcccctttcctctgagcgccgccgacccaccccgtctccctttcccactggcacccttcatcgtctccgcctgttcgcttttcccgaggagagaggcccccatttttatttagcgcctgccatgtgccagaggctttgcgtagtgttgcacttagtcccctcaacggtaatgttagcaggcttctccatgcccattccacagatgaggaaaccgaaggggaagca

SEQ ID NO: 314355 - DNA, 453 bp, Homo sapiens
caagaggctttttagctttctccttgaaggtctgctgtgatctgctgtggagtaggcagttttgctctttacacgcccagtacttttgtttagggaagataatagagtacttcactggttataactgcatttctttgtttcagagtgtactatttgttaaacaggtgaatctacttctcttaacaaagtctcaatgtcctatttgcaatttatgtggtaaacactgaagacaatggtccttaaccttttggcatctcagcctcctttcgaaaggtaagaaagccaggagactgctcaaaaccatgtacataccaatgtacttgcaagcattaatgtaatttcagatgttcctgaactccaagttgaaaaacctctgaagttcaactcaattctgaaagtcaacaaagaaataaaggaggatgtcaataggtagggggaagaagaacatttaca

SEQ ID NO: 314356 - DNA, 834 bp, Homo sapiens
ggcgtttccacggacgcccaggagacagccggttgctgagccgggagcgctgactggcccggctgggcaggtcttgactcgtctgctgaacaaatcctctgacctcaggccggctgtgaacgtagttcctgagagatagcaaacatgcccaacagtgagcccgcatctctgctggagctgttcaacagcatcgccacacaaggggagctcgtaaggtccctcaaagcgggaaatgcgtcaaaggatgaaattgattctgcagtaaagatgttggtgtcattaaaaatgagctacaaagctgccgcgggggaggattacaaggctgactgtcctccagggaacccagcacctaccagtaatcatggcccagatgccacagaagctgaagaggattttgtggacccatggacagtacagacaagcagtgcaaaaggcatagactacgataagctcattgttcggtttggaagtagtaaaattgacaaagagctaataaaccgaatagagagagccaccggccaaagaccacaccacttcctgcgcagaggcatcttcttctcacacagagatatgaatcaggttcttgatgcctatgaaaataagaagccattttatctgtacacgggccggggcccctcttctgaagcaatgcatgtaggtcacctcattccatttattttcacaaagtaagtattggatcttatggcttttcttactctcttagtgaattgagaatgttgcttataaaccatgtttagaactgacaagatcatgctagttcatttgctgagcaaccaagatgtcaagagttggcacttttttggcttccattca

SEQ ID NO: 314357 - DNA, 2917 bp, Homo sapiens
caatgaccagctaatggctcgattctcaagagggtttcattggtctcaacctggccccccaggcaacccacccctgattggacagtctcatcaagaaggttggtcaagagctcaagtgtttctgagaatctgggtgatttataagaaacccttagctgaatgcagggtggggagaacgaaagacaaaagcatcttttttcagaagggaaactgaaagaaagaggggaagagtattaaagaccatttctggctgggcagggcactctcagcagctcaactgcccagcgtgaccagtggccacctctgcagtgtcttccacaacctggtcttgactcgtctgctgaacaaatcctctgacctcaggccggctgtgaacgtagttcctgagagatagcaaacatgcccaacagtgagcccgcatctctgctggagctgttcaacagcatcgccacacaaggggagctcgtaaggtccctcaaagcgggaaatgcgtcaaaggatgaaattgattctgcagtaaagatgttggtgtcattaaaaatgagctacaaagctgccgcgggggaggattacaaggctgactgtcctccagggaacccagcacctaccagtaatcatggcccagatgccacagaagctgaagaggattttgtggacccatggacagtacagacaagcagtgcaaaaggcatagactacgataagctcattgttcggtttggaagtagtaaaattgacaaagagctaataaaccgaatagagagagccaccggccaaagaccacaccacttcctgcgcagaggcatcttcttctcacacagagatatgaatcaggttcttgatgcctatgaaaataagaagccattttatctgtacacgggccggggcccctcttctgaagcaatgcatgtaggtcacctcattccatttattttcacaaagtggctccaggatgtatttaacgtgcccttggtcatccagatgacggatgacgagaagtatctgtggaaggacctgaccctggaccaggcctatagctatgctgtggagaatgccaaggacatcatcgcctgtggctttgacatcaacaagactttcatattctctgacctggactacatggggatgagctcaggtttctacaaaaatgtggtgaagattcaaaagcatgttaccttcaaccaagtgaaaggcattttcggcttcactgacagcgactgcattgggaagatcagttttcctgccatccaggctgctccctccttcagcaactcattcccacagatcttccgagacaggacggatatccagtgccttatcccatgtgccattgaccaggatccttactttagaatgacaagggacgtcgcccccaggatcggctatcctaaaccagccctgttgcactccaccttcttcccagccctgcagggcgcccagaccaaaatgagtgccagcgaccccaactcctccatcttcctcaccgacacggccaagcagatcaaaaccaaggtcaataagcatgcgttttctggagggagagacaccatcgaggagcacaggcagtttgggggcaactgtgatgtggacgtgtctttcatgtacctgaccttcttcctcgaggacgacgacaagctcgagcagatcaggaaggattacaccagcggagccatgctcaccggtgagctcaagaaggcactcatagaggttctgcagcccttgatcgcagagcaccaggcccggcgcaaggaggtcacggatgagatagtgaaagagttcatgactccccggaagctgtccttcgactttcagtagcactcgttttacatatgcttataaaagaagtgatgtatcagtaatgtatcaataatcccagcccagtcaaagcaccgccacctgtaggcttctgtctcatggtaattactgggcctggcctctgtaagcctgtgtatgttatcaatactgtttcttcctgtgagttccattatttctatctcttatgggcaaagcattgtgggtaattggtgctggctaacattgcatggtcggatagagaagtccagctgtgagtctctccccaaagcagccccacagtggagcctttggctggaagtccatgggccaccctgttcttgtccatggaggactccgagggttccaagtatactcttaagacccactctgtttaaaaatatatattctatgtatgcgtatatggaattgaaatgtcattattgtaacctagaaagtgctttgaaatattgatgtggggaggtttattgagcacaagatgtatttcagcccatgccccctcccaaaaagaaattgataagtaaaagcttcgttatacatttgactaagaaatcacccagctttaaagctgcttttaacaatgaagattgaacagagttcagcaattttgattaaattaagacttgggggtgaaactttccagtttactgaactccagaccatgcatgtagtccactccagaaatcatgctcgcttcccttggcacaccagtgttctcctgccaaatgaccctagaccctctgtcctgcagagtcagggtggcttttcccctgactgtgtccgatgccaaggagtcctggcctccgcagatgcttcattttgacccttggctgcagtggaagtcagcacagagcagtgccctggctgtgtccctggacgggtggacttagctagggagaaagtcgaggcagcagccctcgaggccctcacagatgtctaggcaggcctcatttcatcacgcagcatgtgcaggcctggaagagcaaagccaaatctcagggaagtccttggttgatgtatctgggtctcctctggagcactctgccctcctgtcacccagtagagtaaataaacttccttggctcctgaactcttgtcattgtgc

SEQ ID NO: 314358 - DNA, 2786 bp, Homo sapiens
ggcgtttccacggacgcccaggagacagccggttgctgagccgggagcgctgactggcccggctgggcaggaagggaaactgaaagaaagaggggaagagtattaaagaccatttctggctgggcagggcactctcagcagctcaactgcccagcgtgaccagtggccacctctgcagtgtcttccacaacctggtcttgactcgtctgctgaacaaatcctctgacctcaggccggctgtgaacgtagttcctgagagatagcaaacatgcccaacagtgagcccgcatctctgctggagctgttcaacagcatcgccacacaaggggagctcgtaaggtccctcaaagcgggaaatgcgtcaaaggatgaaattgattctgcagtaaagatgttggtgtcattaaaaatgagctacaaagctgccgcgggggaggattacaaggctgactgtcctccagggaacccagcacctaccagtaatcatggcccagatgccacagaagctgaagaggattttgtggacccatggacagtacagacaagcagtgcaaaaggcatagactacgataagctcattgttcggtttggaagtagtaaaattgacaaagagctaataaaccgaatagagagagccaccggccaaagaccacaccacttcctgcgcagaggcatcttcttctcacacagagatatgaatcaggttcttgatgcctatgaaaataagaagccattttatctgtacacgggccggggcccctcttctgaagcaatgcatgtaggtcacctcattccatttattttcacaaagtggctccaggatgtatttaacgtgcccttggtcatccagatgacggatgacgagaagtatctgtggaaggacctgaccctggaccaggcctatagctatgctgtggagaatgccaaggacatcatcgcctgtggctttgacatcaacaagactttcatattctctgacctggactacatggggatgagctcaggtttctacaaaaatgtggtgaagattcaaaagcatgttaccttcaaccaagtgaaaggcattttcggcttcactgacagcgactgcattgggaagatcagttttcctgccatccaggctgctccctccttcagcaactcattcccacagatcttccgagacaggacggatatccagtgccttatcccatgtgccattgaccaggatccttactttagaatgacaagggacgtcgcccccaggatcggctatcctaaaccagccctgttgcactccaccttcttcccagccctgcagggcgcccagaccaaaatgagtgccagcgaccccaactcctccatcttcctcaccgacacggccaagcagatcaaaaccaaggtcaataagcatgcgttttctggagggagagacaccatcgaggagcacaggcagtttgggggcaactgtgatgtggacgtgtctttcatgtacctgaccttcttcctcgaggacgacgacaagctcgagcagatcaggaaggattacaccagcggagccatgctcaccggtgagctcaagaaggcactcatagaggttctgcagcccttgatcgcagagcaccaggcccggcgcaaggaggtcacggatgagatagtgaaagagttcatgactccccggaagctgtccttcgactttcagtagcactcgttttacatatgcttataaaagaagtgatgtatcagtaatgtatcaataatcccagcccagtcaaagcaccgccacctgtaggcttctgtctcatggtaattactgggcctggcctctgtaagcctgtgtatgttatcaatactgtttcttcctgtgagttccattatttctatctcttatgggcaaagcattgtgggtaattggtgctggctaacattgcatggtcggatagagaagtccagctgtgagtctctccccaaagcagccccacagtggagcctttggctggaagtccatgggccaccctgttcttgtccatggaggactccgagggttccaagtatactcttaagacccactctgtttaaaaatatatattctatgtatgcgtatatggaattgaaatgtcattattgtaacctagaaagtgctttgaaatattgatgtggggaggtttattgagcacaagatgtatttcagcccatgccccctcccaaaaagaaattgataagtaaaagcttcgttatacatttgactaagaaatcacccagctttaaagctgcttttaacaatgaagattgaacagagttcagcaattttgattaaattaagacttgggggtgaaactttccagtttactgaactccagaccatgcatgtagtccactccagaaatcatgctcgcttcccttggcacaccagtgttctcctgccaaatgaccctagaccctctgtcctgcagagtcagggtggcttttcccctgactgtgtccgatgccaaggagtcctggcctccgcagatgcttcattttgacccttggctgcagtggaagtcagcacagagcagtgccctggctgtgtccctggacgggtggacttagctagggagaaagtcgaggcagcagccctcgaggccctcacagatgtctaggcaggcctcatttcatcacgcagcatgtgcaggcctggaagagcaaagccaaatctcagggaagtccttggttgatgtatctgggtctcctctggagcactctgccctcctgtcacccagtagagtaaataaacttccttggctcctgaactcttgtcattgtgc

SEQ ID NO: 314359 - DNA, 3047 bp, Homo sapiens
caatgaccagctaatggctcgattctcaagagggtttcattggtctcaacctggccccccaggcaacccacccctgattggacagtctcatcaagaaggttggtcaagagctcaagtgtttctgagaatctgggtgatttataagaaacccttagctgaatgcagggtggggagaacgaaagacaaaagcatcttttttcagaagggaaactgaaagaaagaggggaagagtattaaagaccatttctggctgggcagggcactctcagcagctcaactgcccagcgtgaccagtggccacctctgcagtgtcttccacaacctggagtgtactatttgttaaacaggtgaatctacttctcttaacaaagtctcaatgtcctatttgcaatttatgtggtaaacactgaagacaatggtccttaaccttttggcatctcagcctcctttcgaaagtcttgactcgtctgctgaacaaatcctctgacctcaggccggctgtgaacgtagttcctgagagatagcaaacatgcccaacagtgagcccgcatctctgctggagctgttcaacagcatcgccacacaaggggagctcgtaaggtccctcaaagcgggaaatgcgtcaaaggatgaaattgattctgcagtaaagatgttggtgtcattaaaaatgagctacaaagctgccgcgggggaggattacaaggctgactgtcctccagggaacccagcacctaccagtaatcatggcccagatgccacagaagctgaagaggattttgtggacccatggacagtacagacaagcagtgcaaaaggcatagactacgataagctcattgttcggtttggaagtagtaaaattgacaaagagctaataaaccgaatagagagagccaccggccaaagaccacaccacttcctgcgcagaggcatcttcttctcacacagagatatgaatcaggttcttgatgcctatgaaaataagaagccattttatctgtacacgggccggggcccctcttctgaagcaatgcatgtaggtcacctcattccatttattttcacaaagtggctccaggatgtatttaacgtgcccttggtcatccagatgacggatgacgagaagtatctgtggaaggacctgaccctggaccaggcctatagctatgctgtggagaatgccaaggacatcatcgcctgtggctttgacatcaacaagactttcatattctctgacctggactacatggggatgagctcaggtttctacaaaaatgtggtgaagattcaaaagcatgttaccttcaaccaagtgaaaggcattttcggcttcactgacagcgactgcattgggaagatcagttttcctgccatccaggctgctccctccttcagcaactcattcccacagatcttccgagacaggacggatatccagtgccttatcccatgtgccattgaccaggatccttactttagaatgacaagggacgtcgcccccaggatcggctatcctaaaccagccctgttgcactccaccttcttcccagccctgcagggcgcccagaccaaaatgagtgccagcgaccccaactcctccatcttcctcaccgacacggccaagcagatcaaaaccaaggtcaataagcatgcgttttctggagggagagacaccatcgaggagcacaggcagtttgggggcaactgtgatgtggacgtgtctttcatgtacctgaccttcttcctcgaggacgacgacaagctcgagcagatcaggaaggattacaccagcggagccatgctcaccggtgagctcaagaaggcactcatagaggttctgcagcccttgatcgcagagcaccaggcccggcgcaaggaggtcacggatgagatagtgaaagagttcatgactccccggaagctgtccttcgactttcagtagcactcgttttacatatgcttataaaagaagtgatgtatcagtaatgtatcaataatcccagcccagtcaaagcaccgccacctgtaggcttctgtctcatggtaattactgggcctggcctctgtaagcctgtgtatgttatcaatactgtttcttcctgtgagttccattatttctatctcttatgggcaaagcattgtgggtaattggtgctggctaacattgcatggtcggatagagaagtccagctgtgagtctctccccaaagcagccccacagtggagcctttggctggaagtccatgggccaccctgttcttgtccatggaggactccgagggttccaagtatactcttaagacccactctgtttaaaaatatatattctatgtatgcgtatatggaattgaaatgtcattattgtaacctagaaagtgctttgaaatattgatgtggggaggtttattgagcacaagatgtatttcagcccatgccccctcccaaaaagaaattgataagtaaaagcttcgttatacatttgactaagaaatcacccagctttaaagctgcttttaacaatgaagattgaacagagttcagcaattttgattaaattaagacttgggggtgaaactttccagtttactgaactccagaccatgcatgtagtccactccagaaatcatgctcgcttcccttggcacaccagtgttctcctgccaaatgaccctagaccctctgtcctgcagagtcagggtggcttttcccctgactgtgtccgatgccaaggagtcctggcctccgcagatgcttcattttgacccttggctgcagtggaagtcagcacagagcagtgccctggctgtgtccctggacgggtggacttagctagggagaaagtcgaggcagcagccctcgaggccctcacagatgtctaggcaggcctcatttcatcacgcagcatgtgcaggcctggaagagcaaagccaaatctcagggaagtccttggttgatgtatctgggtctcctctggagcactctgccctcctgtcacccagtagagtaaataaacttccttggctcctgaactcttgtcattgtgc

SEQ ID NO: 314360 - DNA, 2771 bp, Homo sapiens
ggcgtttccacggacgcccaggagacagccggttgctgagccgggagcgctgactggcccggctgggcagggtgaatctacttctcttaacaaagtctcaatgtcctatttgcaatttatgtggtaaacactgaagacaatggtccttaaccttttggcatctcagcctcctttcgaaagtcttgactcgtctgctgaacaaatcctctgacctcaggccggctgtgaacgtagttcctgagagatagcaaacatgcccaacagtgagcccgcatctctgctggagctgttcaacagcatcgccacacaaggggagctcgtaaggtccctcaaagcgggaaatgcgtcaaaggatgaaattgattctgcagtaaagatgttggtgtcattaaaaatgagctacaaagctgccgcgggggaggattacaaggctgactgtcctccagggaacccagcacctaccagtaatcatggcccagatgccacagaagctgaagaggattttgtggacccatggacagtacagacaagcagtgcaaaaggcatagactacgataagctcattgttcggtttggaagtagtaaaattgacaaagagctaataaaccgaatagagagagccaccggccaaagaccacaccacttcctgcgcagaggcatcttcttctcacacagagatatgaatcaggttcttgatgcctatgaaaataagaagccattttatctgtacacgggccggggcccctcttctgaagcaatgcatgtaggtcacctcattccatttattttcacaaagtggctccaggatgtatttaacgtgcccttggtcatccagatgacggatgacgagaagtatctgtggaaggacctgaccctggaccaggcctatagctatgctgtggagaatgccaaggacatcatcgcctgtggctttgacatcaacaagactttcatattctctgacctggactacatggggatgagctcaggtttctacaaaaatgtggtgaagattcaaaagcatgttaccttcaaccaagtgaaaggcattttcggcttcactgacagcgactgcattgggaagatcagttttcctgccatccaggctgctccctccttcagcaactcattcccacagatcttccgagacaggacggatatccagtgccttatcccatgtgccattgaccaggatccttactttagaatgacaagggacgtcgcccccaggatcggctatcctaaaccagccctgttgcactccaccttcttcccagccctgcagggcgcccagaccaaaatgagtgccagcgaccccaactcctccatcttcctcaccgacacggccaagcagatcaaaaccaaggtcaataagcatgcgttttctggagggagagacaccatcgaggagcacaggcagtttgggggcaactgtgatgtggacgtgtctttcatgtacctgaccttcttcctcgaggacgacgacaagctcgagcagatcaggaaggattacaccagcggagccatgctcaccggtgagctcaagaaggcactcatagaggttctgcagcccttgatcgcagagcaccaggcccggcgcaaggaggtcacggatgagatagtgaaagagttcatgactccccggaagctgtccttcgactttcagtagcactcgttttacatatgcttataaaagaagtgatgtatcagtaatgtatcaataatcccagcccagtcaaagcaccgccacctgtaggcttctgtctcatggtaattactgggcctggcctctgtaagcctgtgtatgttatcaatactgtttcttcctgtgagttccattatttctatctcttatgggcaaagcattgtgggtaattggtgctggctaacattgcatggtcggatagagaagtccagctgtgagtctctccccaaagcagccccacagtggagcctttggctggaagtccatgggccaccctgttcttgtccatggaggactccgagggttccaagtatactcttaagacccactctgtttaaaaatatatattctatgtatgcgtatatggaattgaaatgtcattattgtaacctagaaagtgctttgaaatattgatgtggggaggtttattgagcacaagatgtatttcagcccatgccccctcccaaaaagaaattgataagtaaaagcttcgttatacatttgactaagaaatcacccagctttaaagctgcttttaacaatgaagattgaacagagttcagcaattttgattaaattaagacttgggggtgaaactttccagtttactgaactccagaccatgcatgtagtccactccagaaatcatgctcgcttcccttggcacaccagtgttctcctgccaaatgaccctagaccctctgtcctgcagagtcagggtggcttttcccctgactgtgtccgatgccaaggagtcctggcctccgcagatgcttcattttgacccttggctgcagtggaagtcagcacagagcagtgccctggctgtgtccctggacgggtggacttagctagggagaaagtcgaggcagcagccctcgaggccctcacagatgtctaggcaggcctcatttcatcacgcagcatgtgcaggcctggaagagcaaagccaaatctcagggaagtccttggttgatgtatctgggtctcctctggagcactctgccctcctgtcacccagtagagtaaataaacttccttggctcctgaactcttgtcattgtgc

SEQ ID NO: 314361 - DNA, 2490 bp, Homo sapiens
ggcgtttccacggacgcccaggagacagccggttgctgagccgggagcgctgactggcccggctgggcagggatgaaattgattctgcagtaaagatgttggtgtcattaaaaatgagctacaaagctgccgcgggggaggattacaaggctgactgtcctccagggaacccagcacctaccagtaatcatggcccagatgccacagaagctgaagaggattttgtggacccatggacagtacagacaagcagtgcaaaaggcatagactacgataagctcattgttcggtttggaagtagtaaaattgacaaagagctaataaaccgaatagagagagccaccggccaaagaccacaccacttcctgcgcagaggcatcttcttctcacacagagatatgaatcaggttcttgatgcctatgaaaataagaagccattttatctgtacacgggccggggcccctcttctgaagcaatgcatgtaggtcacctcattccatttattttcacaaagtggctccaggatgtatttaacgtgcccttggtcatccagatgacggatgacgagaagtatctgtggaaggacctgaccctggaccaggcctatagctatgctgtggagaatgccaaggacatcatcgcctgtggctttgacatcaacaagactttcatattctctgacctggactacatggggatgagctcaggtttctacaaaaatgtggtgaagattcaaaagcatgttaccttcaaccaagtgaaaggcattttcggcttcactgacagcgactgcattgggaagatcagttttcctgccatccaggctgctccctccttcagcaactcattcccacagatcttccgagacaggacggatatccagtgccttatcccatgtgccattgaccaggatccttactttagaatgacaagggacgtcgcccccaggatcggctatcctaaaccagccctgttgcactccaccttcttcccagccctgcagggcgcccagaccaaaatgagtgccagcgaccccaactcctccatcttcctcaccgacacggccaagcagatcaaaaccaaggtcaataagcatgcgttttctggagggagagacaccatcgaggagcacaggcagtttgggggcaactgtgatgtggacgtgtctttcatgtacctgaccttcttcctcgaggacgacgacaagctcgagcagatcaggaaggattacaccagcggagccatgctcaccggtgagctcaagaaggcactcatagaggttctgcagcccttgatcgcagagcaccaggcccggcgcaaggaggtcacggatgagatagtgaaagagttcatgactccccggaagctgtccttcgactttcagtagcactcgttttacatatgcttataaaagaagtgatgtatcagtaatgtatcaataatcccagcccagtcaaagcaccgccacctgtaggcttctgtctcatggtaattactgggcctggcctctgtaagcctgtgtatgttatcaatactgtttcttcctgtgagttccattatttctatctcttatgggcaaagcattgtgggtaattggtgctggctaacattgcatggtcggatagagaagtccagctgtgagtctctccccaaagcagccccacagtggagcctttggctggaagtccatgggccaccctgttcttgtccatggaggactccgagggttccaagtatactcttaagacccactctgtttaaaaatatatattctatgtatgcgtatatggaattgaaatgtcattattgtaacctagaaagtgctttgaaatattgatgtggggaggtttattgagcacaagatgtatttcagcccatgccccctcccaaaaagaaattgataagtaaaagcttcgttatacatttgactaagaaatcacccagctttaaagctgcttttaacaatgaagattgaacagagttcagcaattttgattaaattaagacttgggggtgaaactttccagtttactgaactccagaccatgcatgtagtccactccagaaatcatgctcgcttcccttggcacaccagtgttctcctgccaaatgaccctagaccctctgtcctgcagagtcagggtggcttttcccctgactgtgtccgatgccaaggagtcctggcctccgcagatgcttcattttgacccttggctgcagtggaagtcagcacagagcagtgccctggctgtgtccctggacgggtggacttagctagggagaaagtcgaggcagcagccctcgaggccctcacagatgtctaggcaggcctcatttcatcacgcagcatgtgcaggcctggaagagcaaagccaaatctcagggaagtccttggttgatgtatctgggtctcctctggagcactctgccctcctgtcacccagtagagtaaataaacttccttggctcctgaactcttgtcattgtgc

SEQ ID NO: 314362 - DNA, 2876 bp, Homo sapiens
caatgaccagctaatggctcgattctcaagagggtttcattggtctcaacctggccccccaggcaacccacccctgattggacagtctcatcaagaaggttggtcaagagctcaagtgtttctgagaatctgggtgatttataagaaacccttagctgaatgcagggtggggagaacgaaagacaaaagcatcttttttcagaagggaaactgaaagaaagaggggaagagtattaaagaccatttctggctgggcagggcactctcagcagctcaactgcccagcgtgaccagtggccacctctgcagtgtcttccacaacctggtcttgactcgtctgctgaacaaatcctctgacctcaggccggctgtgaacgtagttcctgagagatagcaaacatgcccaacagtgagcccgcatctctgctggagctgttcaacagcatcgccacacaaggggagctcgtaaggtccctcaaagcgggaaatgcgtcaaaggatgaaattgattctgcagtaaagatgttggtgtcattaaaaatgagctacaaagctgccgcgggggaggattacaaggctgactgtcctccagggaacccagcacctaccagtaatcatggcccagatgccacagaagctgaagaggattttgtggacccatggacagtacagacaagcagtgcaaaaggcatagactacgataagctcattgttcggtttggaagtagtaaaattgacaaagagctaataaaccgaatagagagagccaccggccaaagaccacaccacttcctgcgcagaggcatcttcttctcacacagagatatgaatcaggttcttgatgcctatgaaaataagaagccattttatctgtacacgggccggggcccctcttctgaagcaatgcatgtaggtcacctcattccatttattttcacaaagtggctccaggatgtatttaacgtgcccttggtcatccagatgacggatgacgagaagtatctgtggaaggacctgaccctggaccaggcctatagctatgctgtggagaatgccaaggacatcatcgcctgtggctttgacatcaacaagactttcatattctctgacctggactacatggggatgagctcaggtttctacaaaaatgtggtgaagattcaaaagcatgttaccttcaaccaagtgaaaggcattttcggcttcactgacagcgactgcattgggaagatcagttttcctgccatccaggctgctccctccttcagcaactcattcccacagatcttccgagacaggacggatatccagtgccttatcccatgtgccattgaccaggatccttactttagaatgacaagggacgtcgcccccaggatcggctatcctaaaccagccctgttgcactccaccttcttcccagccctgcagggcgcccagaccaaaatgagtgccagcgaccccaactcctccatcttcctcaccgacacggccaagcagatcaaaaccaaggtcaataagcatgcgttttctggagggagagacaccatcgaggagcacaggcagtttgggggcaactgtgatgtggacgtgtctttcatgtacctgaccttcttcctcgaggacgacgacaagctcgagcagatcaggaaggattacaccagcggagccatgctcaccggtgagctcaagaaggcactcatagaggttctgcagcccttgatcgcagagcaccaggcccggcgcaaggaggtcacggatgagatagtgaaagagttcatgactccccggaagctgtccttcgactttcagtagcactcgttttacatatgcttataaaagaagtgatgtatcagtaatgtatcaataatcccagcccagtcaaagcaccgccacctgtaggcttctgtctcatggtaattactgggcctggcctctgtaagcctgtgtatgttatcaatactgtttcttcctgtgagttccattatttctatctcttatgggcaaagcattgtgggtaattggtgctggctaacattgcatggtcggatagagaagtccagctgtgagtctctccccaaagcagccccacagtggagcctttggctggaagtccatgggccaccctgttcttgtccatggaggactccgagggttccaagtatactcttaagacccactctgtttaaaaatatatattctatgtatgcgtatatggaattgaaatgtcattattgtaacctagaaagtgctttgaaatattgatgtggggaggtttattgagcacaagatgtatttcagcccatgccccctcccaaaaagaaattgataatttaaagctgcttttaacaatgaagattgaacagagttcagcaattttgattaaattaagacttgggggtgaaactttccagtttactgaactccagaccatgcatgtagtccactccagaaatcatgctcgcttcccttggcacaccagtgttctcctgccaaatgaccctagaccctctgtcctgcagagtcagggtggcttttcccctgactgtgtccgatgccaaggagtcctggcctccgcagatgcttcattttgacccttggctgcagtggaagtcagcacagagcagtgccctggctgtgtccctggacgggtggacttagctagggagaaagtcgaggcagcagccctcgaggccctcacagatgtctaggcaggcctcatttcatcacgcagcatgtgcaggcctggaagagcaaagccaaatctcagggaagtccttggttgatgtatctgggtctcctctggagcactctgccctcctgtcacccagtagagtaaataaacttccttggctcctgaactcttgtcattgtgc

SEQ ID NO: 314363 - DNA, 2829 bp, Homo sapiens
caatgaccagctaatggctcgattctcaagagggtttcattggtctcaacctggccccccaggcaacccacccctgattggacagtctcatcaagaaggttggtcaagagctcaagtgtttctgagaatctgggtgatttataagaaacccttagctgaatgcagggtggggagaacgaaagacaaaagcatcttttttcagaagggaaactgaaagaaagaggggaagagtattaaagaccatttctggctgggcagggcactctcagcagctcaactgcccagcgtgaccagtggccacctctgcagtgtcttccacaacctggtcttgactcgtctgctgaacaaatcctctgacctcaggccggctgtgaacgtagttcctgagagatagcaaacatgcccaacagtgagcccgcatctctgctggagctgttcaacagcatcgccacacaaggggagctcgtaaggtccctcaaagcgggaaatgcgtcaaaggatgaaattgattctgcagtaaagatgttggtgtcattaaaaatgagctacaaagctgccgcgggggaggattacaaggctgactgtcctccagggaacccagcacctaccagtaatcatggcccagatgccacagaagctgaagaggattttgtggacccatggacagtacagacaagcagtgcaaaaggcatagactacgataagctcattgttcggtttggaagtagtaaaattgacaaagagctaataaaccgaatagagagagccaccggccaaagaccacaccacttcctgcgcagaggcatcttcttctcacacagagatatgaatcaggttcttgatgcctatgaaaataagaagccattttatctgtacacgggccggggcccctcttctgaagcaatgcatgtaggtcacctcattccatttattttcacaaagtggctccaggatgtatttaacgtgcccttggtcatccagatgacggatgacgagaagtatctgtggaaggacctgaccctggaccaggcctatagatgagctcaggtttctacaaaaatgtggtgaagattcaaaagcatgttaccttcaaccaagtgaaaggcattttcggcttcactgacagcgactgcattgggaagatcagttttcctgccatccaggctgctccctccttcagcaactcattcccacagatcttccgagacaggacggatatccagtgccttatcccatgtgccattgaccaggatccttactttagaatgacaagggacgtcgcccccaggatcggctatcctaaaccagccctgttgcactccaccttcttcccagccctgcagggcgcccagaccaaaatgagtgccagcgaccccaactcctccatcttcctcaccgacacggccaagcagatcaaaaccaaggtcaataagcatgcgttttctggagggagagacaccatcgaggagcacaggcagtttgggggcaactgtgatgtggacgtgtctttcatgtacctgaccttcttcctcgaggacgacgacaagctcgagcagatcaggaaggattacaccagcggagccatgctcaccggtgagctcaagaaggcactcatagaggttctgcagcccttgatcgcagagcaccaggcccggcgcaaggaggtcacggatgagatagtgaaagagttcatgactccccggaagctgtccttcgactttcagtagcactcgttttacatatgcttataaaagaagtgatgtatcagtaatgtatcaataatcccagcccagtcaaagcaccgccacctgtaggcttctgtctcatggtaattactgggcctggcctctgtaagcctgtgtatgttatcaatactgtttcttcctgtgagttccattatttctatctcttatgggcaaagcattgtgggtaattggtgctggctaacattgcatggtcggatagagaagtccagctgtgagtctctccccaaagcagccccacagtggagcctttggctggaagtccatgggccaccctgttcttgtccatggaggactccgagggttccaagtatactcttaagacccactctgtttaaaaatatatattctatgtatgcgtatatggaattgaaatgtcattattgtaacctagaaagtgctttgaaatattgatgtggggaggtttattgagcacaagatgtatttcagcccatgccccctcccaaaaagaaattgataagtaaaagcttcgttatacatttgactaagaaatcacccagctttaaagctgcttttaacaatgaagattgaacagagttcagcaattttgattaaattaagacttgggggtgaaactttccagtttactgaactccagaccatgcatgtagtccactccagaaatcatgctcgcttcccttggcacaccagtgttctcctgccaaatgaccctagaccctctgtcctgcagagtcagggtggcttttcccctgactgtgtccgatgccaaggagtcctggcctccgcagatgcttcattttgacccttggctgcagtggaagtcagcacagagcagtgccctggctgtgtccctggacgggtggacttagctagggagaaagtcgaggcagcagccctcgaggccctcacagatgtctaggcaggcctcatttcatcacgcagcatgtgcaggcctggaagagcaaagccaaatctcagggaagtccttggttgatgtatctgggtctcctctggagcactctgccctcctgtcacccagtagagtaaataaacttccttggctcctgaactcttgtcattgtgc

SEQ ID NO: 314364 - DNA, 2213 bp, Homo sapiens
caatgaccagctaatggctcgattctcaagagggtttcattggtctcaacctggccccccaggcaacccacccctgattggacagtctcatcaagaaggttggtcaagagctcaagtgtttctgagaatctgggtgatttataagaaacccttagctgaatgcagggtggggagaacgaaagacaaaagcatcttttttcagaagggaaactgaaagaaagaggggaagagtattaaagaccatttctggctgggcagggcactctcagcagctcaactgcccagcgtgaccagtggccacctctgcagtgtcttccacaacctggtcttgactcgtctgctgaacaaatcctctgacctcaggccggctgtgaacgtagttcctgagagatagcaaacatgcccaacagtgagcccgcatctctgctggagctgttcaacagcatcgccacacaaggggagctcgtaaggtccctcaaagcgggaaatgcgtcaaaggatgaaattgattctgcagtaaagatgttggtgtcattaaaaatgagctacaaagctgccgcgggggaggattacaaggctgactgtcctccagggaacccagcacctaccagtaatcatggcccagatgccacagaagctgaagaggattttgtggacccatggacagtacagacaagcagtgcaaaaggcatagactacgataagctcattgttcggtttggaagtagtaaaattgacaaagagctaataaaccgaatagagagagccaccggccaaagaccacaccacttcctgcgcagaggcatcttcttctcacacagagatatgaatcaggttcttgatgcctatgaaaataagaagccattttatctgtacacgggccggggcccctcttctgaagcaatgcatgtaggtcacctcattccatttattttcacaaagtggctccaggatgtatttaacgtgcccttggtcatccagatgacggatgacgagaagtatctgtggaaggacctgaccctggaccaggcctatagctatgctgtggagaatgccaaggacatcatcgcctgtggctttgacatcaacaagactttcatattctctgacctggactacatggggatgagctcaggtttctacaaaaatgtggtgaagattcaaaagcatgttaccttcaaccaagtgaaaggcattttcggcttcactgacagcgactgcattgggaagatcagttttcctgccatccaggctgctccctccttcagcaactcattcccacagatcttccgagacaggacggatatccagtgccttatcccatgtgccattgaccaggatccttactttagaatgacaagggacgtcgcccccaggatcggctatcctaaaccagccctgttgcactccaccttcttcccagccctgcagggcgcccagaccaaaatgagtgccagcgaccccaactcctccatcttcctcaccgacacggccaagcagatcaaaaccaaggtcaataagcatgcgttttctggagggagagacaccatcgaggagcacaggcagtttgggggcaactgtgatgtggacgtgtctttcatgtacctgaccttcttcctcgaggacgacgacaagctcgagcagatcaggaaggattacaccagcggagccatgctcaccggtgagctcaagaaggcactcatagaggttctgcagcccttgatcgcagagcaccaggcccggcgcaaggaggtcacggatgagatagtgaaagagttcatgactccccggaagctgtccttcgactttcagtagcactcgttttacatatgcttataaaagaagtgatgtatcagtaatgtatcaataatcccagcccagtcaaagcaccgccacctgtaggcttctgtctcatggtaattactgggcctggcctctgtaagcctgtgtatgttatcaatactgtttcttcctgtgagttccattatttctatctcttatgggcaaagcattgtgggtaattggtgctggctaacattgcatggtcggatagagaagtccagctgtgagtctctccccaaagcagccccacagtggagcctttggctggaagtccatgggccaccctgttcttgtccatggaggactccgagggttccaagtatactcttaagacccactctgtttaaaaatatatattctatgtatgcgta

SEQ ID NO: 314365 - DNA, 2314 bp, Homo sapiens
tccctgtctgcatggccatgggcctgctacttctctgagcctaagtttccacatctgcaagatgagaatgaagatacctacctcatagaactactgtaaagcttcaaaacaaagtgtgtagagcagctaacacagagcacacagggccacctggtcgataaatggtagtagaccttatcattatccatagtcaaattcatatcacaattcaaattgtgattttgtaggcaaggaagttttaacatacgttgtaagtaggagctgtgttttcagatgcacgatggcgttcctccacaggggagatgagacgtcagctttctccccctgtgtttctttaggtggctccaggatgtatttaacgtgcccttggtcatccagatgacggatgacgagaagtatctgtggaaggacctgaccctggaccaggcctatagctatgctgtggagaatgccaaggacatcatcgcctgtggctttgacatcaacaagactttcatattctctgacctggactacatggggatgagctcaggtttctacaaaaatgtggtgaagattcaaaagcatgttaccttcaaccaagtgaaaggcattttcggcttcactgacagcgactgcattgggaagatcagttttcctgccatccaggctgctccctccttcagcaactcattcccacagatcttccgagacaggacggatatccagtgccttatcccatgtgccattgaccaggatccttactttagaatgacaagggacgtcgcccccaggatcggctatcctaaaccagccctgttgcactccaccttcttcccagccctgcagggcgcccagaccaaaatgagtgccagcgaccccaactcctccatcttcctcaccgacacggccaagcagatcaaaaccaaggtcaataagcatgcgttttctggagggagagacaccatcgaggagcacaggcagtttgggggcaactgtgatgtggacgtgtctttcatgtacctgaccttcttcctcgaggacgacgacaagctcgagcagatcaggaaggattacaccagcggagccatgctcaccggtgagctcaagaaggcactcatagaggttctgcagcccttgatcgcagagcaccaggcccggcgcaaggaggtcacggatgagatagtgaaagagttcatgactccccggaagctgtccttcgactttcagtagcactcgttttacatatgcttataaaagaagtgatgtatcagtaatgtatcaataatcccagcccagtcaaagcaccgccacctgtaggcttctgtctcatggtaattactgggcctggcctctgtaagcctgtgtatgttatcaatactgtttcttcctgtgagttccattatttctatctcttatgggcaaagcattgtgggtaattggtgctggctaacattgcatggtcggatagagaagtccagctgtgagtctctccccaaagcagccccacagtggagcctttggctggaagtccatgggccaccctgttcttgtccatggaggactccgagggttccaagtatactcttaagacccactctgtttaaaaatatatattctatgtatgcgtatatggaattgaaatgtcattattgtaacctagaaagtgctttgaaatattgatgtggggaggtttattgagcacaagatgtatttcagcccatgccccctcccaaaaagaaattgataagtaaaagcttcgttatacatttgactaagaaatcacccagctttaaagctgcttttaacaatgaagattgaacagagttcagcaattttgattaaattaagacttgggggtgaaactttccagtttactgaactccagaccatgcatgtagtccactccagaaatcatgctcgcttcccttggcacaccagtgttctcctgccaaatgaccctagaccctctgtcctgcagagtcagggtggcttttcccctgactgtgtccgatgccaaggagtcctggcctccgcagatgcttcattttgacccttggctgcagtggaagtcagcacagagcagtgccctggctgtgtccctggacgggtggacttagctagggagaaagtcgaggcagcagccctcgaggccctcacagatgtctaggcaggcctcatttcatcacgcagcatgtgcaggcctggaagagcaaagccaaatctcagggaagtccttggttgatgtatctgggtctcctctggagcactctgccctcctgtcacccagtagagtaaataaacttccttggctcctgaactcttgtcattgtgc

SEQ ID NO: 314366 - DNA, 2087 bp, Homo sapiens
caatgaccagctaatggctcgattctcaagagggtttcattggtctcaacctggccccccaggcaacccacccctgattggacagtctcatcaagaaggttggtcaagagctcaagtgtttctgagaatctgggtgatttataagaaacccttagctgaatgcagggtggggagaacgaaagacaaaagcatcttttttcagaagggaaactgaaagaaagaggggaagagtattaaagaccatttctggctgggcagggcactctcagcagctcaactgcccagcgtgaccagtggccacctctgcagtgtcttccacaacctggtcttgactcgtctgctgaacaaatcctctgacctcaggccggctgtgaacgtagttcctgagagatagcaaacatgcccaacagtgagcccgcatctctgctggagctgttcaacagcatcgccacacaaggggagctcgtaaggtccctcaaagcgggaaatgcgtcaaaggatgaaattgattctgcagtaaagatgttggtgtcattaaaaatgagctacaaagctgccgcgggggaggattacaaggctgactgtcctccagggaacccagcacctaccagtaatcatggcccagatgccacagaagctgaagaggattttgtggacccatggacagtacagacaagcagtgcaaaaggcatagactacgataagctcattgttcggtttggaagtagtaaaattgacaaagagctaataaaccgaatagagagagccaccggccaaagaccacaccacttcctgcgcagaggcatcttcttctcacacagagatatgaatcaggttcttgatgcctatgaaaataagaagccattttatctgtacacgggccggggcccctcttctgaagcaatgcatgtaggtcacctcattccatttattttcacaaagtggctccaggatgtatttaacgtgcccttggtcatccagatgacggatgacgagaagtatctgtggaaggacctgaccctggaccaggcctatagctatgctgtggagaatgccaaggacatcatcgcctgtggctttgacatcaacaagactttcatattctctgacctggactacatggggatgagctcaggtttctacaaaaatgtggtgaagattcaaaagcatgttaccttcaaccaagtgaaaggcattttcggcttcactgacagcgactgcattgggaagatcagttttcctgccatccaggctgctccctccttcagcaactcattcccacagatcttccgagacaggacggatatccagtgccttatcccatgtgccattgaccaggatccttactttagaatgacaagggacgtcgcccccaggatcggctatcctaaaccagccctgttgcactccaccttcttcccagccctgcagggcgcccagaccaaaatgagtgccagcgaccccaactcctccatcttcctcaccgacacggccaagcagatcaaaaccaaggtcaataagcatgcgttttctggagggagagacaccatcgaggagcacaggcagtttgggggcaactgtgatgtggacgtgtctttcatgtacctgaccttcttcctcgaggacgacgacaagctcgagcagatcaggaaggattacaccagcggagccatgctcaccggtgagctcaagaaggcactcatagaggttctgcagcccttgatcgcagagcaccaggcccggcgcaaggaggtcacggatgagatagtgaaagagttcatgactccccggaagctgtccttcgactttcagtagcactcgttttacatatgcttataaaagaagtgatgtatcagtaatgtatcaataatcccagcccagtcaaagcaccgccacctgtaggcttctgtctcatggtaattactgggcctggcctctgtaagcctgtgtatgttatcaatactgtttcttcctgtgagttccattatttctatctcttatgggcaaaggaagacaggcagaagtcagaaagacagggtttggacggggcagatgcagaacgcgggtcatgtgagcagaagcaggag

SEQ ID NO: 314367 - DNA, 1959 bp, Homo sapiens
caatgaccagctaatggctcgattctcaagagggtttcattggtctcaacctggccccccaggcaacccacccctgattggacagtctcatcaagaaggttggtcaagagctcaagtgtttctgagaatctgggtgatttataagaaacccttagctgaatgcagggtggggagaacgaaagacaaaagcatcttttttcagaagggaaactgaaagaaagaggggaagagtattaaagaccatttctggctgggcagggcactctcagcagctcaactgcccagcgtgaccagtggccacctctgcagtgtcttccacaacctggtcttgactcgtctgctgaacaaatcctctgacctcaggccggctgtgaacgtagttcctgagagatagcaaacatgcccaacagtgagcccgcatctctgctggagctgttcaacagcatcgccacacaaggggagctcgtaaggtccctcaaagcgggaaatgcgtcaaaggatgaaattgattctgcagtaaagatgttggtgtcattaaaaatgagctacaaagctgccgcgggggaggattacaaggctgactgtcctccagggaacccagcacctaccagtaatcatggcccagatgccacagaagctgaagaggattttgtggacccatggacagtacagacaagcagtgcaaaaggcatagactacgataagctcattgttcggtttggaagtagtaaaattgacaaagagctaataaaccgaatagagagagccaccggccaaagaccacaccacttcctgcgcagaggcatcttcttctcacacagagatatgaatcaggttcttgatgcctatgaaaataagaagccattttatctgtacacgggccggggcccctcttctgaagcaatgcatgtaggtcacctcattccatttattttcacaaagtggctccaggatgtatttaacgtgcccttggtcatccagatgacggatgacgagaagtatctgtggaaggacctgaccctggaccaggcctatagctatgctgtggagaatgccaaggacatcatcgcctgtggctttgacatcaacaagactttcatattctctgacctggactacatggggatgagctcaggtttctacaaaaatgtggtgaagattcaaaagcatgttaccttcaaccaagtgaaaggcattttcggcttcactgacagcgactgcattgggaagatcagttttcctgccatccaggctgctccctccttcagcaactcattcccacagatcttccgagacaggacggatatccagtgccttatcccatgtgccattgaccaggatccttactttagaatgacaagggacgtcgcccccaggatcggctatcctaaaccagccctgttgcactccaccttcttcccagccctgcagggcgcccagaccaaaatgagtgccagcgaccccaactcctccatcttcctcaccgacacggccaagcagatcaaaaccaaggtcaataagcatgcgttttctggagggagagacaccatcgaggagcacaggcagtttgggggcaactgtgatgtggacgtgtctttcatgtacctgaccttcttcctcgaggacgacgacaagctcgagcagatcaggaaggattacaccagcggagccatgctcaccggtgagctcaagaaggcactcatagaggttctgcagcccttgatcgcagagcaccaggcccggcgcaaggaggtcacggatgagatagtgaaagagttcatgactccccggaagctgtccttcgactttcagtagcactcgttttacatatgcttataaaagaagtgatgtatcagtattgataacatacacaggcttacagaggccaggcccagtaattaccatgagacagaagcctacaggtgcggtgctttgactgggctgggattattgatacat

SEQ ID NO: 314368 - DNA, 1914 bp, Homo sapiens
  misc_feature (1885)..(1885): n is a, c, g, or t
caatgaccagctaatggctcgattctcaagagggtttcattggtctcaacctggccccccaggcaacccacccctgattggacagtctcatcaagaaggttggtcaagagctcaagtgtttctgagaatctgggtgatttataagaaacccttagctgaatgcagggtggggagaacgaaagacaaaagcatcttttttcagaagggaaactgaaagaaagaggggaagagtattaaagaccatttctggctgggcagggcactctcagcagctcaactgcccagcgtgaccagtggccacctctgcagtgtcttccacaacctggtcttgactcgtctgctgaacaaatcctctgacctcaggccggctgtgaacgtagttcctgagagatagcaaacatgcccaacagtgagcccgcatctctgctggagctgttcaacagcatcgccacacaaggggagctcgtaaggtccctcaaagcgggaaatgcgtcaaaggatgaaattgattctgcagtaaagatgttggtgtcattaaaaatgagctacaaagctgccgcgggggaggattacaaggctgactgtcctccagggaacccagcacctaccagtaatcatggcccagatgccacagaagctgaagaggattttgtggacccatggacagtacagacaagcagtgcaaaaggcatagactacgataagctcattgttcggtttggaagtagtaaaattgacaaagagctaataaaccgaatagagagagccaccggccaaagaccacaccacttcctgcgcagaggcatcttcttctcacacagagatatgaatcaggttcttgatgcctatgaaaataagaagccattttatctgtacacgggccggggcccctcttctgaagcaatgcatgtaggtcacctcattccatttattttcacaaagtggctccaggatgtatttaacgtgcccttggtcatccagatgacggatgacgagaagtatctgtggaaggacctgaccctggaccaggcctatagctatgctgtggagaatgccaaggacatcatcgcctgtggctttgacatcaacaagactttcatattctctgacctggactacatggggatgagctcaggtttctacaaaaatgtggtgaagattcaaaagcatgttaccttcaaccaagtgaaaggcattttcggcttcactgacagcgactgcattgggaagatcagttttcctgccatccaggctgctccctccttcagcaactcattcccacagatcttccgagacaggacggatatccagtgccttatcccatgtgccattgaccaggatccttactttagaatgacaagggacgtcgcccccaggatcggctatcctaaaccagccctgttgcactccaccttcttcccagccctgcagggcgcccagaccaaaatgagtgccagcgaccccaactcctccatcttcctcaccgacacggccaagcagatcaaaaccaaggtcaataagcatgcgttttctggagggagagacaccatcgaggagcacaggcagtttgggggcaactgtgatgtggacgtgtctttcatgtacctgaccttcttcctcgaggacgacgacaagctcgagcagatcaggaaggtgagcagggaaccccaagggcccacagccgcctcctgccacccactcctgcccatggggcctggaaggctccaacagccaggcatgaaggcttggtcggaggtgctcaactgaaacaaggtgaaaactgagtagactcgccctcatggtttttaggcctgggctcagaagcctcatgaacaaatctcgaaagagcagatacaaatcactattcatttaggccttatcccangtgccattgaccaggatccttagagtcga

SEQ ID NO: 314369 - DNA, 1543 bp, Homo sapiens
caatgaccagctaatggctcgattctcaagagggtttcattggtctcaacctggccccccaggcaacccacccctgattggacagtctcatcaagaaggttggtcaagagctcaagtgtttctgagaatctgggtgatttataagaaacccttagctgaatgcagggtggggagaacgaaagacaaaagcatcttttttcagaagggaaactgaaagaaagaggggaagagtattaaagaccatttctggctgggcagggcactctcagcagctcaactgcccagcgtgaccagtggccacctctgcagtgtcttccacaacctggtcttgactcgtctgctgaacaaatcctctgacctcaggccggctgtgaacgtagttcctgagagatagcaaacatgcccaacagtgagcccgcatctctgctggagctgttcaacagcatcgccacacaaggggagctcgtaaggtccctcaaagcgggaaatgcgtcaaaggatgaaattgattctgcagtaaagatgttggtgtcattaaaaatgagctacaaagctgccgcgggggaggattacaaggctgactgtcctccagggaacccagcacctaccagtaatcatggcccagatgccacagaagctgaagaggattttgtggacccatggacagtacagacaagcagtgcaaaaggcatagactacgataagctcattgttcggtttggaagtagtaaaattgacaaagagctaataaaccgaatagagagagccaccggccaaagaccacaccacttcctgcgcagaggcatcttcttctcacacagagatatgaatcaggttcttgatgcctatgaaaataagaagccattttatctgtacacgggccggggcccctcttctgaagcaatgcatgtaggtcacctcattccatttattttcacaaagtggctccaggatgtatttaacgtgcccttggtcatccagatgacggatgacgagaagtatctgtggaaggacctgaccctggaccaggcctatagctatgctgtggagaatgccaaggacatcatcgcctgtggctttgacatcaacaagactttcatattctctgacctggactacatggggatgagctcaggtttctacaaaaatgtggtgaagattcaaaagcatgttaccttcaaccaagtgaaaggcattttcggcttcactgacagcgactgcattgggaagatcagttttcctgccatccaggctgctccctccttcagcaactcattcccacagatcttccgagacaggacggatatccagtgccttatcccatgtgccattgaccaggatatgcaggctctgaaggaggtcttcaaggagtatttgattgaactgtttatcttgcaacactttcaagggaacattatggatttcttagctttcaagaagaaacattatgccccattacaagcatatcttaggcagaatgatttggacattgaagaacaggaggaggaggaggaagaagaggaagaaaaatctgaggttatca

SEQ ID NO: 314370 - DNA, 1308 bp, Homo sapiens
caatgaccagctaatggctcgattctcaagagggtttcattggtctcaacctggccccccaggcaacccacccctgattggacagtctcatcaagaaggttggtcaagagctcaagtgtttctgagaatctgggtgatttataagaaacccttagctgaatgcagggtggggagaacgaaagacaaaagcatcttttttcagaagggaaactgaaagaaagaggggaagagtattaaagaccatttctggctgggcagggcactctcagcagctcaactgcccagcgtgaccagtggccacctctgcagtgtcttccacaacctggtcttgactcgtctgctgaacaaatcctctgacctcaggccggctgtgaacgtagttcctgagagatagcaaacatgcccaacagtgagcccgcatctctgctggagctgttcaacagcatcgccacacaaggggagctcgtaaggtccctcaaagcgggaaatgcgtcaaaggatgaaattgattctgcagtaaagatgttggtgtcattaaaaatgagctacaaagctgccgcgggggaggattacaaggctgactgtcctccagggaacccagcacctaccagtaatcatggcccagatgccacagaagctgaagaggattttgtggacccatggacagtacagacaagcagtgcaaaaggcatagactacgataagctcattgttcggtttggaagtagtaaaattgacaaagagctaataaaccgaatagagagagccaccggccaaagaccacaccacttcctgcgcagaggcatcttcttctcacacagagatatgaatcaggttcttgatgcctatgaaaataagaagccattttatctgtacacgggccggggcccctcttctgaagcaatgcatgtaggtcacctcattccatttattttcacaaagtggctccaggatgtatttaacgtgcccttggtcatccagatgacggatgacgagaagtatctgtggaaggacctgaccctggaccaggcctatacagtggaagtcagcacagagcagtgccctggctgtgtccctggacgggtggacttagctagggagaaagtcgaggcagcagccctcgaggccctcacagatgtctaggcaggcctcatttcatcacgcagcatgtgcaggcctggaagagcaaagccaaatctcagggaagtccttggttgatgtatctgggtctcctctggagcactctgccctcctgtcacccagtagagtaaataaacttccttggctcctgaactcttgtcattgtgc

SEQ ID NO: 314371 - DNA, 2509 bp, Homo sapiens
  misc_feature (756)..(756): n is a, c, g, or t
caatgaccagctaatggctcgattctcaagagggtttcattggtctcaacctggccccccaggcaacccacccctgattggacagtctcatcaagaaggttggtcaagagctcaagtgtttctgagaatctgggtgatttataagaaacccttagctgaatgcagggtggggagaacgaaagacaaaagcatcttttttcagaagggaaactgaaagaaagaggggaagagtattaaagaccatttctggctgggcagggcactctcagcagctcaactgcccagcgtgaccagtggccacctctgcagtgtcttccacaacctggtcttgactcgtctgctgaacaaatcctctgacctcaggccggctgtgaacgtagttcctgagagatagcaaacatgcccaacagtgagcccgcatctctgctggagctgttcaacagcatcgccacacaaggggagctcgtaaggtccctcaaagcgggaaatgcgtcaaaggatgaaattgattctgcagtaaagatgttggtgtcattaaaaatgagctacaaagctgccgcgggggaggattacaaggctgactgtcctccagggaacccagcacctaccagtaatcatggcccagatgccacagaagctgaagaggattttgtggacccatggacagtacagacaagcagtgcaaaaggcatagactacgataagctcattgttcgttttgaagtggtccaattcttgccacaggggattttcttntcacacagagatatgaatcaggttcttgatgcctatgaaaataagaagccattttatctgtacacgggccggggcccctcttctgaagcaatgcatgtaggtcacctcattccatttattttcacaaagtggctccaggatgtatttaacgtgcccttggtcatccagatgacggatgacgagaagtatctgtggaaggacctgaccctggaccaggcctatagctatgctgtggagaatgccaaggacatcatcgcctgtggctttgacatcaacaagactttcatattctctgacctggactacatggggatgagctcaggtttctacaaaaatgtggtgaagattcaaaagcatgttaccttcaaccaagtgaaaggcattttcggcttcactgacagcgactgcattgggaagatcagttttcctgccatccaggctgctccctccttcagcaactcattcccacagatcttccgagacaggacggatatccagtgccttatcccatgtgccattgaccaggatccttactttagaatgacaagggacgtcgcccccaggatcggctatcctaaaccagccctgttgcactccaccttcttcccagccctgcagggcgcccagaccaaaatgagtgccagcgaccccaactcctccatcttcctcaccgacacggccaagcagatcaaaaccaagggtgagcagtggcccaggcagagggcagccagcgggatcagaaacatgccctggggggcacacgcacacacacaccactgcacagtgctttgggcctcagccacccagccaccgtagcaatgctgaactccaggattgccaactttgctccctgcagaactcaaggcagcctgtccttcccacatgaatcaggtgaatttgttttgtgtcctttcatttaggtaaaattttgaatttttttttctttttttccttttctgcttttcttatcagcactgttctgcaggcaaagtcatggcaatttccttaaagttataattagtgtggatgttattaaataatggaaaagattgtgtatatttctcatcatcagctgtgttccagcggctggacccggtgccttatttatgttttctcatgtttcattctcactgggaggtggtggtgctattccctttaaagatgagatgatgaggcttagagaagcccagccacttgaccaagtttccaccaccaggaatcagcagcactgctctcctggccctgagcagccattaccaagcaggggttatgagctggtcttctcccagagagcgttctcactgagagacatagaacggagaaacgtccatccacgggacagtcctgctggccccaggagggatgcatgcagcaggcattcagcaaacatttgacaaatcactagagaaactaaaaggagaagttagtttgagcttccttattttgcatggccccagttctgttgcctggttcctcaacagccagtgtatatataattgcctcactgttacacaaagcagttgacattttctttggaatcaagtgtgtgtttgcaggctagaagattgcagtgggaatgctgggaactgtatttgaggcatgtcacatgccctctgagtcactgcccctgaccgttctggaaagtcccaagcaggttctggttgacaatggggaagcctttcatatcaaaacttcctaagacatgccctccaccaactctccccactcagttggaagctggtataattgaaga

SEQ ID NO: 314372 - DNA, 491 bp, Homo sapiens
tttttttgagccggagtttcgctcttgttgcccaggctggagtgcaatggtgcagtctcggctcactgcaacctccacctcctgggttcaagtgattctcctgcctcagcctcccgagtacctgggattaaaagcatgcgccaccacacccggctaattttgcatttttagtagagatgtggtttctctatgttggtcaggctggtctcaaactcccgacctcaggtgatccacctgcctcggcctcccgaagtgctgggattacaggtgtgagccaccacgcccggtctagtatctatcttaatcaaaccgagagttctgaaatttcttcataaactagatctctattgctgtttttctggtttattttttgttttgagtcttgctctgtcactcaggctggagtgcagtggcgtgatctcagctcactgcagcctctgcctcagcctcccgagtggctaggattataggtgcctgccaccacatctggc

SEQ ID NO: 314373 - DNA, 700 bp, Homo sapiens
atcccctagtcaaggggatgccttaatgtgttacaggagagtttttttcatattgaggtatcttgaacataggacatgaaatctttcctctccttttttctcctctttgtccaaaattaaatcaaatgagctcactgcagagatgccgctggaagcagcaaggtacagagcaggcagggcggccctctcacctgcccttcttaactgtgccatgggagcgggagattctgcaggctgtggggtgcaagaagtgtcacggagcctctctcccaggacatcttgtcatccctgccaacgtggcaggagagggtctttaaggtcttagaaagagactgtgttcacgcttgagacgtttttatcatgttactaaatggggcttcttggctgggtgcaatggctcacgcctataaccctaacactttgggaggccgaggcgggtagatagtttgaagtcaggagttcaaggccatcctgggcaatatagcaagaactcgtctctgcaaaaaaaaaaaaaaatttaaattagctaggcgtgatggcatgcgctattcagaaggctgaggtgggtggatcccttgagcccaggaattctaggctgcgttgagccatgatcgcaccactacactccagcctgggtgacagagcaggccctgtctctagaataaataaataagtaaactaaagaggcttcttgattgtg

SEQ ID NO: 314374 - DNA, 322 bp, Homo sapiens
gtgatccacctgcctcggcttcccaaagtgctggaattacaggtgtgagccaccgcgcccggcccctagggtcattttgagagacacatgaggacatgtgttcaacccagtcctcaacacagggcaaagacttcttaaatatgagcgtttagggttatatttcattattatttagggtcatacttcattattattttcctattattaatgttattttggctcttttacgtccttgctgtatgacatccatcaaggggcttcccctctctgaacctcaagcgaggggaaggtttgtgggggcatctgaccagccacaagtccc

SEQ ID NO: 314375 - DNA, 5257 bp, Homo sapiens
  misc_feature (30)..(31): n is a, c, g, or t
  misc_feature (5246)..(5246): n is a, c, g, or t
cgctgggagcggggcgggcgctcgcgtccnnggcttccctccccgactgtgcgccgcggctggctcgggttcccgggccgacatgggcgccgccgcgtgggcacggccgctgagcgtgtctttcctgctgctgcttctgccgctcccggggatgcctgcgggctcctgggacccggccggttacctgctctactgcccctgcatggggcgctttgggaaccaggccgatcacttcttgggctctctggcatttgcaaagctgctaaaccgtaccttggctgtccctccttggattgagtaccagcatcacaagcctcctttcaccaacctccatgtgtcctaccagaagtacttcaagctggagcccctccaggcttaccatcgggtcatcagcttggaggatttcatggagaagctggcacccacccactggccccctgagaagcgggtggcatactgctttgaggtggcagcccagcgaagcccagataagaagacgtgccccatgaaggaaggaaacccctttggcccattctgggatcagtttcatgtgagtttcaacaagtcggagctttttacaggcatttccttcagtgcttcctacagagaacaatggagccagagattttctccaaaggaacatccggtgcttgccctgccaggagccccagcccagttccccgtcctagaggaacacaggccactacagaagtacatggtatggtcagacgaaatggtgaagacgggagaggcccagattcatgcccaccttgtccggccctatgtgggcattcatctgcgcattggctctgactggaagaacgcctgtgccatgctgaaggacgggactgcaggctcgcacttcatggcctctccgcagtgtgtgggctacagccgcagcacagcggcccccctcacgatgactatgtgcctgcctgacctgaaggagatccagagggctgtgaagctctgggtgaggtcgctggatgcccagtcggtctacgttgctactgattccgagagttatgtgcctgagctccaacagctcttcaaagggaaggtgaaggtggtgagcctgaagcctgaggtggcccaggtcgacctgtacatcctcggccaagccgaccactttattggcaactgtgtctcctccttcactgcctttgtgaagcgggagcgggacctccaggggaggccgtcttctttcttcggcatggacaggccccctaagctgcgggacgagttctgattctggccggagcaccagaccctctgatcctggagggaccagagtctgagctggtccttccagccaggcctggcagccagaggtgctccgggattgcaaactcctcttctcacctgccaaagatggagaagagtgccagggacccctcaaggagggagacgctccatatcccagggcataggacttgcaggttcctaggagcaggagcatctcccatcgcacgtgctttctgctcttctgggaatttctcacactggcaaagcagtccagcctccgtcttctggtccactctgctctgagcagcctgggatgctgaactcttcagagagatttttttatagagagatttctataattttgatacaaggtcatgactatcctagaactctctgtggtttttgaaaatcattgaattctattaatgtaggtacctaaagtgaccttaactgaatgtggatgaggctggggctggtgtgggtcttttggctgcttttcaaggtgtcccccaatgtggccctcaagagccatccccactgcctggccagagccattgttgtcccctacttcctaggccatttctggggcttgggggatgaatgctgtcctgtgctgtaaacactatgcaaatggaagttatcggttgtggtgctgtgcagcgctctgtgggcgactaagtgccactcacgcagcatgttcctggcaaggagcacataccatcaagccacactatcatggtattgttctcacagtcttttggtggttgatggccactgcaaacctggcaccatcagatctcttctgatctcttgccccagtggggcctggttggtagaatgttggcattcggttgatatccaaagcctgttctcccagccgtcctcctgcagctggagccttcaggccgtattctcacgagggaacgtttgccaaggctctgacctcacagaagatgcccagggcccagaagccatcagaattatcagtggagaagcaccttttgactcttcccttccaatgtaatctctgccaacaccatgaggcttaaggtgctctaagtcatgagtgttttggtctcaaatgctgcagttttaataatctgtgactcctgagagcccatggttttttgaccttgtggttctaaaattccttgtctgacccctgtagatcttttccttgccatgtcacctcccttggcctttgatcctggaaaggtggcagagcctccactgagccaggcccagagctccttgcagtgccttcttccttgtttacctgtgggaggaaacactttttttgtcaggggcagcctggttcagagctcagaggtcacactgtatcaaagatctcaaacagcaaagtcagcatttgctgtatagagctgccacccaactctaagcaggagaaactgtacagaaagggctttgctatttttcccttttgggaaaacaatgaagtgttttaagtcctgggtggactgagagatggtttgcctgtccagacttgctctcaagcctcatccagagaaggagctgcagatgagggagcccgtacactccctgccaccactaggttgtaagcctgtagctggctggctgatttcattttggaattcatttgccatccacagccttacactaggcacacactttagagtctggggctccagtggggcccgcctaattttttttccccccaagacagggccttgctctgtctcccaggctggagtgcagtggcatgatcatggcttactgcagccttgatctcccaggctcaagcgatccttctgcctcagcctctctggtagctgagactgcatgcccagctccaaatcaccttgattcatatcagcagtaataatcacttgtgttctgaaagaaagggcaccagaagttctagcaaaattcagttgtgttctgtgagctagcactttttcctctgacccaattttcttacctataaaatggtgataaaaaccgacaggttgttcaaaggcccagatcagctaaagcatgtatataagagcacgttgtaaacttgaaagagacaaaggcacaaatgtggctgttgattaatttgactgcttctcgttgctcgtcacctccatgccaggcactgtgcttgctaattgctttatgggggcattctcttatttattccccagccctgggaaataggagctgtcattatccttctctttctgcacaaggaaaaattaatgccctgagaattgtcataattttcccaaggctgcccagctggtggtgttaagccagaatttgacctcccagagccagtttccattagctgccatgctctgctgcctctaattcacagaatgcactttctaccctgtgtgccatggagacctcctatggaaaaatgatcagccaccttaccttctactgggtacctgctgtgagtctgcctatgccagaaggattaaggaggggaggttacccaagaaacaaagcctacatgccgcttacagcccccgttggatggttgctcagtacaacagtcttgcattcagcaggtgtttgttcatcacctactatgtgtcaggctctatgctaggtactggggatacaggagagaatcaagcgtaaagtctttgttctcaaggaatttgcattctagaaagtagaagatgtaataaatgtactgtgggacatgttaataagtgctataaagaaatataaagggtttgggagcaaaaagagggagtggatctattttagatgagcccaggtaagacctctctgaagagctgtcatgaaggagggagggagcacattcctggcagagaaaacagcacgtgcaaaggccccgagactggagtgtgttcctgaagagcagccaggaggccagcatggctggagaggcaggcataggcagggaaccgagcagcaggtcagagcaggcgagctgacattctgcagcctggacggccatggcaggaagcttttagttggagagatacaggaagcctcctagggttctgagcagaagaggggcatgagctgattcacattctgaaggacctctctagctggccagtgctgaggaggttggagagagaaagggtgaaagcagagagaccagtgcagggctgttaacagggttgcaggcgagagactggggtgctgggctcccctagactaggactccagtgccctcctctcccaagagacaaaggccattgcattgaaggaggtgggaaatgattagattctgaacatatgtaattatttttcagtctttttcaaagatacaaatatttacatagttttaatcatgtaatatatacaatttaatgtcctagtgttttacttaatagtgtatcatgttttccctgttggtatgtagcctggataaatgctcttaattataaaaaattctgtcgaggagtgttccatagtttattgttttcctattatgagaatttaggccaagtgtggtggctcatgcctgtaatcccagcactttgcgaggccgaggtgggcagatcacttgaggtgaggagttcaagaccagcctggccaacatggtgaattatctctactaaaaatacaaaaaaataataataatagccaggcgtggtggcacatgcctgtattcccagctgcttgggaggctgaggcaggagaatggcttgaacctgggaggtggaggttgcagtgagccgagatggtgccactgcattccagcctgggcaacagagcgagactccatctcaaaaaaaaggagacttcatgtgcccccaatttttcactattgttatttgaaaaaatatttttatttgtaagagtttttctttatttaaaatgttcattaataaagttgttggacgggaagcaaaaaaaaaaagttgtttaagataaattcccagaagtgaatttgttagatcaaacacttaaaactttttgttatggaagaattcaaatataaataaaaaattgtgagtaataaaatgaactcacagtttcaacaatgncccacatttta

SEQ ID NO: 314376 - DNA, 1539 bp, Homo sapiens
  misc_feature (30)..(31): n is a, c, g, or t
cgctgggagcggggcgggcgctcgcgtccnnggcttccctccccgactgtgcgccgcggctggctcgggttcccgggccgacatgggcgccgccgcgtgggcacggccgctgagcgtgtctttcctgctgctgcttctgccgctcccggggatgcctgcgggctcctgggacccggccggttacctgctctactgcccctgcatggggcgctttgggaaccaggccgatcacttcttgggctctctggcatttgcaaagctgctaaaccgtaccttggctgtccctccttggattgagtaccagcatcacaagcctcctttcaccaacctccatgtgtcctaccagaagtacttcaagctggagcccctccaggcttaccatcgggtcatcagcttggaggatttcatggagaagctggcacccacccactggccccctgagaagcgggtggcatactgctttgaggtggcagcccagcgaagcccagataagaagacgtgccccatgaaggaaggaaacccctttggcccattctgggatcagtttcatgtgagtttcaacaagtcggagctttttacaggcatttccttcagtgcttcctacagagaacaatggagccagaggcgtgagaatcactcctgtgttaccttactcttcccaaggtgaaactggaagcagcttctagagaacagcttcaggtgcagaccgagaaatgacgtcatcctgataattattggacgtgtttattaattgcaccccattagcccctgtttttaaaaaatataggttagcaggacgtgggcacaggccgtgaaacatttatagggcgcctgtcacgtgtgagacatagtaatcagaggccaatggtgatgtgtgaaaatgaggatgaccagctctggttttctaggagctatggtctcataatgacaataatcagcatagtgtacttgtccttaatgttatagcatggcaggaaagaccatgggcttagaaggcagacattggttaggaggtgcagggaacatactaattcatgtgcggtcaaagcacttggcatttaatagggcaaaggtaaacagatgtagagaaatgagtctcatgcctgtaatcccagcactttgggaggccaaggtgggtggatcacttgagcctaagagatcaaggctgcagtgagccatgatggtacccctgcactccagcccaggttacagagcaagggcctgtctcagcaaaacaaaacaagcacaggccaaggagtgagatagccagcgctgatggtatctgcctcgtagtgcatgaagtgcatgtcatacactaagcagccagccagtgttggctgtcagtgttattactcacatgctttattttatttaagactttgagatagttcatgaagtgggtattattatcaatttccattttataggtgaggaaactgagcccagtgaagttaaataacttcccaaggtcattgagctgttgagtggacagctcaggtctgtttgtaaatctttaataaataacaacagctaagattc

SEQ ID NO: 314377 - DNA, 4659 bp, Homo sapiens
  misc_feature (30)..(31): n is a, c, g, or t
cgctgggagcggggcgggcgctcgcgtccnnggcttccctccccgactgtgcgccgcggctggctcgggttcccgggccgacatgggcgccgccgcgtgggcacggccgctgagcgtgtctttcctgctgctgcttctgccgctcccggggatgcctgcgggctcctgggacccggccggttacctgctctactgcccctgcatggggcgctttgggaaccaggccgatcacttcttgggctctctggcatttgcaaagctgctaaaccgtaccttggctgtccctccttggattgagtaccagcatcacaagcctcctttcaccaacctccatgtgtcctaccagaagtacttcaagctggagcccctccaggcttaccatcgggtcatcagcttggaggatttcatggagaagctggcacccacccactggccccctgagaagcgggtggcatactgctttgaggtggcagcccagcgaagcccagataagaagacgtgccccatgaaggaaggaaacccctttggcccattctgggatcagtttcatgtgagtttcaacaagtcggagctttttacaggcatttccttcagtgcttcctacagagaacaatggagccagagattttctccaaaggaacatccggtgcttgccctgccaggagccccagcccagttccccgtcctagaggaacacaggccactacagaagtacatggtatggtcagacgaaatggtgaagacgggagaggcccagattcatgcccaccttgtccggccctatgtgggcattcatctgcgcattggctctgactggaagaacgcctgtgccatgctgaaggacgggactgcaggctcgcacttcatggcctctccgcagtgtgtgggctacagccgcagcacagcggcccccctcacgatgactatgtgcctgcctgacctgaaggagatccagagggctgtgaagctctgggtgaggtcgctggatgcccagtcggtctacgttgctactgattccgagagttatgtgcctgagctccaacagctcttcaaagggaaggtgaaggtggtgagcctgaagcctgaggtggcccaggtcgacctgtacatcctcggccaagccgaccactttattggcaactgtgtctcctccttcactgcctttgtgaagcgggagcgggacctccaggggaggccgtcttctttcttcggcatggacaggccccctaagctgcgggacgagttctgattctggccggagcaccagaccctctgatcctggagggaccagagtctgagctggtccttccagccaggcctggcagccagaggtgctccgggattgcaaactcctcttctcacctgccaaagatggagaagagtgccagggacccctcaaggagggagacgctccatatcccagggcataggacttgcaggttcctaggagcaggagcatctcccatcgcacgtgctttctgctcttctgggaatttctcacactggcaaagcagtccagcctccgtcttctggtccactctgctctgagcagcctgggatgctgaactcttcagagagatttttttatagagagatttctataattttgatacaaggtcatgactatcctagaactctctgtggtttttgaaaatcattgaattctattaatgtaggtacctaaagtgaccttaactgaatgtggatgaggctggggctggtgtgggtcttttggctgcttttcaaggtgtcccccaatgtggccctcaagagccatccccactgcctggccagagccattgttgtcccctacttcctaggccatttctggggcttgggggatgaatgctgtcctgtgctgtaaacactatgcaaatggaagttatcggttgtggtgctgtgcagcgctctgtgggcgactaagtgccactcacgcagcatgttcctggcaaggagcacataccatcaagccacactatcatggtattgttctcacagtcttttggtggttgatggccactgcaaacctggcaccatcagatctcttctgatctcttgccccagtggggcctggttggtagaatgttggcattcggttgatatccaaagcctgttctcccagccgtcctcctgcagctggagccttcaggccgtattctcacgagggaacgtttgccaaggctctgacctcacagaagatgcccagggcccagaagccatcagaattatcagtggagaagcaccttttgactcttcccttccaatgtaatctctgccaacaccatgaggcttaaggtgctctaagtcatgagtgttttggtctcaaatgctgcagttttaataatctgtgactcctgagagcccatggttttttgaccttgtggttctaaaattccttgtctgacccctgtagatcttttccttgccatgtcacctcccttggcctttgatcctggaaaggtggcagagcctccactgagccaggcccagagctccttgcagtgccttcttccttgtttacctgtgggaggaaacactttttttgtcaggggcagcctggttcagagctcagaggtcacactgtatcaaagatctcaaacagcaaagtcagcatttgctgtatagagctgccacccaactctaagcaggagaaactgtacagaaagggctttgctatttttcccttttgggaaaacaatgaagtgttttaagtcctgggtggactgagagatggtttgcctgtccagacttgctctcaagcctcatccagagaaggagctgcagatgagggagcccgtacactccctgccaccactaggttgtaagcctgtagctggctggctgatttcattttggaattcatttgccatccacagccttacactaggcacacactttagagtctggggctccagtggggcccgcctaattttttttccccccaagacagggccttgctctgtctcccaggctggagtgcagtggcatgatcatggcttactgcagccttgatctcccaggctcaagcgatccttctgcctcagcctctctggtagctgagactgcatgcccagctccaaatcaccttgattcatatcagcagtaataatcacttgtgttctgaaagaaagggcaccagaagttctagcaaaattcagttgtgttctgtgagctagcactttttcctctgacccaattttcttacctataaaatggtgataaaaaccgacaggttgttcaaaggcccagatcagctaaagcatgtatataagagcacgttgtaaacttgaaagagacaaaggcacaaatgtggctgttgattaatttgactgcttctcgttgctcgtcacctccatgccaggcactgtgcttgctaattgctttatgggggcattctcttatttattccccagccctgggaaataggagctgtcattatccttctctttctgcacaaggaaaaattaatgccctgagaattgtcataattttcccaaggctgcccagctggtggtgttaagccagaatttgacctcccagagccagtttccattagctgccatgctctgctgcctctaattcacagaatgcactttctaccctgtgtgccatggagacctcctatggaaaaatgatcagccaccttaccttctactgggtacctgctgtgagtctgcctatgccagaaggattaaggaggggaggttacccaagaaacaaagcctacatgccgcttacagcccccgttggatggttgctcagtacaacagtcttgcattcagcaggtgtttgttcatcacctactatgtgtcaggctctatgctaggtactggggatacaggagagaatcaagcgtaaagtctttgttctcaaggaatttgcattctagaaagtagaagatgtaataaatgtactgtgggacatgttaataagtgctataaagaaatataaagggtttgggagcaaaaagagggagtggatctattttagatgagcccaggtaagacctctctgaagagctgtcatgaaggagggagggagcacattcctggcagagaaaacagcacgtgcaaaggccccgagactggagtgtgttcctgaagagcagccaggaggccagcatggctggagaggcaggcataggcagggaaccgagcagcaggtcagagcaggcgagctgacattctgcagcctggacggccatggcaggaagcttttagttggagagatacaggaagcctcctagggttctgagcagaagaggggcatgagctgattcacattctgaaggacctctctagctggccagtgctgaggaggttggagagagaaagggtgaaagcagagagaccagtgcagggctgttaacagggttgcaggcgagagactggggtgctgggctcccctagactaggactccagtgccctcctctcccaagagacaaaggccattgcattgaaggaggtgggaaatgattagattctgaacatatgtaattatttttcagtctttttcaaagatacaaatatttacatagttttaatcatgtaatatatacaatttaatgtcctagtgttttacttaatagtgtatcatgttttccctgttggtatgtagcctggataaatgctcttaattataaaaaattctgtcgagga

SEQ ID NO: 314378 - DNA, 4660 bp, Homo sapiens
  misc_feature (30)..(31): n is a, c, g, or t
cgctgggagcggggcgggcgctcgcgtccnnggcttccctccccgactgtgcgccgcggctggctcgggttcccgggccgacatgggcgccgccgcgtgggcacggccgctgagcgtgtctttcctgctgctgcttctgccgctcccggggatgcctgcgggctcctgggacccggccggttacctgctctactgcccctgcatggggcgctttgggaaccaggccgatcacttcttgggctctctggcatttgcaaagctgctaaaccgtaccttggctgtccctccttggattgagtaccagcatcacaagcctcctttcaccaacctccatgtgtcctaccagaagtacttcaagctggagcccctccaggcttaccatcgggtcatcagcttggaggatttcatggagaagctggcacccacccactggccccctgagaagcgggtggcatactgctttgaggtggcagcccagcgaagcccagataagaagacgtgccccatgaaggaaggaaacccctttggcccattctgggatcagtttcatgtgagtttcaacaagtcggagctttttacaggcatttccttcagtgcttcctacagagaacaatggagccagagattttctccaaaggaacatccggtgcttgccctgccaggagccccagcccagttccccgtcctagaggaacacaggccactacagaagtacatggtatggtcagacgaaatggtgaagacgggagaggcccagattcatgcccaccttgtccggccctatgtgggcattcatctgcgcattggctctgactggaagaacgcctgtgccatgctgaaggacgggactgcaggctcgcacttcatggcctctccgcagtgtgtgggctacagccgcagcacagcggcccccctcacgatgactatgtgcctgcctgacctgaaggagatccagagggctgtgaagctctgggtgaggtcgctggatgcccagtcggtctacgttgctactgattccgagagttatgtgcctgagctccaacagctcttcaaagggaaggtgaaggtggtgagcctgaagcctgaggtggcccaggtcgacctgtacatcctcggccaagccgaccactttattggcaactgtgtctcctccttcactgcctttgtgaagcgggagcgggacctccaggggaggccgtcttctttcttcggcatggacaggccccctaagctgcgggacgagttctgattctggccggagcaccagaccctctgatcctggagggaccagagtctgagctggtccttccagccaggcctggcagccagaggtgctccgggattgcaaactcctcttctcacctgccaaagatggagaagagtgccagggacccctcaaggagggagacgctccatatcccagggcataggacttgcaggttcctaggagcaggagcatctcccatcgcacgtgctttctgctcttctgggaatttctcacactggcaaagcagtccagcctccgtcttctggtccactctgctctgagcagcctgggatgctgaactcttcagagagatttttttatagagagatttctataattttgatacaaggtcatgactatcctagaactctctgtggtttttgaaaatcattgaattctattaatgtaggtacctaaagtgaccttaactgaatgtggatgaggctggggctggtgtgggtcttttggctgcttttcaaggtgtcccccaatgtggccctcaagagccatccccactgcctggccagagccattgttgtcccctacttcctaggccatttctggggcttgggggatgaatgctgtcctgtgctgtaaacactatgcaaatggaagttatcggttgtggtgctgtgcagcgctctgtgggcgactaagtgccactcacgcagcatgttcctggcaaggagcacataccatcaagccacactatcatggtattgttctcacagtcttttggtggttgatggccactgcaaacctggcaccatcagatctcttctgatctcttgccccagtggggcctggttggtagaatgttggcattcggttgatatccaaagcctgttctcccagccgtcctcctgcagctggagccttcaggccgtattctcacgagggaacgtttgccaaggctctgacctcacagaagatgcccagggcccagaagccatcagaattatcagtggagaagcaccttttgactcttcccttccaatgtaatctctgccaacaccatgaggcttaaggtgctctaagtcatgagtgttttggtctcaaatgctgcagttttaataatctgtgactcctgagagcccatggttttttgaccttgtggttctaaaattccttgtctgacccctgtagatcttttccttgccatgtcacctcccttggcctttgatcctggaaaggtggcagagcctccactgagccaggcccagagctccttgcagtgccttcttccttgtttacctgtgggaggaaacactttttttgtcaggggcagcctggttcagagctcagaggtcacactgtatcaaagatctcaaacagcaaagtcagcatttgctgtatagagctgccacccaactctaagcaggagaaactgtacagaaagggctttgctatttttcccttttgggaaaacaatgaagtgttttaagtcctgggtggactgagagatggtttgcctgtccagacttgctctcaagcctcatccagagaaggagctgcagatgagggagcccgtacactccctgccaccactaggttgtaagcctgtagctggctggctgatttcattttggaattcatttgccatccacagccttacactaggcacacactttagagtctggggctccagtggggcccgcctaattttttttccccccaagacagggccttgctctgtctcccaggctggagtgcagtggcatgatcatggcttactgcagccttgatctcccaggctcaagcgatccttctgcctcagcctctctggtagctgagactgcatgcccagctccaaatcaccttgattcatatcagcagtaataatcacttgtgttctgaaagaaagggcaccagaagttctagcaaaattcagttgtgttctgtgagctagcactttttcctctgacccaattttcttacctataaaatggtgataaaaaccgacaggttgttcaaaggcccagatcagctaaagcatgtatataagagcacgttgtaaacttgaaagagacaaaggcacaaatgtggctgttgattaatttgactgcttctcgttgctcgtcacctccatgccaggcactgtgcttgctaattgctttatgggggcattctcttatttattccccagccctgggaaataggagctgtcattatccttctctttctgcacaaggaaaaattaatgccctgagaattgtcataattttcccaaggctgcccagctggtggtgttaagccagaatttgacctcccagagccagtttccattagctgccatgctctgctgcctctaattcacagaatgcactttctaccctgtgtgccatggagacctcctatggaaaaatgatcagccaccttaccttctactgggtacctgctgtgagtctgcctatgccagaaggattaaggaggggaggttacccaagaaacaaagcctacatgccgcttacagcccccgttggatggttgctcagtacaacagtcttgcattcagcaggtgtttgttcatcacctactatgtgtcaggctctatgctaggtactggggatacaggagagaatcaagcgtaaagtctttgttctcaaggaatttgcattctagaaagtagaagatgtaataaatgtactgtgggacatgttaataagtgctataaagaaatataaagggtttgggagcaaaaagagggagtggatctattttagatgagcccaggtaagacctctctgaagagctgtcatgaaggagggagggagcacattcctggcagagaaaacagcacgtgcaaaggccccgagactggagtgtgttcctgaagagcagccaggaggccagcatggctggagaggcaggcataggcagggaaccgagcagcaggtcagagcaggcgagctgacattctgcagcctggacggccatggcaggaagcttttagttggagagatacaggaagcctcctagggttctgagcagaagaggggcatgagctgattcacattctgaaggacctctctagctggccagtgctgaggaggttggagagagaaagggtgaaagcagagagaccagtgcagggctgttaacagggttgcaggcgagagactggggtgctgggctcccctagactaggactccagtgccctcctctcccaagagacaaaggccattgcattgaaggaggtgggaaatgattagattctgaacatatgtaattatttttcagtctttttcaaagatacaaatatttacatagttttaatcatgtaatatatacaatttaatgtcctagtgttttacttaatagtgtatcatgtcagcctgggtattacgatgtttttttctgtttttttcttttttctgttttttcgctttttt

SEQ ID NO: 314379 - DNA, 5157 bp, Homo sapiens
  misc_feature (30)..(31): n is a, c, g, or t
  misc_feature (5146)..(5146): n is a, c, g, or t
cgctgggagcggggcgggcgctcgcgtccnnggcttccctccccgactgtgcgccgcggctggctcgggttcccgggccgacatgggcgccgccgcgtgggcacggccgctgagcgtgtctttcctgctgctgcttctgccgctcccggggatgcctgcgggctcctgggacccggccggttacctgctctactgcccctgcatggggcgctttgggaaccaggccgatcacttcttgggctctctggcatttgcaaagctgctaaaccgtaccttggctgtccctccttggattgagtaccagcatcacaagcctcctttcaccaacctccatgtgtcctaccagaagtacttcaagctggagcccctccaggcttaccatcgggtcatcagcttggaggatttcatggagaagctggcacccacccactggccccctgagaagcgggtggcatactgctttgaggtggcagcccagcgaagcccagataagaagacgtgccccatgaaggaaggaaacccctttggcccattctgggatcagtttcatgtgagtttcaacaagtcggagctttttacaggcatttccttcagtgcttcctacagagaacaatggagccagagattttctccaaaggaacatccggtgcttgccctgccaggagccccagcccagttccccgtcctagaggaacacaggccactacagaagtacatggtatggtcagacgaaatggtgaagacgggagaggcccagattcatgcccaccttgtccggccctatgtgggcattcatctgcgcattggctctgactggaagaacgcctgtgccatgctgaaggacgggactgcaggctcgcacttcatggcctctccgcagtgtgtgggctacagccgcagcacagcggcccccctcacgatgactatgtgcctgcctgacctgaaggagatccagagggctgtgaagctctgggtgaggtcgctggatgcccagtcggtctacgttgctactgattccgagagttatgtgcctgagctccaacagctcttcaaagggaaggtgaaggtggtgagcctgaagcctgaggtggcccaggtcgacctgtacatcctcggccaagccgaccactttattggcaactgtgtctcctccttcactgcctttgtgaagcgggagcgggacctccaggggaggccgtcttctttcttcggcatggacaggccccctaagctgcgggacgagttctgattctggccggagcaccagaccctctgatcctggagggaccagagtctgagctggtccttccagccaggcctggcagccagaggtgctccgggattgcaaactcctcttctcacctgccaaagatggagaagagtgccagggacccctcaaggagggagacgctccatatcccagggcataggacttgcaggttcctaggagcaggagcatctcccatcgcacgtgctttctgctcttctgggaatttctcacactggcaaagcagtccagcctccgtcttctggtccactctgctctgagcagcctgggatgctgaactcttcagagagatttttttatagagagatttctataattttgatacaaggtcatgactatcctagaactctctgtggtttttgaaaatcattgaattctattaatgtaggtacctaaagtgaccttaactgaatgtggatgaggctggggctggtgtgggtcttttggctgcttttcaaggtgtcccccaatgtggccctcaagagccatccccactgcctggccagagccattgttgtcccctacttcctaggccatttctggggcttgggggatgaatgctgtcctgtgctgtaaacactatgcaaatggaagttatcggttgtggtgctgtgcagcgctctgtgggcgactaagtgccactcacgcagcatgttcctggcaaggagcacataccatcaagccacactatcatggtattgttctcacagtcttttggtggttgatggccactgcaaacctggcaccatcagatctcttctgatctcttgccccagtggggcctggttggtagaatgttggcattcggttgatatccaaagcctgttctcccagccgtcctcctgcagctggagccttcaggccgtattctcacgagggaacgtttgccaaggctctgacctcacagaagatgcccagggcccagaagccatcagaattatcagtggagaagcaccttttgactcttcccttccaatgtaatctctgccaacaccatgaggcttaaggtgctctaagtcatgagtgttttggtctcaaatgctgcagttttaataatctgtgactcctgagagcccatggttttttgaccttgtggttctaaaattccttgtctgacccctgtagatcttttccttgccatgtcacctcccttggcctttgatcctggaaaggtggcagagcctccactgagccaggcccagagctccttgcagtgccttcttccttgtttacctgtgggaggaaacactttttttgtcaggggcagcctggttcagagctcagaggtcacactgtatcaaagatctcaaacagcaaagtcagcatttgctgtatagagctgccacccaactctaagcaggagaaactgtacagaaagggctttgctatttttcccttttgggaaaacaatgaagtgttttaagtcctgggtggactgagagatggtttgcctgtccagacttgctctcaagcctcatccagagaaggagctgcagatgagggagcccgtacactccctgccaccactaggttgtaagcctgtagctggctggctgatttcattttggaattcatttgccatccacagccttacactaggcacacactttagagtctggggctccagtggggcccgcctaattttttttccccccaagacagggccttgctctgtctcccaggctggagtgcagtggcatgatcatggcttactgcagccttgatctcccaggctcaagcgatccttctgcctcagcctctctggtagctgagactgcatgcccagctccaaatcaccttgattcatatcagcagtaataatcacttgtgttctgaaagaaagggcaccagaagttctagcaaaattcagttgtgttctgtgagctagcactttttcctctgacccaattttcttacctataaaatggtgataaaaaccgacaggttgttcaaaggcccagatcagctaaagcatgtatataagagcacgttgtaaacttgaaagagacaaaggcacaaatgtggctgttgattaatttgactgcttctcgttgctcgtcacctccatgccaggcactgtgcttgctaattgctttatgggggcattctcttatttattccccagccctgggaaataggagctgtcattatccttctctttctgcacaaggaaaaattaatgccctgagaattgtcataattttcccaaggctgcccagctggtggtgttaagccagaatttgacctcccagagccagtttccattagctgccatgctctgctgcctctaattcacagaatgcactttctaccctgtgtgccatggagacctcctatggaaaaatgatcagccaccttaccttctactgggtacctgctgtgagtctgcctatgccagaaggattaaggaggggaggttacccaagaaacaaagcctacatgccgcttacagcccccgttggatggttgctcagtacaacagtcttgcattcagcaggtgtttgttcatcacctactatgtgtcaggctctatgctaggtactggggatacaggagagaatcaagcgtaaagtctttgttctcaaggaatttgcattctagaaagtagaagatgtaataaatgtactgtgggacatgttaataagtgctataaagaaatataaagggtttgggagcaaaaagagggagtggatctattttagatgagcccaggtaagacctctctgaagagctgtcatgaaggagggagggagcacattcctggcagagaaaacagcacgtgcaaaggccccgagactggagtgtgttcctgaagagcagccaggaggccagcatggctggagaggcaggcataggcagggaaccgagcagcaggtcagagcaggcgagctgacattctgcagcctggacggccatggcaggaagcttttagttggagagagaaagggtgaaagcagagagaccagtgcagggctgttaacagggttgcaggcgagagactggggtgctgggctcccctagactaggactccagtgccctcctctcccaagagacaaaggccattgcattgaaggaggtgggaaatgattagattctgaacatatgtaattatttttcagtctttttcaaagatacaaatatttacatagttttaatcatgtaatatatacaatttaatgtcctagtgttttacttaatagtgtatcatgttttccctgttggtatgtagcctggataaatgctcttaattataaaaaattctgtcgaggagtgttccatagtttattgttttcctattatgagaatttaggccaagtgtggtggctcatgcctgtaatcccagcactttgcgaggccgaggtgggcagatcacttgaggtgaggagttcaagaccagcctggccaacatggtgaattatctctactaaaaatacaaaaaaataataataatagccaggcgtggtggcacatgcctgtattcccagctgcttgggaggctgaggcaggagaatggcttgaacctgggaggtggaggttgcagtgagccgagatggtgccactgcattccagcctgggcaacagagcgagactccatctcaaaaaaaaggagacttcatgtgcccccaatttttcactattgttatttgaaaaaatatttttatttgtaagagtttttctttatttaaaatgttcattaataaagttgttggacgggaagcaaaaaaaaaaagttgtttaagataaattcccagaagtgaatttgttagatcaaacacttaaaactttttgttatggaagaattcaaatataaataaaaaattgtgagtaataaaatgaactcacagtttcaacaatgncccacatttta

SEQ ID NO: 314380 - DNA, 1662 bp, Homo sapiens
cagaaaggaataaggtcccttgcccaaggtcataaagcttgaagttgcagagcttggttttgaacccagaagtctgaatccaaatcaccttgattcatatcagcagtaataatcacttgtgttctgaaagaaagggcaccagaagttctagcaaaattcagttgtgttctgtgagctagcactttttcctctgacccaattttcttacctataaaatggtgataaaaaccgacaggttgttcaaaggcccagatcagctaaagcatgtatataagagcacgttgtaaacttgaaagagacaaaggcacaaatgtggctgttgattaatttgactgcttctcgttgctcgtcacctccatgccaggcactgtgcttgctaattgctttatgggggcattctcttatttattccccagccctgggaaataggagctgtcattatccttctctttctgcacaaggaaaaattaatgccctgagaattgtcataattttcccaaggctgcccagctggtggtgttaagccagaatttgacctcccagagccagtttccattagctgccatgctctgctgcctctaattcacagaatgcactttctaccctgtgtgccatggagacctcctatggaaaaatgatcagccaccttaccttctactgggtacctgctgtgagtctgcctatgccagaaggattaaggaggggaggttacccaagaaacaaagcctacatgccgcttacagcccccgttggatggttgctcagtacaacagtcttgcattcagcaggtgtttgttcatcacctactatgtgtcaggctctatgctaggtactggggatacaggagagaatcaagcgtaaagtctttgttctcaaggaatttgcattctagaaagtagaagatgtaataaatgtactgtgggacatgttaataagtgctataaagaaatataaagggtttgggagcaaaaagagggagtggatctattttagatgagcccaggtaagacctctctgaagagctgtcatgaaggagggagggagcacattcctggcagagaaaacagcacgtgcaaaggccccgagactggagtgtgttcctgaagagcagccaggaggccagcatggctggagaggcaggcataggcagggaaccgagcagcaggtcagagcaggcgagctgacattctgcagcctggacggccatggcaggaagcttttagttggagagatacaggaagcctcctagggttctgagcagaagaggggcatgagctgattcacattctgaaggacctctctagctggccagtgctgaggaggttggagagagaaagggtgaaagcagagagaccagtgcagggctgttaacagggttgcaggcgagagactggggtgctgggctcccctagactaggactccagtgccctcctctcccaagagacaaaggccattgcattgaaggaggtgggaaatgattagattctgaacatatgtaattatttttcagtctttttcaaagatacaaatatttacatagttttaatcatgtaatatatacaatttaatgtcctagtgttttacttaatagtgtatcatgttttccctgttggtatgtagcctggataaatgctcttaattataaaaaattctgtcgagga

SEQ ID NO: 314381 - DNA, 2035 bp, Homo sapiens
  misc_feature (30)..(31): n is a, c, g, or t
cgctgggagcggggcgggcgctcgcgtccnnggcttccctccccgactgtgcgccgcggctggctcgggttcccgggccgacatgggcgccgccgcgtgggcacggccgctgagcgtgtctttcctgctgctgcttctgccgctcccggggatgcctgcgggctcctgggacccggccggttacctgctctactgcccctgcatggggcgctttgggaaccaggccgatcacttcttgggctctctggcatttgcaaagctgctaaaccgtaccttggctgtccctccttggattgagtaccagcatcacaagcctcctttcaccaacctccatgtgtcctaccagaagtacttcaagctggagcccctccaggcttaccatcgggtcatcagcttggaggatttcatggagaagctggcacccacccactggccccctgagaagcgggtggcatactgctttgaggtggcagcccagcgaagcccagataagaagacgtgccccatgaaggaaggaaacccctttggcccattctgggatcagtttcatgtgagtttcaacaagtcggagctttttacaggcatttccttcagtgcttcctacagagaacaatggagccagaggcgtgagaatcactcctgtgttaccttactcttcccaaggtgaaactggaagcagcttctagagaacagcttcaggtgcagaccgagaaatgacgtcatcctgataattattggacgtgtttattaattgcaccccattagcccctgtttttaaaaaatataggttagcaggacgtgggcacaggccgtgaaacatttatagggcgcctgtcacgtgtgagacatagtaatcagaggccaatggtgatgtgtgaaaatgaggatgaccagctctggttttctaggagctatggtctcataatgacaataatcagcatagtgtacttgtccttaatgttatagcatggcaggaaagaccatgggcttagaaggcagacattggttaggaggtgcagggaacatactaattcatgtgcggtcaaagcacttggcatttaataggtgctgggattacaagcatgagctgctgcgcccagtcccaaagcacctgttcttaatcacagtggattaaatagctgtgcctttaacagctgccagttcccttctgggacttgcctttggacctagctttggacctagttcatgtgccactgaggatcctcagtcatggcagatttaaatcttcctcattgttgatcccagatagcacactcccattctctgcctgcatggttctcccccattcacctccgaatgacctggagctattgccagaaggcagacctgccctcaaaggatggagatttgcccatattgacaatatgccaggaaaaaaagaaagaaaaaaaagccaccaactctaaaagcaactccaaaagcaaattccaaaaagctagaaaaagcacacaatcctagtaggaagagaaaggacaatggtgcatggggagtgttgttgaaacacttgtttattgccccatagctttgtttgagttcattgagttgtaagaattacatgagggtttgaagaagtttgtgccttacagccaagtttttgggaaaggaaaattagtagggaagatgaggtccctagagggagtttgagggagttgatggtcccttggcagctgcctgtcttccttcaacacatatttaagaagcacttcctgagtgtcaagggctggtttggatgctggggatataggccagaataaggacatgaacaaggcagggaatgaacaaggccagaataaggcagataaggtccctgccccaatggaactcatagtctaacaggggagatagtgaataaacttttacataggatagttccagagtgagatggtgcttagaaggatataaacaggtggtatgtgattggcagggctaagaccagaaggatgagaaggagccagttgtgtcagagttagaggaaaagtagttcacaacagattgagaccgtcttaaaaaaaaa

SEQ ID NO: 314382 - DNA, 1100 bp, Homo sapiens
gagtgcaggcatgtgccaccatgcctgacgaatattttgttttgttttgtacaaacagggtcttgctatgttgcccaggctggtcttaaactcctggcctcaagtgatcctcccacctcagcctcccaaagtgctgggattacaagcatgagctgctgcgcccagtcccaaagcacctgttcttaatcacagtggattaaatagctgtgcctttaacagctgccagttcccttctgggacttgcctttggacctagctttggacctagttcatgtgccactgaggatcctcagtcatggcagatttaaatcttcctcattgttgatcccagatagcacactcccattctctgcctgcatggttctcccccattcacctccgaatgacctggagctattgccagaaggcagacctgccctcaaaggatggagatttgcccatattgacaatatgccaggaaaaaaagaaagaaaaaaaagccaccaactctaaaagcaactccaaaagcaaattccaaaaagctagaaaaagcacacaatcctagtaggaagagaaaggacaatggtgcatggggagtgttgttgaaacacttgtttattgccccatagctttgtttgagttcattgagttgtaagaattacatgagggtttgaagaagtttgtgccttacagccaagtttttgggaaaggaaaattagtagggaagatgaggtccctagagggagtttgagggagttgatggtcccttggcagctgcctgtcttccttcaacacatatttaagaagcacttcctgagtgtcaagggctggtttggatgctggggatataggccagaataaggacatgaacaaggcagggaatgaacaaggccagaataaggcagataaggtccctgccccaatggaactcatagtctaacaggggagatagtgaataaacttttacataggatagttccagagtgagatggtgcttagaaggatataaacaggtggtatgtgattggcagggctaagaccagaaggatgagaaggagccagttgtgtcagagttagaggaaaagtagttcacaacagattgagaccgtcttaaaaaaaaa

SEQ ID NO: 314383 - DNA, 4537 bp, Homo sapiens
  misc_feature (30)..(31): n is a, c, g, or t
cgctgggagcggggcgggcgctcgcgtccnnggcttccctccccgactgtgcgccgcggctggctcgggttcccgggccgacatgggcgccgccgcgtgggcacggccgctgagcgtgtctttcctgctgctgcttctgccgctcccggggatgcctgcgggctcctgggacccggccggttacctgctctactgcccctgcatggctccatgtgtcctaccagaagtacttcaagctggagcccctccaggcttaccatcgggtcatcagcttggaggatttcatggagaagctggcacccacccactggccccctgagaagcgggtggcatactgctttgaggtggcagcccagcgaagcccagataagaagacgtgccccatgaaggaaggaaacccctttggcccattctgggatcagtttcatgtgagtttcaacaagtcggagctttttacaggcatttccttcagtgcttcctacagagaacaatggagccagagattttctccaaaggaacatccggtgcttgccctgccaggagccccagcccagttccccgtcctagaggaacacaggccactacagaagtacatggtatggtcagacgaaatggtgaagacgggagaggcccagattcatgcccaccttgtccggccctatgtgggcattcatctgcgcattggctctgactggaagaacgcctgtgccatgctgaaggacgggactgcaggctcgcacttcatggcctctccgcagtgtgtgggctacagccgcagcacagcggcccccctcacgatgactatgtgcctgcctgacctgaaggagatccagagggctgtgaagctctgggtgaggtcgctggatgcccagtcggtctacgttgctactgattccgagagttatgtgcctgagctccaacagctcttcaaagggaaggtgaaggtggtgagcctgaagcctgaggtggcccaggtcgacctgtacatcctcggccaagccgaccactttattggcaactgtgtctcctccttcactgcctttgtgaagcgggagcgggacctccaggggaggccgtcttctttcttcggcatggacaggccccctaagctgcgggacgagttctgattctggccggagcaccagaccctctgatcctggagggaccagagtctgagctggtccttccagccaggcctggcagccagaggtgctccgggattgcaaactcctcttctcacctgccaaagatggagaagagtgccagggacccctcaaggagggagacgctccatatcccagggcataggacttgcaggttcctaggagcaggagcatctcccatcgcacgtgctttctgctcttctgggaatttctcacactggcaaagcagtccagcctccgtcttctggtccactctgctctgagcagcctgggatgctgaactcttcagagagatttttttatagagagatttctataattttgatacaaggtcatgactatcctagaactctctgtggtttttgaaaatcattgaattctattaatgtaggtacctaaagtgaccttaactgaatgtggatgaggctggggctggtgtgggtcttttggctgcttttcaaggtgtcccccaatgtggccctcaagagccatccccactgcctggccagagccattgttgtcccctacttcctaggccatttctggggcttgggggatgaatgctgtcctgtgctgtaaacactatgcaaatggaagttatcggttgtggtgctgtgcagcgctctgtgggcgactaagtgccactcacgcagcatgttcctggcaaggagcacataccatcaagccacactatcatggtattgttctcacagtcttttggtggttgatggccactgcaaacctggcaccatcagatctcttctgatctcttgccccagtggggcctggttggtagaatgttggcattcggttgatatccaaagcctgttctcccagccgtcctcctgcagctggagccttcaggccgtattctcacgagggaacgtttgccaaggctctgacctcacagaagatgcccagggcccagaagccatcagaattatcagtggagaagcaccttttgactcttcccttccaatgtaatctctgccaacaccatgaggcttaaggtgctctaagtcatgagtgttttggtctcaaatgctgcagttttaataatctgtgactcctgagagcccatggttttttgaccttgtggttctaaaattccttgtctgacccctgtagatcttttccttgccatgtcacctcccttggcctttgatcctggaaaggtggcagagcctccactgagccaggcccagagctccttgcagtgccttcttccttgtttacctgtgggaggaaacactttttttgtcaggggcagcctggttcagagctcagaggtcacactgtatcaaagatctcaaacagcaaagtcagcatttgctgtatagagctgccacccaactctaagcaggagaaactgtacagaaagggctttgctatttttcccttttgggaaaacaatgaagtgttttaagtcctgggtggactgagagatggtttgcctgtccagacttgctctcaagcctcatccagagaaggagctgcagatgagggagcccgtacactccctgccaccactaggttgtaagcctgtagctggctggctgatttcattttggaattcatttgccatccacagccttacactaggcacacactttagagtctggggctccagtggggcccgcctaattttttttccccccaagacagggccttgctctgtctcccaggctggagtgcagtggcatgatcatggcttactgcagccttgatctcccaggctcaagcgatccttctgcctcagcctctctggtagctgagactgcatgcccagctccaaatcaccttgattcatatcagcagtaataatcacttgtgttctgaaagaaagggcaccagaagttctagcaaaattcagttgtgttctgtgagctagcactttttcctctgacccaattttcttacctataaaatggtgataaaaaccgacaggttgttcaaaggcccagatcagctaaagcatgtatataagagcacgttgtaaacttgaaagagacaaaggcacaaatgtggctgttgattaatttgactgcttctcgttgctcgtcacctccatgccaggcactgtgcttgctaattgctttatgggggcattctcttatttattccccagccctgggaaataggagctgtcattatccttctctttctgcacaaggaaaaattaatgccctgagaattgtcataattttcccaaggctgcccagctggtggtgttaagccagaatttgacctcccagagccagtttccattagctgccatgctctgctgcctctaattcacagaatgcactttctaccctgtgtgccatggagacctcctatggaaaaatgatcagccaccttaccttctactgggtacctgctgtgagtctgcctatgccagaaggattaaggaggggaggttacccaagaaacaaagcctacatgccgcttacagcccccgttggatggttgctcagtacaacagtcttgcattcagcaggtgtttgttcatcacctactatgtgtcaggctctatgctaggtactggggatacaggagagaatcaagcgtaaagtctttgttctcaaggaatttgcattctagaaagtagaagatgtaataaatgtactgtgggacatgttaataagtgctataaagaaatataaagggtttgggagcaaaaagagggagtggatctattttagatgagcccaggtaagacctctctgaagagctgtcatgaaggagggagggagcacattcctggcagagaaaacagcacgtgcaaaggccccgagactggagtgtgttcctgaagagcagccaggaggccagcatggctggagaggcaggcataggcagggaaccgagcagcaggtcagagcaggcgagctgacattctgcagcctggacggccatggcaggaagcttttagttggagagatacaggaagcctcctagggttctgagcagaagaggggcatgagctgattcacattctgaaggacctctctagctggccagtgctgaggaggttggagagagaaagggtgaaagcagagagaccagtgcagggctgttaacagggttgcaggcgagagactggggtgctgggctcccctagactaggactccagtgccctcctctcccaagagacaaaggccattgcattgaaggaggtgggaaatgattagattctgaacatatgtaattatttttcagtctttttcaaagatacaaatatttacatagttttaatcatgtaatatatacaatttaatgtcctagtgttttacttaatagtgtatcatgttttccctgttggtatgtagcctggataaatgctcttaattataaaaaattctgtcgagga

SEQ ID NO: 314384 - DNA, 5119 bp, Homo sapiens
  misc_feature (30)..(31): n is a, c, g, or t
cgctgggagcggggcgggcgctcgcgtccnnggcttccctccccgactgtgcgccgcggctggctcgggttcccgggccgacatgggcgccgccgcgtgggcacggccgctgagcgtgtctttcctgctgctgcttctgccgctcccggggatgcctgcgggctcctgggacccggccggttacctgctctactgcccctgcatggggcgctttgggaaccaggccgatcacttcttgggctctctggcatttgcaaagctgctaaaccgtaccttggctgtccctccttggattgagtaccagcatcacaagcctcctttcaccaacctccatgtgtcctaccagaagtacttcaagctggagcccctccaggcttaccatcgggtcatcagcttggaggatttcatggagaagctggcacccacccactggccccctgagaagcgggtggcatactgctttgaggtggcagcccagcgaagcccagataagaagacgtgccccatgaaggaaggaaacccctttggcccattctgggatcagtttcatgtgagtttcaacaagtcggagctttttacaggcatttccttcagtgcttcctacagagaacaatggagccagagattttctccaaaggaacatccggtgcttgccctgccaggagccccagcccagttccccgtcctagaggaacacaggccactacagaagtacatggtatggtcagacgaaatggtgaagacgggagaggcccagattcatgcccaccttgtccggccctatgtgggcattcatctgcgcattggctctgactggaagaacgcctgtgccatgctgaaggacgggactgcaggctcgcacttcatggcctctccgcagtgtgtgggctacagccgcagcacagcggcccccctcacgatgactatgtgcctgcctgacctgaaggagatccagagggctgtgaagctctgggtgaggtcgctggatgcccagtcggtctacgttgctactgattccgagagttatgtgcctgagctccaacagctcttcaaagggaaggtgaaggtggtgagcctgaagcctgaggtggcccaggtcgacctgtacatcctcggccaagccgaccactttattggcaactgtgtctcctccttcactgcctttgtgaagcgggagcgggacctccaggggaggccgtcttctttcttcggcatggacaggccccctaagctgcgggacgagttctgattctggccggagcaccagaccctctgatcctggagggaccagagtctgagctggtccttccagccaggcctggcagccagaggtgctccgggattgcaaactcctcttctcacctgccaaagatggagaagagtgccagggacccctcaaggagggagacgctccatatcccagggcataggacttgcaggttcctaggagcaggagcatctcccatcgcacgtgctttctgctcttctgggaatttctcacactggcaaagcagtccagcctccgtcttctggtccactctgctctgagcagcctgggatgctgaactcttcagagagatttttttatagagagatttctataattttgatacaaggtcatgactatcctagaactctctgtggtttttgaaaatcattgaattctattaatgtaggtacctaaagtgaccttaactgaatgtggatgaggctggggctggtgtgggtcttttggctgcttttcaaggtgtcccccaatgtggccctcaagagccatccccactgcctggccagagccattgttgtcccctacttcctaggccatttctggggcttgggggatgaatgctgtcctgtgctgtaaacactatgcaaatggaagttatcggttgtggtgctgtgcagcgctctgtgggcgactaagtgccactcacgcagcatgttcctggcaaggagcacataccatcaagccacactatcatggtattgttctcacagtcttttggtggttgatggccactgcaaacctggcaccatcagatctcttctgatctcttgccccagtggggcctggttggtagaatgttggcattcggttgatatccaaagcctgttctcccagccgtcctcctgcagctggagccttcaggccgtattctcacgagggaacgtttgccaaggctctgacctcacagaagatgcccagggcccagaagccatcagaattatcagtggagaagcaccttttgactcttcccttccaatgtaatctctgccaacaccatgaggcttaaggtgctctaagtcatgagtgttttggtctcaaatgctgcagttttaataatctgtgactcctgagagcccatggttttttgaccttgtggttctaaaattccttgtctgacccctgtagatcttttccttgccatgtcacctcccttggcctttgatcctggaaaggtggcagagcctccactgagccaggcccagagctccttgcagtgccttcttccttgtttacctgtgggaggaaacactttttttgtcaggggcagcctggttcagagctcagaggtcacactgtatcaaagatctcaaacagcaaagtcagcatttgctgtatagagctgccacccaactctaagcaggagaaactgtacagaaagggctttgctatttttcccttttgggaaaacaatgaagtgttttaagtcctgggtggactgagagatggtttgcctgtccagacttgctctcaagcctcatccagagaaggagctgcagatgagggagcccgtacactccctgccaccactaggttgtaagcctgtagctggctggctgatttcattttggaattcatttgccatccacagccttacactaggcacacactttagagtctggggctccagtggggcccgcctaattttttttccccccaagacagggccttgctctgtctcccaggctggagtgcagtggcatgatcatggcttactgcagccttgatctcccaggctcaagcgatccttctgcctcagcctctctggtagctgagactgcatgcccagctccaaatcaccttgattcatatcagcagtaataatcacttgtgttctgaaagaaagggcaccagaagttctagcaaaattcagttgtgttctgtgagctagcactttttcctctgacccaattttcttacctataaaatggtgataaaaaccgacaggttgttcaaaggcccagatcagctaaagcatgtatataagagcacgttgtaaacttgaaagagacaaaggcacaaatgtggctgttgattaatttgactgcttctcgttgctcgtcacctccatgccaggcactgtgcttgctaattgctttatgggggcattctcttatttattccccagccctgggaaataggagctgtcattatccttctctttctgcacaaggaaaaattaatgccctgagaattgtcataattttcccaaggctgcccagctggtggtgttaagccagaatttgacctcccagagccagtttccattagctgccatgctctgctgcctctaattcacagaatgcactttctaccctgtgtgccatggagacctcctatggaaaaatgatcagccaccttaccttctactgggtacctgctgtgagtctgcctatgccagaaggattaaggaggggaggttacccaagaaacaaagcctacatgccgcttacagcccccgttggatggttgctcagtacaacagtcttgcattcagcaggtgtttgttcatcacctactatgtgtcaggctctatgctaggtactggggatacaggagagaatcaagcgtaaagtctttgttctcaaggaatttgcattctagaaagtagaagatgtaataaatgtactgtgggacatgttaataagtgctataaagaaatataaagggtttgggagcaaaaagagggagtggatctattttagatgagcccaggtaagacctctctgaagagctgtcatgaaggagggagggagcacattcctggcagagaaaacagcacgtgcaaaggccccgagactggagtgtgttcctgaagagcagccaggaggccagcatggctggagaggcaggcataggcagggaaccgagcagcaggtcagagcaggcgagctgacattctgcagcctggacggccatggcaggaagcttttagttggagagatacaggaagcctcctagggttctgagcagaagaggggcatgagctgattcacattctgaaggacctctctagctggccagtgctgaggaggttggagagagaaagggtgaaagcagagagaccagtgcagggctgttaacagggttgcaggcgagagactggggtgctgggctcccctagactaggactccagtgccctcctctcccaagagacaaaggccattgcattgaaggaggtgggaaatgattagattctgaacatatgtaattatttttcagtctttttcaaagatacaaatatttacatagttttaatcatgtaatatatacaatttaatgtcctagtgttttacttaatagtgtatcatgttttccctgttggtatgtagcctggataaatgctcttaattataaaaaattctgtcgaggagtgttccatagtttattgttttcctattatgagaatttaggccaagtgtggtggctcatgcctgtaatcccagcactttgcgaggccgaggtgggcagatcacttgaggtgaggagttcaagaccagcctggccaacatggtgaattatctctactaaaaatacaaaaaaataataataatagccaggcgtggtggcacatgcctgtattcccagctgcttgggaggctgaggcaggagaatggcttgaacctgggaggtggaggttgcagtgagccgagatggtgccactgcattccagcctgggcaacagagcgagactccatctcaaaaaaaaggagacttcatgtgcccccaatttttcactattgttatttgaaaaaatatttttatttgtaagagtttttctttatttaaaatgttcattaataaagttgttgactacgatgccggtaccgcct

SEQ ID NO: 314385 - DNA, 3349 bp, Homo sapiens
  misc_feature (30)..(31): n is a, c, g, or t
cgctgggagcggggcgggcgctcgcgtccnnggcttccctccccgactgtgcgccgcggctggctcgggttcccgggccgacatgggcgccgccgcgtgggcacggccgctgagcgtgtctttcctgctgctgcttctgccgctcccggggatgcctgcgggctcctgggacccggccggttacctgctctactgcccctgcatggggcgctttgggaaccaggccgatcacttcttgggctctctggcatttgcaaagctgctaaaccgtaccttggctgtccctccttggattgagtaccagcatcacaagcctcctttcaccaacctccatgtgtcctaccagaagtacttcaagctggagcccctccaggcttaccatcgggtcatcagcttggaggatttcatggagaagctggcacccacccactggccccctgagaagcgggtggcatactgctttgaggtggcagcccagcgaagcccagataagaagacgtgccccatgaaggaaggaaacccctttggcccattctgggatcagtttcatgtgagtttcaacaagtcggagctttttacaggcatttccttcagtgcttcctacagagaacaatggagccagagattttctccaaaggaacatccggtgcttgccctgccaggagccccagcccagttccccgtcctagaggaacacaggccactacagaagtacatggtatggtcagacgaaatggtgaagacgggagaggcccagattcatgcccaccttgtccggccctatgtgggcattcatctgcgcattggctctgactggaagaacgcctgtgccatgctgaaggacgggactgcaggctcgcacttcatggcctctccgcagtgtgtgggctacagccgcagcacagcggcccccctcacgatgactatgtgcctgcctgacctgaaggagatccagagggctgtgaagctctgggtgaggtcgctggatgcccagtcggtctacgttgctactgattccgagagttatgtgcctgagctccaacagctcttcaaagggaaggtgaaggtggtgagcctgaagcctgaggtggcccaggtcgacctgtacatcctcggccaagccgaccactttattggcaactgtgtctcctccttcactgcctttgtgaagcgggagcgggacctccaggggaggccgtcttctttcttcggcatggacaggccccctaagctgcgggacgagttctgattctggccggagcaccagaccctctgatcctggagggaccagagtctgagctggtccttccagccaggcctggcagccagaggtgctccgggattgcaaactcctcttctcacctgccaaagatggagaagagtgccagggacccctcaaggagggagacgctccatatcccagggcataggacttgcaggttcctaggagcaggagcatctcccatcgcacgtgctttctgctcttctgggaatttctcacactggcaaagcagtccagcctccgtcttctggtccactctgctctgagcagcctgggatgctgaactcttcagagagatttttttatagagagatttctataattttgatacaaggtcatgactatcctagaactctctgtggtttttgaaaatcattgaattctattaatgtaggtacctaaagtgaccttaactgaatgtggatgaggctcaagcgatccttctgcctcagcctctctggtagctgagactgcatgcccagctccaaatcaccttgattcatatcagcagtaataatcacttgtgttctgaaagaaagggcaccagaagttctagcaaaattcagttgtgttctgtgagctagcactttttcctctgacccaattttcttacctataaaatggtgataaaaaccgacaggttgttcaaaggcccagatcagctaaagcatgtatataagagcacgttgtaaacttgaaagagacaaaggcacaaatgtggctgttgattaatttgactgcttctcgttgctcgtcacctccatgccaggcactgtgcttgctaattgctttatgggggcattctcttatttattccccagccctgggaaataggagctgtcattatccttctctttctgcacaaggaaaaattaatgccctgagaattgtcataattttcccaaggctgcccagctggtggtgttaagccagaatttgacctcccagagccagtttccattagctgccatgctctgctgcctctaattcacagaatgcactttctaccctgtgtgccatggagacctcctatggaaaaatgatcagccaccttaccttctactgggtacctgctgtgagtctgcctatgccagaaggattaaggaggggaggttacccaagaaacaaagcctacatgccgcttacagcccccgttggatggttgctcagtacaacagtcttgcattcagcaggtgtttgttcatcacctactatgtgtcaggctctatgctaggtactggggatacaggagagaatcaagcgtaaagtctttgttctcaaggaatttgcattctagaaagtagaagatgtaataaatgtactgtgggacatgttaataagtgctataaagaaatataaagggtttgggagcaaaaagagggagtggatctattttagatgagcccaggtaagacctctctgaagagctgtcatgaaggagggagggagcacattcctggcagagaaaacagcacgtgcaaaggccccgagactggagtgtgttcctgaagagcagccaggaggccagcatggctggagaggcaggcataggcagggaaccgagcagcaggtcagagcaggcgagctgacattctgcagcctggacggccatggcaggaagcttttagttggagagatacaggaagcctcctagggttctgagcagaagaggggcatgagctgattcacattctgaaggacctctctagctggccagtgctgaggaggttggagagagaaagggtgaaagcagagagaccagtgcagggctgttaacagggttgcaggcgagagactggggtgctgggctcccctagactaggactccagtgccctcctctcccaagagacaaaggccattgcattgaaggaggtgggaaatgattagattctgaacatatgtaattatttttcagtctttttcaaagatacaaatatttacatagttttaatcatgtaatatatacaatttaatgtcctagtgttttacttaatagtgtatcatgttttccctgttggtatgtagcctggataaatgctcttaattataaaaaattctgtcgagga

SEQ ID NO: 314386 - DNA, 3333 bp, Homo sapiens
  misc_feature (30)..(31): n is a, c, g, or t
  misc_feature (3321)..(3321): n is a, c, g, or t
cgctgggagcggggcgggcgctcgcgtccnnggcttccctccccgactgtgcgccgcggctggctcgggttcccgggccgacatgggcgccgccgcgtgggcacggccgctgagcgtgtctttcctgctgctgcttctgccgctcccggggatgcctgcgggctcctgggacccggccggttacctgctctactgcccctgcatggggcgctttgggaaccaggccgatcacttcttgggctctctggcatttgcaaagctgctaaaccgtaccttggctgtccctccttggattgagtaccagcatcacaagcctcctttcaccaacctccatgtgtcctaccagaagtacttcaagctggagcccctccaggcttaccatcgggtcatcagcttggaggatttcatggagaagctggcacccacccactggccccctgagaagcgggtggcatactgctttgaggtggcagcccagcgaagcccagataagaagacgtgccccatgaaggaaggaaacccctttggcccattctgggatcagtttcatgtgagtttcaacaagtcggagctttttacaggcatttccttcagtgcttcctacagagaacaatggagccagagattttctccaaaggaacatccggtgcttgccctgccaggagccccagcccagttccccgtcctagaggaacacaggccactacagaagtacatggtatggtcagacgaaatggtgaagacgggagaggcccagattcatgcccaccttgtccggccctatgtgggcattcatctgcgcattggctctgactggaagaacgcctgtgccatgctgaaggacgggactgcaggctcgcacttcatggcctctccgcagtgtgtgggctacagccgcagcacagcggcccccctcacgatgactatgtgcctgcctgacctgaaggagatccagagggctgtgaagctctgggtgaggtcgctggatgcccagtcggtctacgttgctactgattccgagagttatgtgcctgagctccaacagctcttcaaagggaaggtgaaggtggtgagcctgaagcctgaggtggcccaggtcgacctgtacatcctcggccaagccgaccactttattggcaactgtgtctcctccttcactgcctttgtgaagcgggagcgggacctccaggggaggccgtcttctttcttcggcatggacaggccccctaagctgcgggacgagttctgattctggccggagcaccagaccctctgatcctggagggaccagagtctgagctggtccttccagccaggcctggcagccagaggtgctccgggattgcaaactcctcttctcacctgccaaagatggagaagagtgccagggacccctcaaggagggagacgctccatatcccagggcataggacttgcaggttcctaggagcaggagcatctcccatcgcacgtgctttctgctcttctgggaatttctcacactggcaaagcagtccagcctccgtcttctggtccactctgctctgagcagcctgggatgctgaactcttcagagagatttttttatagagagatttctataattttgatacaaggtcatgactatcctagaactctctgtggtttttgaaaatcattgaattctattaatgtaggtacctaaagtgaccttaactgaatgtggatgaggctggggctggtgtgggtcttttggctgcttttcaaggtgtcccccaatgtggccctcaagagccatccccactgcctggccagagccattgttgtcccctacttcctaggccatttctggggcttgggggatgaatgctgtcctgtgctgtaaacactatgcaaatggaagttatcggttgtggtgctgtgcagcgctctgtgggcgactaagtgccactcacgcagcatgttcctggcaaggagcacataccatcaagccacactatcatggtattgttctcacagtcttttggtggttgatggccactgcaaacctggcaccatcagatctcttctgatctcttgccccagtggggcctggttggtagaatgttggcattcggttgatatccaaagcctgttctcccagccgtcctcctgcagctggagccttcaggccgtattctcacgagggaacgtttgccaaggctctgacctcacagaagatgcccagggcccagaagccatcagaattatcagtggagaagcaccttttgactcttcccttccaatgtaatctctgccaacaccatgaggcttaaggtgctctaagtcatgagtgttttggtctcaaatgctgcagttttaataatctgtgactcctgagagcccatggttttttgaccttgtggttctaaaattccttgtctgacccctgtagatcttttccttgccatgtcacctcccttggcctttgatcctggaaaggtggcagagcctccactgagccaggcccagagctccttgcagtgccttcttccttgtttacctgtgggaggaaacactttttttgtcaggggcagcctggttcagagctcagaggtcacactgtatcaaagatctcaaacagcaaagtcagcatttgctgtatagagctgccacccaactctaagcaggagaaactgtacagaaagggctttgctatttttcccttttgggaaaacaatgaagtgttttaagtcctgggtggactgagagatggtttgcctgtccagacttgctctcaagcctcatccagagaaggagctgcagatgagggagcccgtacactccctgccaccactaggttgtaagcctgtagctggctggctgatttcattttggaattcatttgccatccacagccttacactaggcacacactttagagtctggggctccagtggggcccgcctaattttttttccccccaagacagggccttgctctgtctcccaggctggagtgcagtggcatgatcatggcttactgcagccttgatctcccaggctcaagcgatccttctgcctcagcctctctggtagctgagactgcatgcccagctccaaatcaccttgattcatatcagcagtaataatcacttgtgttctgaaagaaagggcaccagaagttctagcaaaattcagttgtgttctgtgagctagcactttttcctctgacccaattttcttacctataaaatggtgataaaaaccgacaggttgttcaaaggcccagatcagctaaagcatgtatataagagcacgccgtcaatagaaaaaggaaggcaagtacagagggaggaattcngcgccgcacgct

SEQ ID NO: 314387 - DNA, 1335 bp, Homo sapiens
  misc_feature (30)..(31): n is a, c, g, or t
cgctgggagcggggcgggcgctcgcgtccnnggcttccctccccgactgtgcgccgcggctggctcgggttcccgggccgacatgggcgccgccgcgtgggcacggccgctgagcgtgtctttcctgctgctgcttctgccgctcccggggatgcctgcgggctcctgggacccggccggttacctgctctactgcccctgcatggggcgctttgggaaccaggccgatcacttcttgggctctctggcatttgcaaagctgctaaaccgtaccttggctgtccctccttggattgagtaccagcatcacaagcctcctttcaccaacctccatgtgtcctaccagaagtacttcaagctggagcccctccaggcttaccatcgggtcatcagcttggaggatttcatggagaagctggcacccacccactggccccctgagaagcgggtggcatactgctttgaggtggcagcccagcgaagcccagataagaagacgtgccccatgaaggaaggaaacccctttggcccattctgggatcagtttcatgtgagtttcaacaagtcggagctttttacaggcatttccttcagtgcttcctacagagaacaatggagccagagattttctccaaaggaacatccggtgcttgccctgccaggagccccagcccagttccccgtcctagaggaacacaggccactacagaagtacatggtatggtcagacgaaatggtgaagacgggagaggcccagattcatgcccaccttgtccggccctatgtgggcattcatctgcgcattggctctgactggaagaacgcctgtgccatgctgaaggacgggactgcaggctcgcacttcatggcctctccgcagtgtgtgggctacagccgcagcacagcggcccccctcacgatgactatgtgcctgcctgacctgaaggagatccagagggctgtgaagctctgggtgaggtcgctggatgcccagtcggtctacgttgctactgattccgagagttatgtgcctgagctccaacagctcttcaaagggaaggtatgtgtgggccaagtgggagtgcagtaggaagggaatgaaaggaggagccaggatggtcccactgcccactgcatgcttcacgggctcccctacaagccttttgcctggacctaccattcctcttcagttcctaccctccttcaaaccccagctcagaggcctcctccgtagtctttccaggttttcatccactcctggagctcacgtatccctgctgggaccttcgtggccctatatcatttcttctctcgggcactttctggactgtatga

SEQ ID NO: 314388 - DNA, 817 bp, Homo sapiens
cacttgaggtcaggagttcgagaccagcctgaccaacatggcgaaaccccgactctactaaaactataaaaagccgggtgtggtggtgcatgcctgttatcctagctactcgggaggctgaggcacaagaatcatttgaacctgggagatggaggttgcagtgagccaagatcgtgccactcttctccaaactgggtgacagagggacactgtctcaaaaataaaataaatgtagagatggactgaatgctccaagctaatctgacaggattttagaaataatccaaatttatgctatttaaaaaaagctatatctgaataaagatattgaaaggctgaagtaaaaggatctactttgcatagtataacccaagacatggccaactttttctgtaaagggccagatggtaaatgttgttagctttgcacagtctctgtcacagctactaaactctgcccttgtggcaggaacatagtcattgacggtactcaaatagaacaggcatggctgtgttccaataaaactttatttacaaatacaggctgcaagtaggatttggcccataggccaaagtttgctggcccctatattgaccaaaacaaaaccgaaggagctacattattaccaagcaaaatagatgttaaggcaaaatactccttaaagcatttgttcaggaaaaataattgtaaatatatagtttcaaattacataatacaaaaattcatagaacaagaatacttagataaatctagtaaaaataatgagattttactatacctttcttacaaattaagcagacaaaaaaataaggatatg

SEQ ID NO: 314389 - DNA, 1089 bp, Homo sapiens
cacttgaggtcaggagttcgagaccagcctgaccaacatggcgaaaccccgactctactaaaactataaaaagccgggtgtggtggtgcatgcctgttatcctagctactcgggaggctgaggcacaagaatcatttgaacctgggagatggaggttgcagtgagccaagatcgtgccactcttctccaaactgggcaacagagtgagactctgtctcaaaaacacagtctgatagaatttttattaggatagccttgaatctatagatccatttgaaaataattaacatcttaaatttccaatttctggccgggcgctatggctcacgcctgtaattccagcacgttgggaggccgaggtgggcagatcatcaagtcaggagttcgagaccagcctgaccaacatggtgaaaccctgtctctactaaaaatacaaaaaaattagccaggcgtggtggcacatgcctgtagtcccagctactcaggaggctgaggcaggagaatcgcttgaatctgggaggcagaggttgcagtaagccgagattgtgccactgtactccagcctgggcaacagagtgaggctccgtctccaaaaaaaaaaaaaaaaaattccagttgttgagaaagaataggaattccagctttggaggagtggggagaccatcaaatcctctttccaaaaatactactaaaatactactgagcagagtatagttccacaaatagtcttctgtaaagagactcacagtacatatttgtctttgtaggccatatagtccctgttgcaatttctcaattctacagctataacaggaaagcagctatatacagtatgtgaatgcttgtgttctaatacaaatttatttgcaaaatcaggaaaatggcttgaaatggtttaagatctagttttctgactagatcatggtatataatcttttccatatatattttgaatttggtttgctaatattttgctgatcatttttatatctctctttatgaaggatgctgatctacaactttcttttcttgtgatatctttttctggctttgctaccagggtagtactagcctcttaaaatgagttga

SEQ ID NO: 314390 - DNA, 514 bp, Homo sapiens
attcatggcactgctcctctccatccataggattatcttatgccctgtggcatttatcattttggaccctatctctctcctatctatattggactatggtggcacacagagtgttgtagagatgagggtctcatccttttgcccaggctggagtacagtggtgtgtatgtagcacactgcagccttcaactcctgatcctccaacctcagcctccacagttgctgggattacaagttcaagttggtgtgtatctgcaaaggcgatggaaaggagttcttacatatgcatattctgaagaaggatgttacccttactgaaaaacttattccaagatatgtttaatcaatcatgagaaaaataaagagacatccttatgaatggagaataaagtcctcagggtttttttctaattccccatgtgaatgaagagctgtgttattctaaatatagtgtttgtcataaggcaattgtgttggtttgagtcgttagtcgctgtgacactgataggaattc

SEQ ID NO: 314391 - DNA, 464 bp, Homo sapiens
tccaaaggagtctatgttgtatgatttttatcctcctaacctctccaaataagagagtaaaatgatgtatgataaaacaagttcaagtaactaccagtttatatgtagttgagttcatttctctggttgttcctcagtgactttggagtgtctcatcctcaaaccccacatcccttcacacttggcaatagctgcagttctaccttggtctgttaagaattatgcgggtggtggtgggggaattggggggaaatgtgcctcgcctatggaacagtatcgttgactatttatttcttttatttcctctcagtcaagttggtgtgtatctgcaaaggcgatggaaaggagttcttacatatgcatattctgaagaaggatgttacccttactgaaaaacttattccaagatatgtttaatcaatcatgagaaaaataaagagacatccttatgaatggagaataaa

SEQ ID NO: 314392 - DNA, 838 bp, Homo sapiens
caattatgtatccactgaatgagaggacaccttgatttcaatttccatttataaacttctgcccatcatcattcatatttagctctgtgagtctcataactgcaccagcagccttgcatgtctattttactgccactttctaggcccaaactgtttaaatttatgtcttgatttcatctttaaactttgattttaccaggttattcttgaaattaaagttaaaccttgctcttctaacattaggccccttctaacattcttccaattttccatccccaaaccacatatcagattgtcatgttctctttgctgcactctagcctgggcaacagagcaaaactccgtctcacaaaaaaaaaaaaaaacactgcagtaaaaagccagctgtacctatacatgatgtacctacttgtatgcataggcttaagtatacctatagaataaattcctaaaagtggaattgttggtgtaggcattaataaatcttgtcaaattgccctccataaaggtttctgccatttttcattctgaccaactacatgtgagaatgtgtatttcctccaaaacatcaccaatattgtgttttaaataaaactacttgaaagtcatgtttaaacagggttaattttatcaactttgactacatttctgtgactaattccacaatatgatttcacaaatattctaacagaaggcttcttaggagaaactaagtggcaagaaggccagattatttcaatatatcttgaaacttttctgttttcctaaaacataaacttacatcagtttgtttgatctagcctgggcaacagagcaaaactccgtctcacaaaaaaaa

SEQ ID NO: 314393 - DNA, 556 bp, Homo sapiens
gcgggagtatgggcttagaagccggaagtgggttgaggtagcccggaaggggaatacttccaagttgtagtgttgttgttttcagcctgctgctgctgctgctgttgcggctaggggaaccgtcgtggggaaggatggtgtgcgaaaaatgtgaaaagaaacttggtactgttatcactccagatacatggaaagatggtgctaggaataccacagaaagtggtggaagaaagctgaatgaaaataaagctttgacttcaaaaaaagcaagatttgatccatatggaaagaataagttctccacttgtagaatttgtaaaagttctgtgcaccaaccaggttctcattactgccagggctgtgcctacaaaaaaggcatctgtgcgatgtgtggaaaaaaggttttggataccaaaaactacaagcaaacatctgtctagatgtattgatggaatttctggctttctaaatgattttactttctgccttgaattttcaaggcatagatgtcaacttacagaataacatgttttaagataattaagtttaaaccaga

SEQ ID NO: 314394 - DNA, 1177 bp, Homo sapiens
gcgggagtatgggcttagaagccggaagtgggttgaggtagcccggaaggggaatacttccaagttgtagtgttgttgttttcagcctgctgctgctgctgctgttgcggctaggggaaccgtcgtggggaaggatggtgtgcgaaaaatgtgaaaagaaacttggtactgttatcactccagatacatggaaagatggtgctaggaataccacagaaagtggtggaagaaagctgaatgaaaataaagctttgacttcaaaaaaagcaagatttgatccatatggaaagaataagttctccacttgtagaatttgtaaaagttctgtgcaccaaccaggttctcattactgccagggctgtgcctacaaaaaaggcatctgtgcgatgtgtggaaaaaaggttttggataccaaaaactacaagcaaacatctgtctagatgtattgatggaatttctggctttctaaatgattttactttctgccttgaattttcaaggcatagatgtcaacttacagaataacatgttttaagataattaagtttaaaccagagaatttgattgttactcattttgctctcatgttctaaacagcaacagtgtaactagtcttttgttgtaaatggttattttccttataagaattttaagaactaagtggcaaattccatgaaaatatttctcagttctgtatgcacttttatttaacattattcatataattctccccccaccactttatttatagatactgcaaaagtgagaaggagataatagatactttgctctgaatttggcatccagagttaacatttctcccctcactcccttgctggtgtcatagttattagaatcagcagcctcttaactaattgcggtttcataggatatataaatgtttcaagccattattgctgaatggttctttagttattaacctagacccaaatcaaagaccagttggatttatgatattttttatttgttcttgcagccaaagtgccagtttctttaatatgtgaccaagaacacaaggagcatccatatggccaaataaatacactgaattttagaaaaacatattactttgaattcaaattgtcatgaaaaccagaacagtgtttgtccatgttgcatgtaatgaaaataaatccctgctctgagaaaagctctt

SEQ ID NO: 314395 - DNA, 1184 bp, Homo sapiens
gctatgtggctaagggcacagccgtcgtgcgcggaacggtatgtgtgtcgcgatcacaatagtgaagatagcaagactgtgcgttactgttgtatccattccagatacattgcaaagatggttgctaggtacatccacagcacaaagtggtggaagaaagctgaatgaaaataaagctttgacttcaaaaaaagcaagatttgatccatatggaaagaataagttctccacttgtagaatttgtaaaagttctgtgcaccaaccaggttctcattactgccagggctgtgcctacaaaaaaggcatctgtgcgatgtgtggaaaaaaggttttggataccaaaaactacaagcaaacatctgtctagatgtattgatggaatttctggctttctaaatgattttactttctgccttgaattttcaaggcatagatgtcaacttacagaataacatgttttaagataattaagtttaaaccagagaatttgattgttactcattttgctctcatgttctaaacagcaacagtgtaactagtcttttgttgtaaatggttattttccttataagaattttaagaactaagtggcaaattccatgaaaatatttctcagttctgtatgcacttttatttaacattattcatataattctccccccaccactttatttatagatactgcaaaagtgagaaggagataatagatactttgctctgaatttggcatccagagttaacatttctcccctcactcccttgctggtgtcatagttattagaatcagcagcctcttaactaattgcggtttcataggatatataaatgtttcaagccattattgctgaatggttctttagttattaacctagacccaaatcaaagaccagttggatttatgatattttttatttgttcttgcagccaaagtgccagtttctttaatatgtgaccaagaacacaaggagcatccatatggccaaataaatacactgaattttagaaaaacatattactttgaattcaaattgtcatgaaaaccagaacagtgtttgtccatgttgcatgtaatgaaaataaatccctgctctgagaaaagctctttgaagcaaaaaccaaacttttttttttttttttttacctcctgtcttgccccctaaaagaaataaatagagcaaacatct

SEQ ID NO: 314396 - DNA, 1047 bp, Homo sapiens
  misc_feature (1)..(1): n is a, c, g, or t
ngtacccttattcgtgttgcacctggaatgaaaataaagctttgacttcaaaaaaagcaagatttgatccatatggaaagaataagttctccacttgtagaatttgtaaaagttctgtgcaccaaccaggttctcattactgccagggctgtgcctacaaaaaaggcatctgtgcgatgtgtggaaaaaaggttttggataccaaaaactacaagcaaacatctgtctagatgtattgatggaatttctggctttctaaatgattttactttctgccttgaattttcaaggcatagatgtcaacttacagaataacatgttttaagataattaagtttaaaccagagaatttgattgttactcattttgctctcatgttctaaacagcaacagtgtaactagtcttttgttgtaaatggttattttccttataagaattttaagaactaagtggcaaattccatgaaaatatttctcagttctgtatgcacttttatttaacattattcatataattctccccccaccactttatttatagatactgcaaaagtgagaaggagataatagatactttgctctgaatttggcatccagagttaacatttctcccctcactcccttgctggtgtcatagttattagaatcagcagcctcttaactaattgcggtttcataggatatataaatgtttcaagccattattgctgaatggttctttagttattaacctagacccaaatcaaagaccagttggatttatgatattttttatttgttcttgcagccaaagtgccagtttctttaatatgtgaccaagaacacaaggagcatccatatggccaaataaatacactgaattttagaaaaacatattactttgaattcaaattgtcatgaaaaccagaacagtgtttgtccatgttgcatgtaatgaaaataaatccctgctctgagaaaagctctttgaagcaaaaaccaaacttttttttttttttttttacctcctgtcttgccccctaaaagaaataaatagagcaaacatct

SEQ ID NO: 314397 - DNA, 1257 bp, Homo sapiens
gcgggagtatgggcttagaagccggaagtgggttgaggtagcccggaaggggaatacttccaagttgtagtgttgttgttttcagcctgctgctgctgctgctgttgcggctaggggaaccgtcgtggggaaggatggtgtgcgaaaaatgtgaaaagaaacttggtactgttatcactccagatacatggaaagatggtgctaggaataccacagaaagtggtggaagaaagctgaatgaaaataaagctttgacttcaaaaaaagcaagatttgatccatatggaaagaataagttctccacttgtagaatttgtaaaagttctgtgcaccaaccaggttctcattactgccagggctgtgcctacaaaaaaggcatctgtgcgatgtgtggaaaaaaggttttggataccaaaaactacaagcaaacatctgtctagatgtattgatggaatttctggctttctaaatgattttactttctgccttgaattttcaaggcatagatgtcaacttacagaataacatgttttaagataattaagtttaaaccagagaatttgattgttactcattttgctctcatgttctaaacagcaacagtgtaactagtcttttgttgtaaatggttattttccttataagaattttaagaactaagtggcaaattccatgaaaatatttctcagttctgtatgcacttttatttaacattattcatataattctccccccaccactttatttatagatactgcaaaagtgagaaggagataatagatactttgctctgaatttggcatccagagttaacatttctcccctcactcccttgctggtgtcatagttattagaatcagcagcctcttaactaattgcggtttcataggatatataaatgtttcaagccattattgctgaatggttctttagttattaacctagacccaaatcaaagaccagttggatttatgatattttttatttgttcttgcagccaaagtgccagtttctttaatatgtgaccaagaacacaaggagcatccatatggccaaataaatacactgaattttagaaaaacatattactttgaattcaaattgtcatgaaaaccagaacagtgtttgtccatgttgcatgtaatgaaaataaatccctgctctgagaaaagctctttgaagcaaaaaccaaacttttttttttttttttttacctcctgtcttgccccctaaaagaaataaatagagcaaacatct

SEQ ID NO: 314398 - DNA, 1914 bp, Homo sapiens
ctttccccttactccgctcccctcttttccctccctctcctccccttccctctgttctctcctcctcttcccctcccctcccccgtccggggcactctatattcaagccaccgtttcctgcttcacaaaatggccaccgcacgcgacacctacggtcacgtggcctgccgccctctcagtttcgggaatctgcctagctcccactaaggggaggctacccgcggaagagcgagggcagattagaccggagaaatcccaccacatctccaagcccgggaactgagagaggaagaagagtgaaggccagtgttaggaaaaaaaaaaacaaaaacaaaaaaaacgaaaaacgaaagctgagtgcatagagttggaaaggggagcgaatgcgtaaggttggaaaggggggcgaagaggcctaggttaacattttcaggcgtcttagccggtggaaagcgggagacgcaagttctcgcgagatctcgagaactccgaggctgagactagggttttagcggagagcacgggaagtgtagctcgagagaactgggacagcatttcgcaccctaagctccaaggcaggactgctaggggcgacaggactaagtaggaaatcccttgagcttagacctgagggagcgcgcagtagccgggcagaagtcgccgcgacagggaattgcggtgtgagagggagggcacacgttgtacgtgctgacgtagccggctttccagcgggtatattagatccgtggccgcgcggtgcgctccagagccgcagttctcccgtgagagggccttcgcggtggaacaaacactcgcttagcagcggaagactccgagttctcggtactcttcagggatgagtcatgtggcagtggaaaatgcgctcgggctggaccagcagtttgctggcctagacctgaactcttcagataatcagagtggaggaagtacagccagcagttggagtgcaatggtgtgatctcggctcaccgcagtctctgcctccgggttcaagcgattctcctgcctcagcctcccgaatagctgtgcctttctgataataaaacatcaatgactagctggctctcttgagtaaaagcagctaatcattggaaagaaccttattatatcaaattatctctagaagagtttttgtccattataaatcctgagcccagtttagaggtgatgggaatgtgtccctgttaactgactatatttattaaattgaattaagggaatatgcatttcattggttatagctactcctttctcctgaagaacagaagactatactgaattttggattggtggttaggttaggttttcaaatgtgtcatttcttttaaaaaggcattagaaaagttgctttttttcttctaaggggggttatttagagacttgttagaggttagtgttaagataggggatcttggtggtttattataagggcaatagacccttatttttagctcagatctcttcctacttattaaaacaaaagtgagtatgggctatgatgtgtcctcatttttaggcaagaacagcttcactgggaacaaaacttggtgtttgctttaactttcaccttatttgtcatgctaagaatcttttaggaactgattgtcctagtagagatttttaaaaatatttaattcagtctagaagtgaaaaagaaaaatgacacgtttactagttataaagcaaatttatttggctttatgttgttttttttgcttatccatattctaggctgtactcctgctcgcatacagagcaactgtcaactttccttaaactcagcaagccccaaattaaaacctgcaattccttgaaattaactcccctttgcagcttttccttgtttatttattgtatgttttgcaacttactggcatagaaacaaaagattgt

SEQ ID NO: 314399 - DNA, 5331 bp, Homo sapiens
ctttccccttactccgctcccctcttttccctccctctcctccccttccctctgttctctcctcctcttcccctcccctcccccgtccggggcactctatattcaagccaccgtttcctgcttcacaaaatggccaccgcacgcgacacctacggtcacgtggcctgccgccctctcagtttcgggaatctgcctagctcccactaaggggaggctacccgcggaagagcgagggcagattagaccggagaaatcccaccacatctccaagcccgggaactgagagaggaagaagagtgaaggccagtgttaggaaaaaaaaaaacaaaaacaaaaaaaacgaaaaacgaaagctgagtgcatagagttggaaaggggagcgaatgcgtaaggttggaaaggggggcgaagaggcctaggttaacattttcaggcgtcttagccggtggaaagcgggagacgcaagttctcgcgagatctcgagaactccgaggctgagactagggttttagcggagagcacgggaagtgtagctcgagagaactgggacagcatttcgcaccctaagctccaaggcaggactgctaggggcgacaggactaagtaggaaatcccttgagcttagacctgagggagcgcgcagtagccgggcagaagtcgccgcgacagggaattgcggtgtgagagggagggcacacgttgtacgtgctgacgtagccggctttccagcgggtatattagatccgtggccgcgcggtgcgctccagagccgcagttctcccgtgagagggccttcgcggtggaacaaacactcgcttagcagcggaagactccgagttctcggtactcttcagggatgagtcatgtggcagtggaaaatgcgctcgggctggaccagcagtttgctggcctagacctgaactcttcagataatcagagtggaggaagtacagccagcaaagggcgctatattcctcctcatttaaggaaccgagaagctactaaaggtttctacgataaagacagttcagggtggagttctagcaaagataaggatgcgtatagcagttttggatctcgtagtgattcaagagggaagtctagcttcttcagtgatcgtggaagtggatcaaggggaaggtttgatgatcgtggacggagtgattacgatggcattggcagccgtggtgacagaagtggctttggcaaatttgaacgtggtggaaacagtcgctggtgtgacaaatcagatgaagatgattggtcaaaaccactcccaccaagtgaacgcttggaacaggaactcttttctggaggcaacactgggattaattttgagaaatacgatgacattccagttgaggcaacaggcaacaactgtcctccacatattgaaagtttcagtgatgttgagatgggagaaattatcatgggaaacattgagcttactcgttatactcgcccaactccagtgcaaaagcatgctattcctattatcaaagagaaaagagacttgatggcttgtgcccaaacagggtctggaaaaactgcagcatttctgttgcccatcttgagtcagatttattcagatggtccaggcgaggctttgagggccatgaaggaaaatggaaggtatgggcgccgcaaacaatacccaatctccttggtattagcaccaacgagagagttggcagtacagatctacgaggaagccagaaaattttcataccgatctagagttcgtccttgcgtggtttatggtggtgccgatattggtcagcagattcgagacttggaacgtggatgccatttgttagtagccactccaggacgtctagtggatatgatggaaagaggaaagattggattagacttttgcaaatacttggtgttagatgaagctgatcggatgttggatatggggtttgagcctcagattcgtagaatagtcgaacaagatactatgcctccaaagggtgtccgccacactatgatgtttagtgctacttttcctaaggaaatacagatgctggctcgtgatttcttagatgaatatatcttcttggctgtaggaagagttggctctacctctgaaaacatcacacagaaagtagtttgggtggaagaatcagacaaacggtcatttctgcttgacctcctaaatgcaacaggcaaggattcactgaccttagtgtttgtggagaccaaaaagggtgcagattctctggaggatttcttataccatgaaggatacgcatgtaccagcatccatggagaccgttctcagagggatagagaagaggcccttcaccagttccgctcaggaaaaagcccaattttagtggctacagcagtagcagcaagaggactggacatttcaaatgtgaaacatgttatcaattttgacttgccaagtgatattgaagaatatgtacatcgtattggtcgtacgggacgtgtaggaaaccttggcctggcaacctcattctttaacgagaggaacataaatattactaaggatttgttggatcttcttgttgaagctaaacaagaagtgccgtcttggttagaaaacatggcttatgaacaccactacaagggtagcagtcgtggacgttctaagagtagcagatttagtggagggtttggtgccagagactaccgacaaagtagcggtgccagcagttccagcttcagcagcagccgcgcaagcagcagccgcagtggcggaggtggccacggtagcagcagaggatttggtggaggtggctatggaggcttttacaacagtgatggatatggaggaaattataactcccagggggttgactggtggggtaactgagcctgctttgcagtaggtcaccctgccaaacaagctaatatggaaaccacatgtaacttagccagactataccttgtgtagcttcaagaactcgcagtacattaccagctgtgattctccactgaaattttttttttaagggagctcaaggtcacaagaagaaatgaaaggaacaatcagcagccctgttcagaaggtggtttgaagacttcattgctgtagtttggattaactcccctcccgcctacccccatcccaaactgcatttataattttgtgactgaggatcatttgtttgttaatgtactgtgcctttaactttagacaactttttattttgatgtcctgttggctcagtaatgctcaagatatcaattgttttgacaaaataaatttactgaacttgggctaaaatcaaaccttggcacacaggtgtgatacaacttaacaggaatcatcgattcatccataaataatataaggaaaaacttatgcggtagcctgcattagggctttttgatacttgcagattgggggaaaacaacaaatgtcttgaagcatattaatggaattagtttctaatgtggcaaactgtattaagttaaagttctgatttgctcactctatcctggataggtatttagaacctgatagtctttaagccattccagtcatgatgaggtgatgtatgaatacatgcatacattcaaagcactgttttcaaagttaatgcaagtaaatacagcaattcctctttcaacgtttaggcagatcattaattatgagctagccaaatgtgggcatactattacagggaaagtttaaaggtctgataacttgaaataggtttttaggagaattcatctacttagactttttaaatgcctgccataaatgaaattgaaatggtagaatggctgaccacagcaatgaccagccctcattagggccctggatgatttttggtctaataacgcatgctagtgttgatgttttttggtcaagagggtatgaacaggaagaattaaatgcagcaggctttattttaaatgccgattcacattactctgttcaagctgcgttgagatgttaaactggcttactatagacttcgtaaaaatggctccagaagagtaacaaactgaaatctttgagatcacacaggttggaaatatgtacataactgcacaaggtgtcaattctgctctacagtgcagttttagtcagttttagttgcataggtttccattgtatttatagtctgtttatgctaaatctggccaaagatgagcattgtccaccactaaaatgcctctgccactttgaattctgtgctaattttgtggccagaatgcggtgatcaaaacgctccatctttttacagtggcataggaagacggcaaaaatttcctaaagtgcaatagattttcaagtgtattgtgccttgttctaaaacttttattaagtaggtgcacttgacagtattgaggtcatttgttatggtgctatttcaattagtctaggtttaggcccttgtacattttgcccataactttttacaaagtacttcttttattgcacattcagagaattttatatatatgtcttgtgtgcgtgtccttaaacttccaatcttactttgtctcttggagattgttgaacgcagcttgtctaggaaggggatgggactagattctaaaatttatttgggaccatgggaatgatagttgggaagaaaactatttgcacacgacagatttctagatactttttgctgctagttttatgtaatatttattgaacattttgacaaatatttatttttgtaagcctaaaagtgattctttgaaagtttaaagaaacttgaccaaaagacagtacaaaaacactggcacttgaatgttgaatgtcaccgtatgcgtgaaattatatatttcggggtagtgtgagcttttaatgtttaagtcatattaaactcttaagtcaaattaagcagacccggcgttggcagtgtagccataactttctgatgttagtaaaaacaaaattggcgacttgaaattaaatcatgccaaggttttgatacacttgtcttaagatattaatgaaacacttcaaaacactgatgtgaagtgtccagattctcagatgtttgttgtgtggattttgtttagttgtgtgtttttttttttttttcagtgaatgtctggcacattgcaatcctcaaacatgtggttatctttgttgtattggcataatcagtgacttgtacattcagcaatagcatttgagcaagttttatcagcaagcaatattttcagttaataaggtttcaaaaatcatgtaaggatttaaacttgctgaatgtaaagattgaacctcaagtcactgtagctttagtaattgcttattgtattagtttagatgctagcactgcatgtgctgtgcatattctgattttattaaaataaaaagttgaactgcac

SEQ ID NO: 314400 - DNA, 3408 bp, Homo sapiens
ctttccccttactccgctcccctcttttccctccctctcctccccttccctctgttctctcctcctcttcccctcccctcccccgtccggggcactctatattcaagccaccgtttcctgcttcacaaaatggccaccgcacgcgacacctacggtcacgtggcctgccgccctctcagtttcgggaatctgcctagctcccactaaggggaggctacccgcggaagagcgagggcagattagaccggagaaatcccaccacatctccaagcccgggaactgagagaggaagaagagtgaaggccagtgttaggaaaaaaaaaaacaaaaacaaaaaaaacgaaaaacgaaagctgagtgcatagagttggaaaggggagcgaatgcgtaaggttggaaaggggggcgaagaggcctaggttaacattttcaggcgtcttagccggtggaaagcgggagacgcaagttctcgcgagatctcgagaactccgaggctgagactagggttttagcggagagcacgggaagtgtagctcgagagaactgggacagcatttcgcaccctaagctccaaggcaggactgctaggggcgacaggactaagtaggaaatcccttgagcttagacctgagggagcgcgcagtagccgggcagaagtcgccgcgacagggaattgcggtgtgagagggagggcacacgttgtacgtgctgacgtagccggctttccagcgggtatattagatccgtggccgcgcggtgcgctccagagccgcagttctcccgtgagagggccttcgcggtggaacaaacactcgcttagcagcggaagactccgagttctcggtactcttcagggatgagtcatgtggcagtggaaaatgcgctcgggctggaccagcagtttgctggcctagacctgaactcttcagataatcagagtggaggaagtacagccagcaaagggcgctatattcctcctcatttaaggaaccgagaagctactaaaggtttctacgataaagacagttcagggtggagttctagcaaagataaggatgcgtatagcagttttggatctcgtagtgattcaagagggaagtctagcttcttcagtgatcgtggaagtggatcaaggggaaggtttgatgatcgtggacggagtgattacgatggcattggcagccgtggtgacagaagtggctttggcaaatttgaacgtggtggaaacagtcgctggtgtgacaaatcagatgaagatgattggtcaaaaccactcccaccaagtgaacgcttggaacaggaactcttttctggaggcaacactgggattaattttgagaaatacgatgacattccagttgaggcaacaggcaacaactgtcctccacatattgaaagtttcagtgatgttgagatgggagaaattatcatgggaaacattgagcttactcgttatactcgcccaactccagtgcaaaagcatgctattcctattatcaaagagaaaagagacttgatggcttgtgcccaaacagggtctggaaaaactgcagcatttctgttgcccatcttgagtcagatttattcagatggtccaggcgaggctttgagggccatgaaggaaaatggaaggtatgggcgccgcaaacaatacccaatctccttggtattagcaccaacgagagagttggcagtacagatctacgaggaagccagaaaattttcataccgatctagagttcgtccttgcgtggtttatggtggtgccgatattggtcagcagattcgagacttggaacgtggatgccatttgttagtagccactccaggacgtctagtggatatgatggaaagaggaaagattggattagacttttgcaaatacttggtgttagatgaagctgatcggatgttggatatggggtttgagcctcagattcgtagaatagtcgaacaagatactatgcctccaaagggtgtccgccacactatgatgtttagtgctacttttcctaaggaaatacagatgctggctcgtgatttcttagatgaatatatcttcttggctgtaggaagagttggctctacctctgaaaacatcacacagaaagtagtttgggtggaagaatcagacaaacggtcatttctgcttgacctcctaaatgcaacaggcaaggattcactgaccttagtgtttgtggagaccaaaaagggtgcagattctctggaggatttcttataccatgaaggatacgcatgtaccagcatccatggagaccgttctcagagggatagagaagaggcccttcaccagttccgctcaggaaaaagcccaattttagtggctacagcagtagcagcaagaggactggacatttcaaatgtgaaacatgttatcaattttgacttgccaagtgatattgaagaatatgtacatcgtattggtcgtacgggacgtgtaggaaaccttggcctggcaacctcattctttaacgagaggaacataaatattactaaggatttgttggatcttcttgttgaagctaaacaagaagtgccgtcttggttagaaaacatggcttatgaacaccactacaagggtagcagtcgtggacgttctaagagtagcagatttagtggagggtttggtgccagagactaccgacaaagtagcggtgccagcagttccagcttcagcagcagccgcgcaagcagcagccgcagtggcggaggtggccacggtagcagcagaggatttggtggaggtggctatggaggcttttacaacagtgatggatatggaggaaattataactcccagggggttgactggtggggtaactgagcctgctttgcagtaggtcaccctgccaaacaagctaatatggaaaccacatgtaacttagccagactataccttgtgtagcttcaagaactcgcagtacattaccagctgtgattctccactgaaattttttttttaagggagctcaaggtcacaagaagaaatgaaaggaacaatcagcagccctgttcagaaggatcatgctcctctgtggagcaagtgcctccatgaaatgccatattttgtgaagaaagtgcatgcaggaatattcaggagtccagcatgtagtcatggcagccttaggtatttgagaccgaccaaccctcctgatgaagacaaccataactcatgcaggcatgagtctaacttggagcgtgatgcccagaagtgtgtgaactggtctgtgaccacaaagatgagaaccgcatgctgagattggtggaatggagacttcagtgagcctacatgcagatgacatggtgacacccgtgcccagcctgagctgttttcttctggccctcttattacatgagaaaaataaacacctatgcaccttggcctca

SEQ ID NO: 314401 - DNA, 562 bp, Homo sapiens
aaggcacaatacacttgaaatctatggcactttaggaaattttggccgtcttccttatgccactgtaaaaagatggagcgttttgatcaccgcattctggccacaaaattagcacagaattcaaagtggcagaggcattttagtggtggactatgctcatcttcggccagatttagcataaacagactataaatacaatggaaaccttggcctggcaacctcattctttaacgagaggaacataaatattactaaggatttgttggatcttcttgttgaagctaaacaagaagtgccgtcttggttagaaaacatggcttatgaacaccactacaagggtagcagtcgtggacgttctaagagtagcagatttagtggagggtttggtgccagagactaccgacaaagtagcggtgccagcagttccagcttcagcagcagccgcgcaagcagcagccgcagtggcggaggtggccacggtagcagcagaggatttggtggaggttccacaacctcatactggtcacgcatcatcgtgcagatagcggcgcagtccacgaca

SEQ ID NO: 314402 - DNA, 5405 bp, Homo sapiens
ctttccccttactccgctcccctcttttccctccctctcctccccttccctctgttctctcctcctcttcccctcccctcccccgtccggggcactctatattcaagccaccgtttcctgcttcacaaaatggccaccgcacgcgacacctacggtcacgtggcctgccgccctctcagtttcgggaatctgcctagctcccactaaggggaggctacccgcggaagagcgagggcagattagaccggagaaatcccaccacatctccaagcccgggaactgagagaggaagaagagtgaaggccagtgttaggaaaaaaaaaaacaaaaacaaaaaaaacgaaaaacgaaagctgagtgcatagagttggaaaggggagcgaatgcgtaaggttggaaaggggggcgaagaggcctaggttaacattttcaggcgtcttagccggtggaaagcgggagacgcaagttctcgcgagatctcgagaactccgaggctgagactagggttttagcggagagcacgggaagtgtagctcgagagaactgggacagcatttcgcaccctaagctccaaggcaggactgctaggggcgacaggactaagtaggaaatcccttgagcttagacctgagggagcgcgcagtagccgggcagaagtcgccgcgacagggaattgcggtgtgagagggagggcacacgttgtacgtgctgacgtagccggctttccagcgggtatattagatccgtggccgcgcggtgcgctccagagccgcagttctcccgtgagagggccttcgcggtggaacaaacactcgcttagcagcggaagactccgagttctcggtactcttcagggatgagtcatgtggcagtggaaaatgcgctcgggctggaccagcagtttgctggcctagacctgaactcttcagataatcagagtggaggaagtacagccagcaaagggcgctatattcctcctcatttaaggaaccgagaagctactaaaggtttctacgataaagacagttcagggtggagttctagcaaagataaggatgcgtatagcagttttggatctcgtagtgattcaagagggaagtctagcttcttcagtgatcgtggaagtggatcaaggggaaggtttgatgatcgtggacggagtgattacgatggcattggcagccgtggtgacagaagtggctttggcaaatttgaacgtggtggaaacagtcgctggtgtgacaaatcagatgaagatgattggtcaaaaccactcccaccaagtgaacgcttggaacaggaactcttttctggaggcaacactgggattaattttgagaaatacgatgacattccagttgaggcaacaggcaacaactgtcctccacatattgaaagtttcagtgatgttgagatgggagaaattatcatgggaaacattgagcttactcgttatactcgcccaactccagtgcaaaagcatgctattcctattatcaaagagaaaagagacttgatggcttgtgcccaaacagggtctggaaaaactgcagcatttctgttgcccatcttgagtcagatttattcagatggtccaggcgaggctttgagggccatgaaggaaaatggaaggtatgggcgccgcaaacaatacccaatctccttggtattagcaccaacgagagagttggcagtacagatctacgaggaagccagaaaattttcataccgatctagagttcgtccttgcgtggtttatggtggtgccgatattggtcagcagattcgagacttggaacgtggatgccatttgttagtagccactccaggacgtctagtggatatgatggaaagaggaaagattggattagacttttgcaaatacttggtgttagatgaagctgatcggatgttggatatggggtttgagcctcagattcgtagaatagtcgaacaagatactatgcctccaaagggtgtccgccacactatgatgtttagtgctacttttcctaaggaaatacagatgctggctcgtgatttcttagatgaatatatcttcttggctgtaggaagagttggctctacctctgaaaacatcacacagaaagtagtttgggtggaagaatcagacaaacggtcatttctgcttgacctcctaaatgcaacaggcaaggattcactgaccttagtgtttgtggagaccaaaaagggtgcagattctctggaggatttcttataccatgaaggatacgcatgtaccagcatccatggagaccgttctcagagggatagagaagaggcccttcaccagttccgctcaggaaaaagcccaattttagtggctacagcagtagcagcaagaggactggacatttcaaatgtgaaacatgttatcaattttgacttgccaagtgatattgaagaatatgtacatcgtattggtcgtacgggacgtgtaggaaaccttggcctggcaacctcattctttaacgagaggaacataaatattactaaggatttgttggatcttcttgttgaagctaaacaagaagtgccgtcttggttagaaaacatggcttatgaacaccactacaagggtagcagtcgtggacgttctaagagtagcagatttagtggagggtttggtgccagagactaccgacaaagtagcggtgccagcagttccagcttcagcagcagccgcgcaagcagcagccgcagtggcggaggtggccacggtagcagcagaggatttggtggaggtggctatggaggcttttacaacagtgatggatatggaggaaattataactcccagggggttgactggtggggtaactgagcctgctttgcagtaggtcaccctgccaaacaagctaatatggaaaccacatgtaacttagccagactataccttgtgtagcttcaagaactcgcagtacattaccagctgtgattctccactgaaattttttttttaagggagctcaaggtcacaagaagaaatgaaaggaacaatcagcagccctgttcagaaggtggtttgaagacttcattgctgtagtttggattaactcccctcccgcctacccccatcccaaactgcatttataattttgtgactgaggatcatttgtttgttaatgtactgtgcctttaactttagacaactttttattttgatgtcctgttggctcagtaatgctcaagatatcaattgttttgacaaaataaatttactgaacttgggctaaaatcaaaccttggcacacaggtgtgatacaacttaacaggaatcatcgattcatccataaataatataaggaaaaacttatgcggtagcctgcattagggctttttgatacttgcagattgggggaaaacaacaaatgtcttgaagcatattaatggaattagtttctaatgtggcaaactgtattaagttaaagttctgatttgctcactctatcctggataggtatttagaacctgatagtctttaagccattccagtcatgatgaggtgatgtatgaatacatgcatacattcaaagcactgttttcaaagttaatgcaagtaaatacagcaattcctctttcaacgtttaggcagatcattaattatgagctagccaaatgtgggcatactattacagggaaagtttaaaggtctgataacttgaaataggtttttaggagaattcatctacttagactttttaaatgcctgccataaatgaaattgaaatggtagaatggctgaccacagcaatgaccagccctcattagggccctggatgatttttggtctaataacgcatgctagtgttgatgttttttggtcaagagggtatgaacaggaagaattaaatgcagcaggctttattttaaatgccgattcacattactctgttcaagctgcgttgagatgttaaactggcttactatagacttcgtaaaaatggctccagaagagtaacaaactgaaatctttgagatcacacaggttggaaatatgtacataactgcacaaggtgtcaattctgctctacagtgcagttttagtcagttttagttgcataggtttccattgtatttatagtctgtttatgctaaatctggccaaagatgagcattgtccaccactaaaatgcctctgccactttgaattctgtgctaattttgtggccagaatgcggtgatcaaaacgctccatctttttacagtggcataggaagacggcaaaaatttcctaaagtgcaatagattttcaagtgtattgtgccttgttctaaaacttttattaagtaggtgcacttgacagtattgaggtcatttgttatggtgctatttcaattagtctaggtttaggcccttgtacattttgcccataactttttacaaagtacttcttttattgcacattcagagaattttatatatatgtcttgtgtgcgtgtccttaaacttccaatcttactttgtctcttggagattgttgaacgcagcttgtctaggaaggggatgggactagattctaaaatttatttgggaccatgggaatgatagttgggaagaaaactatttgcacacgacagatttctagatactttttgctgctagttttatgtaatatttattgaacattttgacaaatatttatttttgtaagcctaaaagtgattctttgaaagtttaaagaaacttgaccaaaagacagtacaaaaacactggcacttgaatgttgaatgtcaccgtatgcgtgaaattatatatttcggggtagtgtgagcttttaatgtttaagtcatattaaactcttaagtcaaattaagcagacccggcgttggcagtgtagccataactttctgatgttagtaaaaacaaaattggcgacttgaaattaaatcatgccaaggttttgatacacttgtcttaagatattaatgaaacacttcaaaacactgatgtgaagtgtccagattctcagatgtttgttgtgtggattttgtttagttgtgtgtttttttttttttttcagtgaatgtctggcacattgcaatcctcaaacatgtggttatctttgttgtattggcataatcagtgacttgtacattcagcaatagcatttgagcaagttttatcagcaagcaatattttcagttaataaggtttcaaaaatcatgtaaggatttaaacttgctgaatgtaaagattgaacctcaagtcactgtagctttagtaattgcttattgtattagtttagatgctagcactgcatgtgctgtgcatattctgattttattaaaataaaaagttgaactgcacagtctcctttgttgttgtcaattgtggtttattttcagaggtgtaaataaagtgctcttgcctgaaaaattgta

SEQ ID NO: 314403 - DNA, 4661 bp, Homo sapiens
tcttaaaaacatcttagttcaggtaaggattattttctaccttttatccaaagtctgtcacacaggtgaattgtcctttaagtgacatcctagtataactaggacgattgatatttggtgtgctattttcttgttttccctaccattaaatatatttggatgagcactttaaatgaaggttgtgagctgtgtgccgatttcaaataaaatccttattcttaattttggcatctgtgaggccttttaggctatacaactttatagaaatgtaaagattactgattttagaaaacgaggttatgtaaatgatgctggttagagagccttatttgtcaagtaactcagaattggattgttgacatccttatggttagccataacttaagtctccagatacagttctagagtagggataagaatctgataatggttaaatgatatgattctgattaattgcttgtgctgttcaggtttgatgatcgtggacggagtgattacgatggcattggcagccgtggtgacagaagtggctttggcaaatttgaacgtggtggaaacagtcgctggtgtgacaaatcagatgaagatgattggtcaaaaccactcccaccaagtgaacgcttggaacaggaactcttttctggaggcaacactgggattaattttgagaaatacgatgacattccagttgaggcaacaggcaacaactgtcctccacatattgaaagtttcagtgatgttgagatgggagaaattatcatgggaaacattgagcttactcgttatactcgcccaactccagtgcaaaagcatgctattcctattatcaaagagaaaagagacttgatggcttgtgcccaaacagggtctggaaaaactgcagcatttctgttgcccatcttgagtcagatttattcagatggtccaggcgaggctttgagggccatgaaggaaaatggaaggtatgggcgccgcaaacaatacccaatctccttggtattagcaccaacgagagagttggcagtacagatctacgaggaagccagaaaattttcataccgatctagagttcgtccttgcgtggtttatggtggtgccgatattggtcagcagattcgagacttggaacgtggatgccatttgttagtagccactccaggacgtctagtggatatgatggaaagaggaaagattggattagacttttgcaaatacttggtgttagatgaagctgatcggatgttggatatggggtttgagcctcagattcgtagaatagtcgaacaagatactatgcctccaaagggtgtccgccacactatgatgtttagtgctacttttcctaaggaaatacagatgctggctcgtgatttcttagatgaatatatcttcttggctgtaggaagagttggctctacctctgaaaacatcacacagaaagtagtttgggtggaagaatcagacaaacggtcatttctgcttgacctcctaaatgcaacaggcaaggattcactgaccttagtgtttgtggagaccaaaaagggtgcagattctctggaggatttcttataccatgaaggatacgcatgtaccagcatccatggagaccgttctcagagggatagagaagaggcccttcaccagttccgctcaggaaaaagcccaattttagtggctacagcagtagcagcaagaggactggacatttcaaatgtgaaacatgttatcaattttgacttgccaagtgatattgaagaatatgtacatcgtattggtcgtacgggacgtgtaggaaaccttggcctggcaacctcattctttaacgagaggaacataaatattactaaggatttgttggatcttcttgttgaagctaaacaagaagtgccgtcttggttagaaaacatggcttatgaacaccactacaagggtagcagtcgtggacgttctaagagtagcagatttagtggagggtttggtgccagagactaccgacaaagtagcggtgccagcagttccagcttcagcagcagccgcgcaagcagcagccgcagtggcggaggtggccacggtagcagcagaggatttggtggaggtggctatggaggcttttacaacagtgatggatatggaggaaattataactcccagggggttgactggtggggtaactgagcctgctttgcagtaggtcaccctgccaaacaagctaatatggaaaccacatgtaacttagccagactataccttgtgtagcttcaagaactcgcagtacattaccagctgtgattctccactgaaattttttttttaagggagctcaaggtcacaagaagaaatgaaaggaacaatcagcagccctgttcagaaggtggtttgaagacttcattgctgtagtttggattaactcccctcccgcctacccccatcccaaactgcatttataattttgtgactgaggatcatttgtttgttaatgtactgtgcctttaactttagacaactttttattttgatgtcctgttggctcagtaatgctcaagatatcaattgttttgacaaaataaatttactgaacttgggctaaaatcaaaccttggcacacaggtgtgatacaacttaacaggaatcatcgattcatccataaataatataaggaaaaacttatgcggtagcctgcattagggctttttgatacttgcagattgggggaaaacaacaaatgtcttgaagcatattaatggaattagtttctaatgtggcaaactgtattaagttaaagttctgatttgctcactctatcctggataggtatttagaacctgatagtctttaagccattccagtcatgatgaggtgatgtatgaatacatgcatacattcaaagcactgttttcaaagttaatgcaagtaaatacagcaattcctctttcaacgtttaggcagatcattaattatgagctagccaaatgtgggcatactattacagggaaagtttaaaggtctgataacttgaaataggtttttaggagaattcatctacttagactttttaaatgcctgccataaatgaaattgaaatggtagaatggctgaccacagcaatgaccagccctcattagggccctggatgatttttggtctaataacgcatgctagtgttgatgttttttggtcaagagggtatgaacaggaagaattaaatgcagcaggctttattttaaatgccgattcacattactctgttcaagctgcgttgagatgttaaactggcttactatagacttcgtaaaaatggctccagaagagtaacaaactgaaatctttgagatcacacaggttggaaatatgtacataactgcacaaggtgtcaattctgctctacagtgcagttttagtcagttttagttgcataggtttccattgtatttatagtctgtttatgctaaatctggccaaagatgagcattgtccaccactaaaatgcctctgccactttgaattctgtgctaattttgtggccagaatgcggtgatcaaaacgctccatctttttacagtggcataggaagacggcaaaaatttcctaaagtgcaatagattttcaagtgtattgtgccttgttctaaaacttttattaagtaggtgcacttgacagtattgaggtcatttgttatggtgctatttcaattagtctaggtttaggcccttgtacattttgcccataactttttacaaagtacttcttttattgcacattcagagaattttatatatatgtcttgtgtgcgtgtccttaaacttccaatcttactttgtctcttggagattgttgaacgcagcttgtctaggaaggggatgggactagattctaaaatttatttgggaccatgggaatgatagttgggaagaaaactatttgcacacgacagatttctagatactttttgctgctagttttatgtaatatttattgaacattttgacaaatatttatttttgtaagcctaaaagtgattctttgaaagtttaaagaaacttgaccaaaagacagtacaaaaacactggcacttgaatgttgaatgtcaccgtatgcgtgaaattatatatttcggggtagtgtgagcttttaatgtttaagtcatattaaactcttaagtcaaattaagcagacccggcgttggcagtgtagccataactttctgatgttagtaaaaacaaaattggcgacttgaaattaaatcatgccaaggttttgatacacttgtcttaagatattaatgaaacacttcaaaacactgatgtgaagtgtccagattctcagatgtttgttgtgtggattttgtttagttgtgtgtttttttttttttttcagtgaatgtctggcacattgcaatcctcaaacatgtggttatctttgttgtattggcataatcagtgacttgtacattcagcaatagcatttgagcaagttttatcagcaagcaatattttcagttaataaggtttcaaaaatcatgtaaggatttaaacttgctgaatgtaaagattgaacctcaagtcactgtagctttagtaattgcttattgtattagtttagatgctagcactgcatgtgctgtgcatattctgattttattaaaataaaaagttgaactgcac

SEQ ID NO: 314404 - DNA, 5177 bp, Homo sapiens
  misc_feature (4965)..(4966): n is a, c, g, or t
  misc_feature (4976)..(4976): n is a, c, g, or t
  misc_feature (4991)..(4991): n is a, c, g, or t
  misc_feature (4994)..(4994): n is a, c, g, or t
  misc_feature (5002)..(5003): n is a, c, g, or t
  misc_feature (5005)..(5005): n is a, c, g, or t
  misc_feature (5019)..(5019): n is a, c, g, or t
  misc_feature (5068)..(5068): n is a, c, g, or t
ctttccccttactccgctcccctcttttccctccctctcctccccttccctctgttctctcctcctcttcccctcccctcccccgtccggggcactctatattcaagccaccgtttcctgcttcacaaaatggccaccgcacgcgacacctacggtcacgtggcctgccgccctctcagtttcgggaatctgcctagctcccactaaggggaggctacccgcggaagagcgagggcagattagaccggagaaatcccaccacatctccaagcccgggaactgagagaggaagaagagtgaaggccagtgttaggaaaaaaaaaaacaaaaacaaaaaaaacgaaaaacgaaagctgagtgcatagagttggaaaggggagcgaatgcgtaaggttggaaaggggggcgaagaggcctaggttaacattttcaggcgtcttagccggtggaaagcgggagacgcaagttctcgcgagatctcgagaactccgaggctgagactagggttttagcggagagcacgggaagtgtagctcgagagaactgggacagcatttcgcaccctaagctccaaggcaggactgctaggggcgacaggactaagtaggaaatcccttgagcttagacctgagggagcgcgcagtagccgggcagaagtcgccgcgacagggaattgcggtgtgagagggagggcacacgttgtacgtgctgacgtagccggctttccagcgggtatattagatccgtggccgcgcggtgcgctccagagccgcagttctcccgtgagagggccttcgcggtggaacaaacactcgcttagcagcggaagactccgagttctcggtactcttcagggatgagtcatgtggcagtggaaaatgcgctcgggctggaccagcagtttgctggcctagacctgaactcttcagataatcagagtggaggaagtacagccagcaaagggcgctatattcctcctcatttaaggaaccgagaagctactaaaggtttctacgataaagacagttcagggtggagttctagcaaagataaggatgcgtatagcagttttggatctcgtagtgattcaagagggaagtctagcttcttcagtgatcgtggaagtggatcaaggggaaggtttgatgatcgtggacggagtgattacgatggcattggcagccgtggtgacagaagtggctttggcaaatttgaacgtggtggaaacagtcgctggtgtgacaaatcagatgaagatgattggtcaaaaccactcccaccaagtgaacgcttggaacaggaactcttttctggaggcaacactgggattaattttgagaaatacgatgacattccagttgaggcaacaggcaacaactgtcctccacatattgaaagtttcagtgatgttgagatgggagaaattatcatgggaaacattgagcttactcgttatactcgcccaactccagtgcaaaagcatgctattcctattatcaaagagaaaagagacttgatggcttgtgcccaaacagggtctggaaaaactgcagcatttctgttgcccatcttgagtcagatttattcagatggtccaggcgaggctttgagggccatgaaggaaaatggaaggtatgggcgccgcaaacaatacccaatctccttggtattagcaccaacgagagagttggcagtacagatctacgaggaagccagaaaattttcataccgatctagagttcgtccttgcgtggtttatggtggtgccgatattggtcagcagattcgagacttggaacgtggatgccatttgttagtagccactccaggacgtctagtggatatgatggaaagaggaaagattggattagacttttgcaaatacttggtgttagatgaagctgatcggatgttggatatggggtttgagcctcagattcgtagaatagtcgaacaagatactatgcctccaaagggtgtccgccacactatgatgtttagtgctacttttcctaaggaaatacagatgctggctcgtgatttcttagatgaatatatcttcttggctgtaggaagagttggctctacctctgaaaacatcacacagaaagtagtttgggtggaagaatcagacaaacggtcatttctgcttgacctcctaaatgcaacaggcaaggattcactgaccttagtgtttgtggagaccaaaaagggtgcagattctctggaggatttcttataccatgaaggatacgcatgtaccagcatccatggagaccgttctcagagggatagagaagaggcccttcaccagttccgctcaggaaaaagcccaattttagtggctacagcagtagcagcaagaggactggacatttcaaatgtgaaacatgttatcaattttgacttgccaagtgatattgaagaatatgtacatcgtattggtcgtacgggacgtgtaggaaaccttggcctggcaacctcattctttaacgagaggaacataaatattactaaggatttgttggatcttcttgttgaagctaaacaagaagtgccgtcttggttagaaaacatggcttatgaacaccactacaagggtagcagtcgtggacgttctaagagtagcagatttagtggagggtttggtgccagagactaccgacaaagtagcggtgccagcagttccagcttcagcagcagccgcgcaagcagcagccgcagtggcggaggtggccacggtagcagcagaggatttggtggaggtggctatggaggcttttacaacagtgatggatatggaggaaattataactcccagggggttgactggtggggtaactgagcctgctttgcagtaggtcaccctgccaaacaagctaatatggaaaccacatgtaacttagccagactataccttgtgtagcttcaagaactcgcagtacattaccagctgtgattctccactgaaattttttttttaagggagctcaaggtcacaagaagaaatgaaaggaacaatcagcagccctgttcagaaggtggtttgaagacttcattgctgtagtttggattaactcccctcccgcctacccccatcccaaactgcatttataattttgtgactgaggatcatttgtttgttaatgtactgtgcctttaactttagacaactttttattttgatgtcctgttggctcagtaatgctcaagatatcaattgttttgacaaaataaatttactgaacttgggctaaaatcaaaccttggcacacaggtgtgatacaacttaacaggaatcatcgattcatccataaataatataaggaaaaacttatgcggtagcctgcattagggctttttgatacttgcagattgggggaaaacaacaaatgtcttgaagcatattaatggaattagtttctaatgtggcaaactgtattaagttaaagttctgatttgctcactctatcctggataggtatttagaacctgatagtctttaagccattccagtcatgatgaggtgatgtatgaatacatgcatacattcaaagcactgttttcaaagttaatgcaagtaaatacagcaattcctctttcaacgtttaggcagatcattaattatgagctagccaaatgtgggcatactattacagggaaagtttaaaggtctgataacttgaaataggtttttaggagaattcatctacttagactttttaaatgcctgccataaatgaaattgaaatggtagaatggctgaccacagcaatgaccagccctcattagggccctggatgatttttggtctaataacgcatgctagtgttgatgttttttggtcaagagggtatgaacaggaagaattaaatgcagcaggctttattttaaatgccgattcacattactctgttcaagctgcgttgagatgttaaactggcttactatagacttcgtaaaaatggctccagaagagtaacaaactgaaatctttgagatcacacaggttggaaatatgtacataactgcacaaggtgtcaattctgctctacagtgcagttttagtcagttttagttgcataggtttccattgtatttatagtctgtttatgctaaatctggccaaagatgagcattgtccaccactaaaatgcctctgccactttgaattctgtgctaattttgtggccagaatgcggtgatcaaaacgctccatctttttacagtggcataggaagacggcaaaaatttcctaaagtgcaatagattttcaagtgtattgtgccttgttctaaaacttttattaagtaggtgcacttgacagtattgaggtcatttgttatggtgctatttcaattagtctaggtttaggcccttgtacattttgcccataactttttacaaagtacttcttttattgcacattcagagaattttatatatatgtcttgtgtgcgtgtccttaaacttccaatcttactttgtctcttggagattgttgaacgcagcttgtctaggaaggggatgggactagattctaaaatttatttgggaccatgggaatgatagttgggaagaaaactatttgcacacgacagatttctagatactttttgctgctagttttatgtaatatttattgaacattttgacaaatatttatttttgtaagcctaaaagtgattctttgaaagtttaaagaaacttgaccaaaagacagtacaaaaacactggcacttgaatgttgaatgtcaccgtatgcgtgaaattatatatttcggggtagtgtgagcttttaatgtttaagtcatattaaactcttaagtcaaattaagcagacccggcgttggcagtgtagccataactttctgatgttagtaaaaacaaaattggcgacttgaaattaaatcatgccaaggttttgatacacttgtcttaagatattaatgaaacacttcttanntgtgtgtttntttttttttttttantgnatgtttgnncntttgcattcctctnccctgtcggtctctttgttgtttgggcctctccgtcgcttgcccttccntcgttcgcttctgtgccggtttttcgttctgccgtctttgtggctctcccggctccctctttggccggctctcccttgctcttgctccctttctccctctcgcgctgtc

SEQ ID NO: 314405 - DNA, 5111 bp, Homo sapiens
ctttccccttactccgctcccctcttttccctccctctcctccccttccctctgttctctcctcctcttcccctcccctcccccgtccggggcactctatattcaagccaccgtttcctgcttcacaaaatggccaccgcacgcgacacctacggtcacgtggcctgccgccctctcagtttcgggaatctgcctagctcccactaaggggaggctacccgcggaagagcgagggcagattagaccggagaaatcccaccacatctccaagcccgggaactgagagaggaagaagagtgaaggccagtgttaggaaaaaaaaaaacaaaaacaaaaaaaacgaaaaacgaaagctgagtgcatagagttggaaaggggagcgaatgcgtaaggttggaaaggggggcgaagaggcctaggttaacattttcaggcgtcttagccggtggaaagcgggagacgcaagttctcgcgagatctcgagaactccgaggctgagactagggttttagcggagagcacgggaagtgtagctcgagagaactgggacagcatttcgcaccctaagctccaaggcaggactgctaggggcgacaggactaagtaggaaatcccttgagcttagacctgagggagcgcgcagtagccgggcagaagtcgccgcgacagggaattgcggtgtgagagggagggcacacgttgtacgtgctgacgtagccggctttccagcgggtatattagatccgtggccgcgcggtgcgctccagagccgcagttctcccgtgagagggccttcgcggtggaacaaacactcgcttagcagcggaagactccgagttctcggtactcttcagggatgagtcatgtggcagtggaaaatgcgctcgggctggaccagcagtttgctggcctagacctgaactcttcagataatcagagtggaggaagtacagccagcaaagggcgctatattcctcctcatttaaggaaccgagaagctactaaaggtttctacgataaagacagttcagggtggagttctagcaaagataaggatgcgtatagcagttttggatctcgtagtgattcaagagggaagtctagcttcttcagtgatcgtggaagtggatcaaggggaaggtttgatgatcgtggacggagtgattacgatggcattggcagccgtggtgacagaagtggctttggcaaatttgaacgtggtggaaacagtcgctggtgtgacaaatcagatgaagatgattggtcaaaaccactcccaccaagtgaacgcttggaacaggaactcttttctggaggcaacactgggattaattttgagaaatacgatgacattccagttgaggcaacaggcaacaactgtcctccacatattgaaagtttcagtgatgttgagatgggagaaattatcatgggaaacattgagcttactcgttatactcgcccaactccagtgcaaaagcatgctattcctattatcaaagagaaaagagacttgatggcttgtgcccaaacagggtctggaaaaactgcagcatttctgttgcccatcttgagtcagatttattcagatggtccaggcgaggctttgagggccatgaaggaaaatggaaggtatgggcgccgcaaacaatacccaatctccttggtattagcaccaacgagagagttggcagtacagatctacgaggaagccagaaaattttcataccgatctagagttcgtccttgcgtggtttatggtggtgccgatattggtcagcagattcgagacttggaacgtggatgccatttgttagtagccactccaggacgtctagtggatatgatggaaagaggaaagattggattagacttttgcaaatacttggtgttagatgaagctgatcggatgttggatatggggtttgagcctcagattcgtagaatagtcgaacaagatactatgcctccaaagggtgtccgccacactatgatgtttagtgctacttttcctaaggaaatacagatgctggctcgtgatttcttagatgaatatatcttcttggctgtaggaagagttggctctacctctgaaaacatcacacagaaagtagtttgggtggaagaatcagacaaacggtcatttctgcttgacctcctaaatgcaacaggcaaggattcactgaccttagtgtttgtggagaccaaaaagggtgcagattctctggaggatttcttataccatgaaggatacgcatgtaccagcatccatggagaccgttctcagagggatagagaagaggcccttcaccagttccgctcaggaaaaagcccaattttagtggctacagcagtagcagcaagaggactggacatttcaaatgtgaaacatgttatcaattttgacttgccaagtgatattgaagaatatgtacatcgtattggtcgtacgggacgtgtaggaaaccttggcctggcaacctcattctttaacgagaggaacataaatattactaaggatttgttggatcttcttgttgaagctaaacaagaagtgccgtcttggttagaaaacatggcttatgaacaccactacaagggtagcagtcgtggacgttctaagagtagcagatttagtggagggtttggtgccagagactaccgacaaagtagcggtgccagcagttccagcttcagcagcagccgcgcaagcagcagccgcagtggcggaggtggccacggtagcagcagaggatttggtggagggagctcaaggtcacaagaagaaatgaaaggaacaatcagcagccctgttcagaaggtggtttgaagacttcattgctgtagtttggattaactcccctcccgcctacccccatcccaaactgcatttataattttgtgactgaggatcatttgtttgttaatgtactgtgcctttaactttagacaactttttattttgatgtcctgttggctcagtaatgctcaagatatcaattgttttgacaaaataaatttactgaacttgggctaaaatcaaaccttggcacacaggtgtgatacaacttaacaggaatcatcgattcatccataaataatataaggaaaaacttatgcggtagcctgcattagggctttttgatacttgcagattgggggaaaacaacaaatgtcttgaagcatattaatggaattagtttctaatgtggcaaactgtattaagttaaagttctgatttgctcactctatcctggataggtatttagaacctgatagtctttaagccattccagtcatgatgaggtgatgtatgaatacatgcatacattcaaagcactgttttcaaagttaatgcaagtaaatacagcaattcctctttcaacgtttaggcagatcattaattatgagctagccaaatgtgggcatactattacagggaaagtttaaaggtctgataacttgaaataggtttttaggagaattcatctacttagactttttaaatgcctgccataaatgaaattgaaatggtagaatggctgaccacagcaatgaccagccctcattagggccctggatgatttttggtctaataacgcatgctagtgttgatgttttttggtcaagagggtatgaacaggaagaattaaatgcagcaggctttattttaaatgccgattcacattactctgttcaagctgcgttgagatgttaaactggcttactatagacttcgtaaaaatggctccagaagagtaacaaactgaaatctttgagatcacacaggttggaaatatgtacataactgcacaaggtgtcaattctgctctacagtgcagttttagtcagttttagttgcataggtttccattgtatttatagtctgtttatgctaaatctggccaaagatgagcattgtccaccactaaaatgcctctgccactttgaattctgtgctaattttgtggccagaatgcggtgatcaaaacgctccatctttttacagtggcataggaagacggcaaaaatttcctaaagtgcaatagattttcaagtgtattgtgccttgttctaaaacttttattaagtaggtgcacttgacagtattgaggtcatttgttatggtgctatttcaattagtctaggtttaggcccttgtacattttgcccataactttttacaaagtacttcttttattgcacattcagagaattttatatatatgtcttgtgtgcgtgtccttaaacttccaatcttactttgtctcttggagattgttgaacgcagcttgtctaggaaggggatgggactagattctaaaatttatttgggaccatgggaatgatagttgggaagaaaactatttgcacacgacagatttctagatactttttgctgctagttttatgtaatatttattgaacattttgacaaatatttatttttgtaagcctaaaagtgattctttgaaagtttaaagaaacttgaccaaaagacagtacaaaaacactggcacttgaatgttgaatgtcaccgtatgcgtgaaattatatatttcggggtagtgtgagcttttaatgtttaagtcatattaaactcttaagtcaaattaagcagacccggcgttggcagtgtagccataactttctgatgttagtaaaaacaaaattggcgacttgaaattaaatcatgccaaggttttgatacacttgtcttaagatattaatgaaacacttcaaaacactgatgtgaagtgtccagattctcagatgtttgttgtgtggattttgtttagttgtgtgtttttttttttttttcagtgaatgtctggcacattgcaatcctcaaacatgtggttatctttgttgtattggcataatcagtgacttgtacattcagcaatagcatttgagcaagttttatcagcaagcaatattttcagttaataaggtttcaaaaatcatgtaaggatttaaacttgctgaatgtaaagattgaacctcaagtcactgtagctttagtaattgcttattgtattagtttagatgctagcactgcatgtgctgtgcatattctgattttattaaaataaaaagttgaactgcac

SEQ ID NO: 314406 - DNA, 5057 bp, Homo sapiens
ctttccccttactccgctcccctcttttccctccctctcctccccttccctctgttctctcctcctcttcccctcccctcccccgtccggggcactctatattcaagccaccgtttcctgcttcacaaaatggccaccgcacgcgacacctacggtcacgtggcctgccgccctctcagtttcgggaatctgcctagctcccactaaggggaggctacccgcggaagagcgagggcagattagaccggagaaatcccaccacatctccaagcccgggaactgagagaggaagaagagtgaaggccagtgttaggaaaaaaaaaaacaaaaacaaaaaaaacgaaaaacgaaagctgagtgcatagagttggaaaggggagcgaatgcgtaaggttggaaaggggggcgaagaggcctaggttaacattttcaggcgtcttagccggtggaaagcgggagacgcaagttctcgcgagatctcgagaactccgaggctgagactagggttttagcggagagcacgggaagtgtagctcgagagaactgggacagcatttcgcaccctaagctccaaggcaggactgctaggggcgacaggactaagtaggaaatcccttgagcttagacctgagggagcgcgcagtagccgggcagaagtcgccgcgacagggaattgcggtgtgagagggagggcacacgttgtacgtgctgacgtagccggctttccagcgggtatattagatccgtggccgcgcggtgcgctccagagccgcagttctcccgtgagagggccttcgcggtggaacaaacactcgcttagcagcggaagactccgagttctcggtactcttcagggatgagtcatgtggcagtggaaaatgcgctcgggctggaccagcagtttgctggcctagacctgaactcttcagataatcagagtggaggaagtacagccagcaaagggcgctatattcctcctcatttaaggaaccgagaagctactaaaggtttctacgataaagacagttcagggtggagttctagcaaagataaggatgcgtatagcagttttggatctcgtagtgattcaagagggaagtctagcttcttcagtgatcgtggaagtggatcaaggggaaggtttgatgatcgtggacggagtgattacgatggcattggcagccgtggtgacagaagtggctttggcaaatttgaacgtggtggaaacagtcgctggtgtgacaaatcagatgaagatgattggtcaaaaccactcccaccaagtgaacgcttggaacaggaactcttttctggaggcaacactgggattaattttgagaaatacgatgacattccagttgaggcaacaggcaacaactgtcctccacatattgaaagtttcagtgatgttgagatgggagaaattatcatgggaaacattgagcttactcgttatactcgcccaactccagtgcaaaagcatgctattcctattatcaaagagaaaagagacttgatggcttgtgcccaaacagggtctggaaaaactgcagcatttctgttgcccatcttgagtcagatttattcagatggtccaggcgaggctttgagggccatgaaggaaaatggaaggtatgggcgccgcaaacaatacccaatctccttggtattagcaccaacgagagagttggcagtacagatctacgaggaagccagaaaattttcataccgatctagagttcgtccttgcgtggtttatggtggtgccgatattggtcagcagattcgagacttggaacgtggatgccatttgttagtagccactccaggacgtctagtggatatgatggaaagaggaaagattggattagacttttgcaaatacttggtgttagatgaagctgatcggatgttggatatggggtttgagcctcagattcgtagaatagtcgaacaagatactatgcctccaaagggtgtccgccacactatgatgtttagtgctacttttcctaaggaaatacagatgctggctcgtgatttcttagatgaatatatcttcttggctgtaggaagagttggctctacctctgaaaacatcacacagaaagtagtttgggtggaagaatcagacaaacggtcatttctgcttgacctcctaaatgcaacaggcaaggattcactgaccttagtgtttgtggagaccaaaaagggtgcagattctctggaggatttcttataccatgaaggatacgcatgtaccagcatccatggagaccgttctcagagggatagagaagaggcccttcaccagttccgctcaggaaaaagcccaattttagtggctacagcagtagcagcaagaggactggacatttcaaatgtgaaacatgttatcaattttgacttgccaagtgatattgaagaatatgtacatcgtattggtcgtacgggacgtgtaggaaaccttggcctggcaacctcattctttaacgagaggaacataaatattactaaggatttgttggatcttcttgttgaagctaaacaagaagtgccgtcttggttagatagcagatttagtggagggtttggtgccagagactaccgacaaagtagcggtgccagcagttccagcttcagcagcagccgcgcaagcagcagccgcagtggcggaggtggccacggtagcagcagaggatttggtggagggagctcaaggtcacaagaagaaatgaaaggaacaatcagcagccctgttcagaaggtggtttgaagacttcattgctgtagtttggattaactcccctcccgcctacccccatcccaaactgcatttataattttgtgactgaggatcatttgtttgttaatgtactgtgcctttaactttagacaactttttattttgatgtcctgttggctcagtaatgctcaagatatcaattgttttgacaaaataaatttactgaacttgggctaaaatcaaaccttggcacacaggtgtgatacaacttaacaggaatcatcgattcatccataaataatataaggaaaaacttatgcggtagcctgcattagggctttttgatacttgcagattgggggaaaacaacaaatgtcttgaagcatattaatggaattagtttctaatgtggcaaactgtattaagttaaagttctgatttgctcactctatcctggataggtatttagaacctgatagtctttaagccattccagtcatgatgaggtgatgtatgaatacatgcatacattcaaagcactgttttcaaagttaatgcaagtaaatacagcaattcctctttcaacgtttaggcagatcattaattatgagctagccaaatgtgggcatactattacagggaaagtttaaaggtctgataacttgaaataggtttttaggagaattcatctacttagactttttaaatgcctgccataaatgaaattgaaatggtagaatggctgaccacagcaatgaccagccctcattagggccctggatgatttttggtctaataacgcatgctagtgttgatgttttttggtcaagagggtatgaacaggaagaattaaatgcagcaggctttattttaaatgccgattcacattactctgttcaagctgcgttgagatgttaaactggcttactatagacttcgtaaaaatggctccagaagagtaacaaactgaaatctttgagatcacacaggttggaaatatgtacataactgcacaaggtgtcaattctgctctacagtgcagttttagtcagttttagttgcataggtttccattgtatttatagtctgtttatgctaaatctggccaaagatgagcattgtccaccactaaaatgcctctgccactttgaattctgtgctaattttgtggccagaatgcggtgatcaaaacgctccatctttttacagtggcataggaagacggcaaaaatttcctaaagtgcaatagattttcaagtgtattgtgccttgttctaaaacttttattaagtaggtgcacttgacagtattgaggtcatttgttatggtgctatttcaattagtctaggtttaggcccttgtacattttgcccataactttttacaaagtacttcttttattgcacattcagagaattttatatatatgtcttgtgtgcgtgtccttaaacttccaatcttactttgtctcttggagattgttgaacgcagcttgtctaggaaggggatgggactagattctaaaatttatttgggaccatgggaatgatagttgggaagaaaactatttgcacacgacagatttctagatactttttgctgctagttttatgtaatatttattgaacattttgacaaatatttatttttgtaagcctaaaagtgattctttgaaagtttaaagaaacttgaccaaaagacagtacaaaaacactggcacttgaatgttgaatgtcaccgtatgcgtgaaattatatatttcggggtagtgtgagcttttaatgtttaagtcatattaaactcttaagtcaaattaagcagacccggcgttggcagtgtagccataactttctgatgttagtaaaaacaaaattggcgacttgaaattaaatcatgccaaggttttgatacacttgtcttaagatattaatgaaacacttcaaaacactgatgtgaagtgtccagattctcagatgtttgttgtgtggattttgtttagttgtgtgtttttttttttttttcagtgaatgtctggcacattgcaatcctcaaacatgtggttatctttgttgtattggcataatcagtgacttgtacattcagcaatagcatttgagcaagttttatcagcaagcaatattttcagttaataaggtttcaaaaatcatgtaaggatttaaacttgctgaatgtaaagattgaacctcaagtcactgtagctttagtaattgcttattgtattagtttagatgctagcactgcatgtgctgtgcatattctgattttattaaaataaaaagttgaactgcac

SEQ ID NO: 314407 - DNA, 859 bp, Homo sapiens
gcacgagcaacaatctccaagagacaaagtaagattggaagtttaaggacacgcacacaagacatattctaaaatttatttgggaccatgggaatgatagttgggaagaaaactatttgcacacgacagatttctagatactttttgctgctagttttatgtaatatttattgaacattttgacaaatatttatttttgtaagcctaaaagtgattctttgaaagtttaaagaaacttgaccaaaagacagtacaaaaacactggcacttgaatgttgaatgtcaccgtatgcgtgaaattatatatttcggggtagtgtgagcttttaatgtttaagtcatattaaactcttaagtcaaattaagcagacccggcgttggcagtgtagccataactttctgatgttagtaaaaacaaaattggcgacttgaaattaaatcatgccaaggttttgatacacttgtcttaagatattaatgaaacacttcaaaacactgatgtgaagtgtccagattctcagatgtttgttgtgtggattttgtttagttgtgtgtttttttttttttttcagtgaatgtctggcacattgcaatcctcaaacatgtggttatctttgttgtattggcataatcagtgacttgtacattcagcaatagcatttgagcaagttttatcagcaagcaatattttcagttaataaggtttcaaaaatcatgtaaggatttaaacttgctgaatgtaaagattgaacctcaagtcactgtagctttagtaattgcttattgtattagtttagatgctagcactgcatgtgctgtgcatattctgattttattaaaataaaaagttgaactgcac

SEQ ID NO: 314408 - DNA, 2342 bp, Homo sapiens
ctttccccttactccgctcccctcttttccctccctctcctccccttccctctgttctctcctcctcttcccctcccctcccccgtccggggcactctatattcaagccaccgtttcctgcttcacaaaatggccaccgcacgcgacacctacggtcacgtggcctgccgccctctcagtttcgggaatctgcctagctcccactaaggggaggctacccgcggaagagcgagggcagattagaccggagaaatcccaccacatctccaagcccgggaactgagagaggaagaagagtgaaggccagtgttaggaaaaaaaaaaacaaaaacaaaaaaaacgaaaaacgaaagctgagtgcatagagttggaaaggggagcgaatgcgtaaggttggaaaggggggcgaagaggcctaggttaacattttcaggcgtcttagccggtggaaagcgggagacgcaagttctcgcgagatctcgagaactccgaggctgagactagggttttagcggagagcacgggaagtgtagctcgagagaactgggacagcatttcgcaccctaagctccaaggcaggactgctaggggcgacaggactaagtaggaaatcccttgagcttagacctgagggagcgcgcagtagccgggcagaagtcgccgcgacagggaattgcggtgtgagagggagggcacacgttgtacgtgctgacgtagccggctttccagcgggtatattagatccgtggccgcgcggtgcgctccagagccgcagttctcccgtgagagggccttcgcggtggaacaaacactcgcttagcagcggaagactccgagttctcggtactcttcagggatgagtcatgtggcagtggaaaatgcgctcgggctggaccagcagtttgctggcctagacctgaactcttcagataatcagagtggaggaagtacagccagcaaagggcgctatattcctcctcatttaaggaaccgagaagctactaaaggtttctacgataaagacagttcagggtggagttctagcaaagataaggatgcgtatagcagttttggatctcgtagtgattcaagagggaagtctagcttcttcagtgatcgtggaagtggatcaaggggaaggtttgatgatcgtggacggagtgattacgatggcattggcagccgtggtgacagaagtggctttggcaaatttgaacgtggtggaaacagtcgctggtgtgacaaatcagatgaagatgattggtcaaaaccactcccaccaagtgaacgcttggaacaggaactcttttctggaggcaacactgggattaattttgagaaatacgatgacattccagttgaggcaacaggcaacaactgtcctccacatattgaaagtttcagtgatgttgagatgggagaaattatcatgggaaacattgagcttactcgttatactcgcccaactccagtgcaaaagcatgctattcctattatcaaagagaaaagagacttgatggcttgtgcccaaacagggtctggaaaaactgcagcatttctgttgcccatcttgagtcagatttattcagatggtccaggcgaggctttgagggccatgaaggaaaatggaaggtatgggcgccgcaaacaatacccaatctccttggtattagcaccaacgagagagttggcagtacagatctacgaggaagccagaaaattttcataccgatctagagttcgtccttgcgtggtttatggtggtgccgatattggtcagcagattcgagacttggaacgtggatgccatttgttagtagccactccaggacgtctagtggatatgatggaaagaggaaagattggattagacttttgcaaatacttggtgttagatgaagctgatcggatgttggatatggggtttgagcctcagattcgtagaatagtcgaacaagatactatgcctccaaagggtgtccgccacactatgatgtttagtgctacttttcctaaggaaatacagctggttgcgaattttaaaaggaaattttttttggtgtttgaaaagtggcctacccttgaaacatccacccaaggtttttgggggaaatctacaaccggcattttgttacccttaaaggcagggagggttctgcccttagtttggggaccaaaggggtccattttggggagttttcccgaggggcctggtgcccatttgggaacattttaagggtaaaaaagcctcactttcttgagaaaccctttttgggcccggtttcggtgtgtttaagggagttatattcttcccgggtttgttcctcttgtgcccggggcgg

SEQ ID NO: 314409 - DNA, 401 bp, Homo sapiens
gctgggattacagacgtgggccaccacgcctggctaatattgtatatgtagtagagacggggtttctccatgttggtcaggctagtctcgaactcctgacctcaggtgacctgcccgccttggcctcccaaagtgctgggattacaggcgtgagccaccatgcctggccagtggacagtattttctagtggggagaattaaagaaaaactttgtccgggtgtaaaccagctttaaatcttggttctcttacagtgccatggtagggatagtcagtggaggctttcaaattcagaaagattgataataccttaacatggttcctatttctaattaataataaaatgtatttgtgcttttttaatcaaaggtttctacgataaagacagttcagggtggagtt

SEQ ID NO: 314410 - DNA, 378 bp, Homo sapiens
cctagacctgaactcttcagataatcagagtggaggaagtacagccagcagtaagtacaacatcttgtgggtttattgaatattagagcttaacatcttaagatttcattgggcttatgtaaaatttaagaaatttgcctttcaattttttactgcttaaagaattatgtagtctttgtgttatagaattatgtagtacttagtgatcaatctaaagcatcgttgccttttttttttttttttggttgagatggagctttgctcttgttgcccaggttggagtgcaatggtgtgatctcggctcaccgcagtctctgcctccgggttcaagcgattctcctgcctcagcctcccgaatagctgtgcctttctgataat

SEQ ID NO: 314411 - DNA, 3262 bp, Homo sapiens
ctttccccttactccgctcccctcttttccctccctctcctccccttccctctgttctctcctcctcttcccctcccctcccccgtccggggcactctatattcaagccaccgtttcctgcttcacaaaatggccaccgcacgcgacacctacggtcacgtggcctgccgccctctcagtttcgggaatctgcctagctcccactaaggggaggctacccgcggaagagcgagggcagattagaccggagaaatcccaccacatctccaagcccgggaactgagagaggaagaagagtgaaggccagtgttaggaaaaaaaaaaacaaaaacaaaaaaaacgaaaaacgaaagctgagtgcatagagttggaaaggggagcgaatgcgtaaggttggaaaggggggcgaagaggcctaggttaacattttcaggcgtcttagccggtggaaagcgggagacgcaagttctcgcgagatctcgagaactccgaggctgagactagggttttagcggagagcacgggaagtgtagctcgagagaactgggacagcatttcgcaccctaagctccaaggcaggactgctaggggcgacaggactaagtaggaaatcccttgagcttagacctgagggagcgcgcagtagccgggcagaagtcgccgcgacagggaattgcggtgtgagagggagggcacacgttgtacgtgctgacgtagccggctttccagcgggtatattagatccgtggccgcgcggtgcgctccagagccgcagttctcccgtgagagggccttcgcggtggaacaaacactcgcttagcagcggaagactccgagttctcggtactcttcagggatgagtcatgtggcagtggaaaatgcgctcgggctggaccagcagtttgctggcctagacctgaactcttcagataatcagagtggaggaagtacagccagcaaagggcgctatattcctcctcatttaaggaaccgagaagctactaaaggtttctacgataaagacagttcagggtggagttctagcaaagataaggatgcgtatagcagttttggatctcgtagtgattcaagagggaagtctagcttcttcagtgatcgtggaagtggatcaaggggaaggtttgatgatcgtggacggagtgattacgatggcattggcagccgtggtgacagaagtggctttggcaaatttgaacgtggtggaaacagtcgctggtgtgacaaatcagatgaagatgattggtcaaaaccactcccaccaagtgaacgcttggaacaggaactcttttctggaggcaacactgggattaattttgagaaatacgatgacattccagttgaggcaacaggcaacaactgtcctccacatattgaaagtttcagtgatgttgagatgggagaaattatcatgggaaacattgagcttactcgttatactcgcccaactccagtgcaaaagcatgctattcctattatcaaagagaaaagagacttgatggcttgtgcccaaacagggtctggaaaaactgcagcatttctgttgcccatcttgagtcagatttattcagatggtccaggcgaggctttgagggccatgaaggaaaatggaaggtatgggcgccgcaaacaatacccaatctccttggtattagcaccaacgagagagttggcagtacagatctacgaggaagccagaaaattttcataccgatctagagttcgtccttgcgtggtttatggtggtgccgatattggtcagcagattcgagacttggaacgtggatgccatttgttagtagccactccaggacgtctagtggatatgatggaaagaggaaagattggattagacttttgcaaatacttggtgttagatgaagctgatcggatgttggatatggggtttgagcctcagattcgtagaatagtcgaacaagatactatgcctccaaagggtgtccgccacactatgatgtttagtgctacttttcctaaggaaatacagatgctggctcgtgatttcttagatgaatatatcttcttggctgtaggaagagttggctctacctctgaaaacatcacacagaaagtagtttgggtggaagaatcagacaaacggtcatttctgcttgacctcctaaatgcaacaggcaaggattcactgaccttagtgtttgtggagaccaaaaagggtgcagattctctggaggatttcttataccatgaaggatacgcatgtaccagcatccatggagaccgttctcagagggatagagaagaggcccttcaccagttccgctcaggaaaaagcccaattttagtggctacagcagtagcagcaagaggactggacatttcaaatgtgaaacatgttatcaattttgacttgccaagtgatattgaagaatatgtacatcgtattggtcgtacgggacgtgtaggaaaccttggcctggcaacctcattctttaacgagaggaacataaatattactaaggatttgttggatcttcttgttgaagctaaacaagaagtgccgtcttggttagaaaacatggcttatgaacaccactacaagggtagcagtcgtggacgttctaagagtagcagatttagtggagggtttggtgccagagactaccgacaaagtagcggtgccagcagttccagcttcagcagcagccgcgcaagcagcagccgcagtggcggaggtggccacggtagcagcagaggatttggtggaggtggctatggaggcttttacaacagtgatggatatggaggaaattataactcccagggggttgactggtggggtaactgagcctgctttgcagtaggtcaccctgccaaacaagctaatatggaaaccacatgtaacttagccagactataccttgtgtagcttcaagaactcgcagtacattaccagctgtgattctccactgaaattttttttttaagggagctcaaggtcacaagaagaaatgaaaggaacaatcagcagccctgttcagaaggtggtttgaagacttcattgctgtagtttggattaactcccctcccgcctacccccatcccaaactgcatttataattttgtgactgaggatcatttgtttgttaatgtactgtgcctttaactttagacaactttttattttgatgtcctgttggctcagtaatgctcaagatatcaattgttttgacaaaataaatttactgaacttgggctaaaatca

SEQ ID NO: 314412 - DNA, 5804 bp, Homo sapiens
ctttccccttactccgctcccctcttttccctccctctcctccccttccctctgttctctcctcctcttcccctcccctcccccgtccggggcactctatattcaagccaccgtttcctgcttcacaaaatggccaccgcacgcgacacctacggtcacgtggcctgccgccctctcagtttcgggaatctgcctagctcccactaaggggaggctacccgcggaagagcgagggcagattagaccggagaaatcccaccacatctccaagcccgggaactgagagaggaagaagagtgaaggccagtgttaggaaaaaaaaaaacaaaaacaaaaaaaacgaaaaacgaaagctgagtgcatagagttggaaaggggagcgaatgcgtaaggttggaaaggggggcgaagaggcctaggttaacattttcaggcgtcttagccggtggaaagcgggagacgcaagttctcgcgagatctcgagaactccgaggctgagactagggttttagcggagagcacgggaagtgtagctcgagagaactgggacagcatttcgcaccctaagctccaaggcaggactgctaggggcgacaggactaagtaggaaatcccttgagcttagacctgagggagcgcgcagtagccgggcagaagtcgccgcgacagggaattgcggtgtgagagggagggcacacgttgtacgtgctgacgtagccggctttccagcgggtatattagatccgtggccgcgcggtgcgctccagagccgcagttctcccgtgagagggccttcgcggtggaacaaacactcgcttagcagcggaagactccgagttctcggtactcttcagggatgagtcatgtggcagtggaaaatgcgctcgggctggaccagcagtttgctggcctagacctgaactcttcagataatcagagtggaggaagtacagccagcaaagggcgctatattcctcctcatttaaggaaccgagaagctactaaaggtttctacgataaagacagttcagggtggagttctagcaaagataaggatgcgtatagcagttttggatctcgtagtgattcaagagggaagtctagcttcttcagtgatcgtggaagtggatcaaggggaaggtttgatgatcgtggacggagtgattacgatggcattggcagccgtggtgacagaagtggctttggcaaatttgaacgtggtggaaacagtcgctggtgtgacaaatcagatgaagatgattggtcaaaaccactcccaccaagtgaacgcttggaacaggaactcttttctggaggcaacactgggattaattttgagaaatacgatgacattccagttgaggcaacaggcaacaactgtcctccacatattgaaagtttcagtgatgttgagatgggagaaattatcatgggaaacattgagcttactcgttatactcgcccaactccagtgcaaaagcatgctattcctattatcaaagagaaaagagacttgatggcttgtgcccaaacagggtctggaaaaactgcagcatttctgttgcccatcttgagtcagatttattcagatggtccaggcgaggctttgagggccatgaaggaaaatggaaggtatgggcgccgcaaacaatacccaatctccttggtattagcaccaacgagagagttggcagtacagatctacgaggaagccagaaaattttcataccgatctagagttcgtccttgcgtggtttatggtggtgccgatattggtcagcagattcgagacttggaacgtggatgccatttgttagtagccactccaggacgtctagtggatatgatggaaagaggaaagattggattagacttttgcaaatacttggtgttagatgaagctgatcggatgttggatatggggtttgagcctcagattcgtagaatagtcgaacaagatactatgcctccaaagggtgtccgccacactatgatgtttagtgctacttttcctaaggaaatacagatgctggctcgtgatttcttagatgaatatatcttcttggctgtaggaagagttggctctacctctgaaaacatcacacagaaagtagtttgggtggaagaatcagacaaacggtcatttctgcttgacctcctaaatgcaacaggcaaggattcactgaccttagtgtttgtggagaccaaaaagggtgcagattctctggaggatttcttataccatgaaggatacgcatgtaccagcatccatggagaccgttctcagagggatagagaagaggcccttcaccagttccgctcaggaaaaagcccaattttagtggctacagcagtagcagcaagaggactggacatttcaaatgtgaaacatgttatcaattttgacttgccaagtgatattgaagaatatgtacatcgtattggtcgtacgggacgtgtaggaaaccttggcctggcaacctcattctttaacgagaggaacataaatattactaaggatttgttggatcttcttgttgaagctaaacaagaagtgccgtcttggttagaaaacatggcttatgaacaccactacaagggtagcagtcgtggacgttctaagagtagcagatttagtggagggtttggtgccagagactaccgacaaagtagcggtgccagcagttccagcttcagcagcagccgcgcaagcagcagccgcagtggcggaggtggccacggtagcagcagaggatttggtggaggtggctatggaggcttttacaacagtgatggatatggaggaaattataactcccagggggttgactggtggggtaactgagcctgctttgcagtaggtcaccctgccaaacaagctaatatggaaaccacatgtaacttagccagactataccttgtgtagcttcaagaactcgcagtacattaccagctgtgattctccactgaaattttttttttaagggagctcaaggtcacaagaagaaatgaaaggaacaatcagcagccctgttcagaaggtggtttgaagacttcattgctgtagtttggattaactcccctcccgcctacccccatcccaaactgcatttataattttgtgactgaggatcatttgtttgttaatgtactgtgcctttaactttagacaactttttattttgatgtcctgttggctcagtaatgctcaagatatcaattgttttgacaaaataaatttactgaacttgggctaaaatcaaaccttggcacacaggtgtgatacaacttaacaggaatcatcgattcatccataaataatataaggaaaaacttatgcggtagcctgcattagggctttttgatacttgcagattgggggaaaacaacaaatgtcttgaagcatattaatggaattagtttctaatgtggcaaactgtattaagttaaagttctgatttgctcactctatcctggataggtatttagaacctgatagtctttaagccattccagtcatgatgaggtgatgtatgaatacatgcatacattcaaagcactgttttcaaagttaatgcaagtaaatacagcaattcctctttcaacgtttaggcagatcattaattatgagctagccaaatgtgggcatactattacagggaaagtttaaaggtctgataacttgaaataggtttttaggagaattcatctacttagactttttaaatgcctgccataaatgaaattgaaatggtagaatggctgaccacagcaatgaccagccctcattagggccctggatgatttttggtctaataacgcatgctagtgttgatgttttttggtcaagagggtatgaacaggaagaattaaatgcagcaggctttattttaaatgccgattcacattactctgttcaagctgcgttgagatgttaaactggcttactatagacttcgtaaaaatggctccagaagagtaacaaactgaaatctttgagatcacacaggttggaaatatgtacataactgcacaaggtgtcaattctgctctacagtgcagttttagtcagttttagttgcataggtttccattgtatttatagtctgtttatgctaaatctggccaaagatgagcattgtccaccactaaaatgcctctgccactttgaattctgtgctaattttgtggccagaatgcggtgatcaaaacgctccatctttttacagtggcataggaagacggcaaaaatttcctaaagtgcaatagattttcaagtgtattgtgccttgttctaaaacttttattaagtaggtgcacttgacagtattgaggtcatttgttatggtgctatttcaattagtctaggtttaggcccttgtacattttgcccataactttttacaaagtacttcttttattgcacattcagagaattttatatatatgtcttgtgtgcgtgtccttaaacttccaatcttactttgtctcttggagattgttgaacgcagcttgtctaggaaggggatgggactagattctaaaatttatttgggaccatgggaatgatagttgggaagaaaactatttgcacacgacagatttctagatactttttgctgctagttttatgtaatatttattgaacattttgacaaatatttatttttgtaagcctaaaagtgattctttgaaagtttaaagaaacttgaccaaaagacagtacaaaaacactggcacttgaatgttgaatgtcaccgtatgcgtgaaattatatatttcggggtagtgtgagcttttaatgtttaagtcatattaaactcttaagtcaaattaagcagacccggcgttggcagtgtagccataactttctgatgttagtaaaaacaaaattggcgacttgaaattaaatcatgccaaggttttgatacacttgtcttaagatattaatgaaacacttcaaaacactgatgtgaagtgtccagattctcagatgtttgttgtgtggattttgtttagttgtgtgtttttttttttttttcagtgaatgtctggcacattgcaatcctcaaacatgtggttatctttgttgtattggcataatcagtgacttgtacattcagcaatagcatttgagcaagttttatcagcaagcaatattttcagttaataaggtttcaaaaatcatgtaaggatttaaacttgctgaatgtaaagattgaacctcaagtcactgtagctttagtaattgcttattgtattagtttagatgctagcactgcatgtgctgtgcatattctgattttattaaaataaaaagttgaactgcacaaaaaaaaaaaaaaaaaaaaaaaaaagggggggggggtaaaaaattattccctgggggggcccattttcgtgatccccacggcttttctgttgttaccaagggggcgcccctaatgaggggagaggccggatattaataaacgagcaaaaggcgcagggcgccggcggtgaaaacagccgcgtcgcgggcgggcggggaacacagccgctaccgtggggcacatcttgtggtgggagagggcaaccccttcaccttgcggggcggggggcgcccatactcgcgtgggcgaccaacaactaccccttgacggaaaatatttaataacgacccaagggcgaatatcacaaccttttcaagccggctttcttggtggttctactccgaagcgccgacattagtctggccgtatgaaaaaattggccgtccgggacattattctcttgaatacctttatgcgcggggtataaaaaga

SEQ ID NO: 314413 - DNA, 5277 bp, Homo sapiens
ctttccccttactccgctcccctcttttccctccctctcctccccttccctctgttctctcctcctcttcccctcccctcccccgtccggggcactctatattcaagccaccgtttcctgcttcacaaaatggccaccgcacgcgacacctacggtcacgtggcctgccgccctctcagtttcgggaatctgcctagctcccactaaggggaggctacccgcggaagagcgagggcagattagaccggagaaatcccaccacatctccaagcccgggaactgagagaggaagaagagtgaaggccagtgttaggaaaaaaaaaaacaaaaacaaaaaaaacgaaaaacgaaagctgagtgcatagagttggaaaggggagcgaatgcgtaaggttggaaaggggggcgaagaggcctaggttaacattttcaggcgtcttagccggtggaaagcgggagacgcaagttctcgcgagatctcgagaactccgaggctgagactagggttttagcggagagcacgggaagtgtagctcgagagaactgggacagcatttcgcaccctaagctccaaggcaggactgctaggggcgacaggactaagtaggaaatcccttgagcttagacctgagggagcgcgcagtagccgggcagaagtcgccgcgacagggaattgcggtgtgagagggagggcacacgttgtacgtgctgacgtagccggctttccagcgggtatattagatccgtggccgcgcggtgcgctccagagccgcagttctcccgtgagagggccttcgcggtggaacaaacactcgcttagcagcggaagactccgagttctcggtactcttcagggatgagtcatgtggcagtggaaaatgcgctcgggctggaccagcagtttgctggcctagacctgaactcttcagataatcagagtggaggaagtacagccagcaaagggcgctatattcctcctcatttaaggaaccgagaagctactaaaggtttctacgataaagacagttcagggtggagttctagcaaagataaggatgcgtatagcagttttggatctcgtagtgattcaagagggaagtctagcttcttcagtgatcgtggaagtggatcaaggggaaggtttgatgatcgtggacggagtgattacgatggcattggcagccgtggtgacagaagtggctttggcaaatttgaacgtggtggaaacagtcgctggtgtgacaaatcagatgaagatgattggtcaaaaccactcccaccaagtgaacgcttggaacaggaactcttttctggaggcaacactgggattaattttgagaaatacgatgacattccagttgaggcaacaggcaacaactgtcctccacatattgaaagtttcagtgatgttgagatgggagaaattatcatgggaaacattgagcttactcgttatactcgcccaactccagtgcaaaagcatgctattcctattatcaaagagaaaagagacttgatggcttgtgcccaaacagggtctggaaaaactgcagcatttctgttgcccatcttgagtcagatttattcagatggtccaggcgaggctttgagggccatgaaggaaaatggaaggtatgggcgccgcaaacaatacccaatctccttggtattagcaccaacgagagagttggcagtacagatctacgaggaagccagaaaattttcataccgatctagagttcgtccttgcgtggtttatggtggtgccgatattggtcagcagattcgagacttggaacgtggatgccatttgttagtagccactccaggacgtctagtggatatgatggaaagaggaaagattggattagacttttgcaaatacttggtgttagatgaagctgatcggatgttggatatggggtttgagcctcagattcgtagaatagtcgaacaagatactatgcctccaaagggtgtccgccacactatgatgtttagtgctacttttcctaaggaaatacagatgctggctcgtgatttcttagatgaatatatcttcttggctgtaggaagagttggctctacctctgaaaacatcacacagaaagtagtttgggtggaagaatcagacaaacggtcatttctgcttgacctcctaaatgcaacaggcaaggattcactgaccttagtgtttgtggagaccaaaaagggtgcagattctctggaggatttcttataccatgaaggatacgcatgtaccagcatccatggagaccgttctcagagggatagagaagaggcccttcaccagttccgctcaggaaaaagcccaattttagtggctacagcagtagcagcaagaggactggacatttcaaatgtgaaacatgttatcaattttgacttgccaagtgatattgaagaatatgtacatcgtattggtcgtacgggacgtgtaggaaaccttggcctggcaacctcattctttaacgagaggaacataaatattactaaggatttgttggatcttcttgttgaagctaaacaagaagtgccgtcttggttagaaaacatggcttatgaacaccactacaagggtagcagtcgtggacgttctaagagtagcagatttagtggagggtttggtgccagagactaccgacaaagtagcggtgccagcagttccagcttcagcagcagccgcgcaagcagcagccgcagtggcggaggtggccacggtagcagcagaggatttggtggaggtggctatggaggcttttacaacagtgatggatatggaggaaattataactcccagggggttgactggtggggtaactgagcctgctttgcagtaggtcaccctgccaaacaagctaatatggaaaccacatgtaacttagccagactataccttgtgtagcttcaagaactcgcagtacattaccagctgtgattctccactgaaattttttttttaagggagctcaaggtcacaagaagaaatgaaaggaacaatcagcagccctgttcagaaggtggtttgaagacttcattgctgtagtttggattaactcccctcccgcctacccccatcccaaactgcatttataattttgtgactgaggatcatttgtttgttaatgtactgtgcctttaactttagacaactttttattttgatgtcctgttggctcagtaatgctcaagatatcaattgttttgacaaaataaatttactgaacttgggctaaaatcaaaccttggcacacaggtgtgatacaacttaacaggaatcatcgattcatccataaataatataaggaaaaacttatgcggtagcctgcattagggctttttgatacttgcagattgggggaaaacaacaaatgtcttgaagcatattaatggaattagtttctaatgtggcaaactgtattaagttaaagttctgatttgctcactctatcctggataggtatttagaacctgatagtctttaagccattccagtcatgatgaggtgatgtatgaatacatgcatacattcaaagcactgttttcaaagttaatgcaagtaaatacagcaattcctctttcaacgtttaggcagatcattaattatgagctagccaaatgtgggcatactattacagggaaagtttaaaggtctgataacttgaaataggtttttaggagaattcatctacttagactttttaaatgcctgccataaatgaaattgaaatggtagaatggctgaccacagcaatgaccagccctcattagggccctggatgatttttggtctaataacgcatgctagtgttgatgttttttggtcaagagggtatgaacaggaagaattaaatgcagcaggctttattttaaatgccgattcacattactctgttcaagctgcgttgagatgttaaactggcttactatagacttcgtaaaaatggctccagaagagtaacaaactgaaatctttgagatcacacaggttggaaatatgtacataactgcacaaggtgtcaattctgctctacagtgcagttttagtcagttttagttgcataggtttccattgtatttatagtctgtttatgctaaatctggccaaagatgagcattgtccaccactaaaatgcctctgccactttgaattctgtgctaattttgtggccagaatgcggtgatcaaaacgctccatctttttacagtggcataggaagacggcaaaaatttcctaaagtgcaatagattttcaagtgtattgtgccttgttctaaaacttttattaagtaggtgcacttgacagtattgaggtcatttgttatggtgctatttcaattagtctaggtttaggcccttgtacattttgcccataactttttacaaagtacttcttttattgcacattcagagaattttatatatatgtcttgtgtgcgtgtccttaaacttccaatcttactttgtctcttggagattgttgaacgcagcttgtctaggaaggggatgggactagattctaaaatttatttgggaccatgggaatgatagttgggaagaaaactatttgcacacgacagatttctagatactttttgctgctagttttatgtaatatttattgaacattttgacaaatatttatttttgtaagcctaaaagtgattctttgaaagtttaaagaaacttgaccaaaagacagtacacggggtagtgtgagcttttaatgtttaagtcatattaaactcttaagtcaaattaagcagacccggcgttggcagtgtagccataactttctgatgttagtaaaaacaaaattggcgacttgaaattaaatcatgccaaggttttgatacacttgtcttaagatattaatgaaacacttcaaaacactgatgtgaagtgtccagattctcagatgtttgttgtgtggattttgtttagttgtgtgtttttttttttttttcagtgaatgtctggcacattgcaatcctcaaacatgtggttatctttgttgtattggcataatcagtgacttgtacattcagcaatagcatttgagcaagttttatcagcaagcaatattttcagttaataaggtttcaaaaatcatgtaaggatttaaacttgctgaatgtaaagattgaacctcaagtcactgtagctttagtaattgcttattgtattagtttagatgctagcactgcatgtgctgtgcatattctgattttattaaaataaaaagttgaactgcac

SEQ ID NO: 314414 - DNA, 4902 bp, Homo sapiens
ctttccccttactccgctcccctcttttccctccctctcctccccttccctctgttctctcctcctcttcccctcccctcccccgtccggggcactctatattcaagccaccgtttcctgcttcacaaaatggccaccgcacgcgacacctacggtcacgtggcctgccgccctctcagtttcgggaatctgcctagctcccactaaggggaggctacccgcggaagagcgagggcagattagaccggagaaatcccaccacatctccaagcccgggaactgagagaggaagaagagtgaaggccagtgttaggaaaaaaaaaaacaaaaacaaaaaaaacgaaaaacgaaagctgagtgcatagagttggaaaggggagcgaatgcgtaaggttggaaaggggggcgaagaggcctaggttaacattttcaggcgtcttagccggtggaaagcgggagacgcaagttctcgcgagatctcgagaactccgaggctgagactagggttttagcggagagcacgggaagtgtagctcgagagaactgggacagcatttcgcaccctaagctccaaggcaggactgctaggggcgacaggactaagtaggaaatcccttgagcttagacctgagggagcgcgcagtagccgggcagaagtcgccgcgacagggaattgcggtgtgagagggagggcacacgttgtacgtgctgacgtagccggctttccagcgggtatattagatccgtggccgcgcggtgcgctccagagccgcagttctcccgtgagagggccttcgcggtggaacaaacactcgcttagcagcggaagactccgagttctcggtactcttcagggatgagtcatgtggcagtggaaaatgcgctcgggctggaccagcagtttgctggcctagacctgaactcttcagataatcagagtggaggaagtacagccagcaaagggcgctatattcctcctcatttaaggaaccgagaagctactaaaggtttctacgataaagacagttcagggtggagttctagcaaagataaggatgcgtatagcagttttggatctcgtagtgattcaagagggaagtctagcttcttcagtgatcgtggaagtggatcaaggggaaggtttgatgatcgtggacggagtgattacgatggcattggcagccgtggtgacagaagtggctttggcaaatttgaacgtggtggaaacagtcgctggtgtgacaaatcagatgaagatgattggtcaaaaccactcccaccaagtgaacgcttggaacaggaactcttttctggaggcaacactgggattaattttgagaaatacgatgacattccagttgaggcaacaggcaacaactgtcctccacatattgaaagtttcagtgatgttgagatgggagaaattatcatgggaaacattgagcttactcgttatactcgcccaactccagtgcaaaagcatgctattcctattatcaaagagaaaagagacttgatggcttgtgcccaaacagggtctggaaaaactgcagcatttctgttgcccatcttgagtcagatttattcagatggtccaggcgaggctttgagggccatgaaggaaaatggaaggtatgggcgccgcaaacaatacccaatctccttggtattagcaccaacgagagagttggcagtacagatctacgaggaagccagaaaattttcataccgatctagagttcgtccttgcgtggtttatggtggtgccgatattggtcagcagattcgagacttggaacgtggatgccatttgttagtagccactccaggacgtctagtggatatgatggaaagaggaaagattggattagacttttgcaaatacttggtgttagatgaagctgatcggatgttggatatggggtttgagcctcagattcgtagaatagtcgaacaagatactatgcctccaaagggtgtccgccacactatgatgtttagtgctacttttcctaaggaaatacagatgctggctcgtgatttcttagatgaatatatcttcttggctgtaggaagagttggctctacctctgaaaacatcacacagaaagtagtttgggtggaagaatcagacaaacggtcatttctgcttgacctcctaaatgcaacaggcaaggattcactgaccttagtgtttgtggagaccaaaaagggtgcagattctctggaggatttcttataccatgaaggatacgcatgtaccagcatccatggagaccgttctcagagggatagagaagaggcccttcaccagttccgctcaggaaaaagcccaattttagtggctacagcagtagcagcaagaggactggacatttcaaatgtgaaacatgttatcaattttgacttgccaagtgatattgaagaatatgtacatcgtattggtcgtacgggacgtgtaggaaaccttggcctggcaacctcattctttaacgagaggaacataaatattactaaggatttgttggatcttcttgttgaagctaaacaagaagtgccgtcttggttagaaaacatggcttatgaacaccactacaagggtagcagtcgtggacgttctaagagtagcagatttagtggagggtttggtgccagagactaccgacaaagtagcggtgccagcagttccagcttcagcagcagccgcgcaagcagcagccgcagtggcggaggtggccacggtagcagcagaggatttggtggaggtggctatggaggcttttacaacagtgatggatatggaggaaattataactcccagggggttgactggtggggtaactgagcctgctttgcagtaggtcaccctgccaaacaagctaatatggaaaccacatgtaacttagccagactataccttgtgtagcttcaagaactcgcagtacattaccagctgtgattctccactgaaattttttttttaagggagctcaaggtcacaagaagaaatgaaaggaacaatcagcagccctgttcagaaggtggtttgaagacttcattgctgtagtttggattaactcccctcccgcctacccccatcccaaactgcatttataattttgtgactgaggatcatttgtttttaatgcaagtaaatacagcaattcctctttcaacgtttaggcagatcattaattatgagctagccaaatgtgggcatactattacagggaaagtttaaaggtctgataacttgaaataggtttttaggagaattcatctacttagactttttaaatgcctgccataaatgaaattgaaatggtagaatggctgaccacagcaatgaccagccctcattagggccctggatgatttttggtctaataacgcatgctagtgttgatgttttttggtcaagagggtatgaacaggaagaattaaatgcagcaggctttattttaaatgccgattcacattactctgttcaagctgcgttgagatgttaaactggcttactatagacttcgtaaaaatggctccagaagagtaacaaactgaaatctttgagatcacacaggttggaaatatgtacataactgcacaaggtgtcaattctgctctacagtgcagttttagtcagttttagttgcataggtttccattgtatttatagtctgtttatgctaaatctggccaaagatgagcattgtccaccactaaaatgcctctgccactttgaattctgtgctaattttgtggccagaatgcggtgatcaaaacgctccatctttttacagtggcataggaagacggcaaaaatttcctaaagtgcaatagattttcaagtgtattgtgccttgttctaaaacttttattaagtaggtgcacttgacagtattgaggtcatttgttatggtgctatttcaattagtctaggtttaggcccttgtacattttgcccataactttttacaaagtacttcttttattgcacattcagagaattttatatatatgtcttgtgtgcgtgtccttaaacttccaatcttactttgtctcttggagattgttgaacgcagcttgtctaggaaggggatgggactagattctaaaatttatttgggaccatgggaatgatagttgggaagaaaactatttgcacacgacagatttctagatactttttgctgctagttttatgtaatatttattgaacattttgacaaatatttatttttgtaagcctaaaagtgattctttgaaagtttaaagaaacttgaccaaaagacagtacaaaaacactggcacttgaatgttgaatgtcaccgtatgcgtgaaattatatatttcggggtagtgtgagcttttaatgtttaagtcatattaaactcttaagtcaaattaagcagacccggcgttggcagtgtagccataactttctgatgttagtaaaaacaaaattggcgacttgaaattaaatcatgccaaggttttgatacacttgtcttaagatattaatgaaacacttcaaaacactgatgtgaagtgtccagattctcagatgtttgttgtgtggattttgtttagttgtgtgtttttttttttttttcagtgaatgtctggcacattgcaatcctcaaacatgtggttatctttgttgtattggcataatcagtgacttgtacattcagcaatagcatttgagcaagttttatcagcaagcaatattttcagttaataaggtttcaaaaatcatgtaaggatttaaacttgctgaatgtaaagattgaacctcaagtcactgtagctttagtaattgcttattgtattagtttagatgctagcactgcatgtgctgtgcatattctgattttattaaaataaaaagttgaactgcac

SEQ ID NO: 314415 - DNA, 2997 bp, Homo sapiens
tgggcgcgctcaacccgggaaacagctagaggatgggtacatggctcatgtgaccgatgttatcaattttgacttgccaagtgatattgaagaatatgtacatcgtattggtcgtacgggacgtgtaggaaaccttggcctggcaacctcattctttaacgagaggaacataaatattactaaggatttgttggatcttcttgttgaagctaaacaagaagtgccgtcttggttagaaaacatggcttatgaacaccactacaagggtagcagtcgtggacgttctaagagtagcagatttagtggagggtttggtgccagagactaccgacaaagtagcggtgccagcagttccagcttcagcagcagccgcgcaagcagcagccgcagtggcggaggtggccacggtagcagcagaggatttggtggaggtggctatggaggcttttacaacagtgatggatatggaggaaattataactcccagggggttgactggtggggtaactgagcctgctttgcagtaggtcaccctgccaaacaagctaatatggaaaccacatgtaacttagccagactataccttgtgtagcttcaagaactcgcagtacattaccagctgtgattctccactgaaattttttttttaagggagctcaaggtcacaagaagaaatgaaaggaacaatcagcagccctgttcagaaggtggtttgaagacttcattgctgtagtttggattaactcccctcccgcctacccccatcccaaactgcatttataattttgtgactgaggatcatttgtttgttaatgtactgtgcctttaactttagacaactttttattttgatgtcctgttggctcagtaatgctcaagatatcaattgttttgacaaaataaatttactgaacttgggctaaaatcaaaccttggcacacaggtgtgatacaacttaacaggaatcatcgattcatccataaataatataaggaaaaacttatgcggtagcctgcattagggctttttgatacttgcagattgggggaaaacaacaaatgtcttgaagcatattaatggaattagtttctaatgtggcaaactgtattaagttaaagttctgatttgctcactctatcctggataggtatttagaacctgatagtctttaagccattccagtcatgatgaggtgatgtatgaatacatgcatacattcaaagcactgttttcaaagttaatgcaagtaaatacagcaattcctctttcaacgtttaggcagatcattaattatgagctagccaaatgtgggcatactattacagggaaagtttaaaggtctgataacttgaaataggtttttaggagaattcatctacttagactttttaaatgcctgccataaatgaaattgaaatggtagaatggctgaccacagcaatgaccagccctcattagggccctggatgatttttggtctaataacgcatgctagtgttgatgttttttggtcaagagggtatgaacaggaagaattaaatgcagcaggctttattttaaatgccgattcacattactctgttcaagctgcgttgagatgttaaactggcttactatagacttcgtaaaaatggctccagaagagtaacaaactgaaatctttgagatcacacaggttggaaatatgtacataactgcacaaggtgtcaattctgctctacagtgcagttttagtcagttttagttgcataggtttccattgtatttatagtctgtttatgctaaatctggccaaagatgagcattgtccaccactaaaatgcctctgccactttgaattctgtgctaattttgtggccagaatgcggtgatcaaaacgctccatctttttacagtggcataggaagacggcaaaaatttcctaaagtgcaatagattttcaagtgtattgtgccttgttctaaaacttttattaagtaggtgcacttgacagtattgaggtcatttgttatggtgctatttcaattagtctaggtttaggcccttgtacattttgcccataactttttacaaagtacttcttttattgcacattcagagaattttatatatatgtcttgtgtgcgtgtccttaaacttccaatcttactttgtctcttggagattgttgaacgcagcttgtctaggaaggggatgggactagattctaaaatttatttgggaccatgggaatgatagttgggaagaaaactatttgcacacgacagatttctagatactttttgctgctagttttatgtaatatttattgaacattttgacaaatatttatttttgtaagcctaaaagtgattctttgaaagtttaaagaaacttgaccaaaagacagtacaaaaacactggcacttgaatgttgaatgtcaccgtatgcgtgaaattatatatttcggggtagtgtgagcttttaatgtttaagtcatattaaactcttaagtcaaattaagcagacccggcgttggcagtgtagccataactttctgatgttagtaaaaacaaaattggcgacttgaaattaaatcatgccaaggttttgatacacttgtcttaagatattaatgaaacacttcaaaacactgatgtgaagtgtccagattctcagatgtttgttgtgtggattttgtttagttgtgtgtttttttttttttttcagtgaatgtctggcacattgcaatcctcaaacatgtggttatctttgttgtattggcataatcagtgacttgtacattcagcaatagcatttgagcaagttttatcagcaagcaatattttcagttaataaggtttcaaaaatcatgtaaggatttaaacttgctgaatgtaaagattgaacctcaagtcactgtagctttagtaattgcttattgtattagtttagatgctagcactgcatgtgctgtgcatattctgattttattaaaataaaaagttgaactgcac

SEQ ID NO: 314416 - DNA, 3182 bp, Homo sapiens
ctttccccttactccgctcccctcttttccctccctctcctccccttccctctgttctctcctcctcttcccctcccctcccccgtccggggcactctatattcaagccaccgtttcctgcttcacaaaatggccaccgcacgcgacacctacggtcacgtggcctgccgccctctcagtttcgggaatctgcctagctcccactaaggggaggctacccgcggaagagcgagggcagattagaccggagaaatcccaccacatctccaagcccgggaactgagagaggaagaagagtgaaggccagtgttaggaaaaaaaaaaacaaaaacaaaaaaaacgaaaaacgaaagctgagtgcatagagttggaaaggggagcgaatgcgtaaggttggaaaggggggcgaagaggcctaggttaacattttcaggcgtcttagccggtggaaagcgggagacgcaagttctcgcgagatctcgagaactccgaggctgagactagggttttagcggagagcacgggaagtgtagctcgagagaactgggacagcatttcgcaccctaagctccaaggcaggactgctaggggcgacaggactaagtaggaaatcccttgagcttagacctgagggagcgcgcagtagccgggcagaagtcgccgcgacagggaattgcggtgtgagagggagggcacacgttgtacgtgctgacgtagccggctttccagcgggtatattagatccgtggccgcgcggtgcgctccagagccgcagttctcccgtgagagggccttcgcggtggaacaaacactcgcttagcagcggaagactccgagttctcggtactcttcagggatgagtcatgtggcagtggaaaatgcgctcgggctggaccagcagtttgctggcctagacctgaactcttcagataatcagagtggaggaagtacagccagcaaagggcgctatattcctcctcatttaaggaaccgagaagctactaaaggtttctacgataaagacagttcagggtggagttctagcaaagataaggatgcgtatagcagttttggatctcgtagtgattcaagagggaagtctagcttcttcagtgatcgtggaagtggatcaaggggaaggtttgatgatcgtggacggagtgattacgatggcattggcagccgtggtgacagaagtggctttggcaaatttgaacgtggtggaaacagtcgctggtgtgacaaatcagatgaagatgattggtcaaaaccactcccaccaagtgaacgcttggaacaggaactcttttctggaggcaacactgggattaattttgagaaatacgatgacattccagttgaggcaacaggcaacaactgtcctccacatattgaaagtttcagtgatgttgagatgggagaaattatcatgggaaacattgagcttactcgttatactcgcccaactccagtgcaaaagcatgctattcctattatcaaagagaaaagagacttgatggcttgtgcccaaacagggtctggaaaaactgcagcatttctgttgcccatcttgagtcagatttattcagatggtccaggcgaggctttgagggccatgaaggaaaatggaaggtatgggcgccgcaaacaatacccaatctccttggtattagcaccaacgagagagttggcagtacagatctacgaggaagccagaaaattttcataccgatctagagttcgtccttgcgtggtttatggtggtgccgatattggtcagcagattcgagacttggaacgtggatgccatttgttagtagccactccaggacgtctagtggatatgatggaaagaggaaagattggattagacttttgcaaatacttggtgttagatgaagctgatcggatgttggatatggggtttgagcctcagattcgtagaatagtcgaacaagatactatgcctccaaagggtgtccgccacactatgatgtttagtgctacttttcctaaggaaatacagatgctggctcgtgatttcttagatgaatatatcttcttggctgtaggaagagttggctctacctctgaaaacatcacacagaaagtagtttgggtggaagaatcagacaaacggtcatttctgcttgacctcctaaatgcaacaggcaaggattcactgaccttagtgtttgtggagaccaaaaagggtgcagattctctggaggatttcttataccatgaaggatacgcatgtaccagcatccatggagaccgttctcagagggatagagaagaggcccttcaccagttccgctcaggaaaaagcccaattttagtggctacagcagtagcagcaagaggactggacatttcaaatgtgaaacatgttatcaattttgacttgccaagtgatattgaagaatatgtacatcgtattggtcgtacgggacgtgtaggaaaccttggcctggcaacctcattctttaacgagaggaacataaatattactaaggatttgttggatcttcttgttgaagctaaacaagaagtgccgtcttggttagaaaacatggcttatgaacaccactacaagggtagcagtcgtggacgttctaagagtagcagatttagtggagggtttggtgccagagactaccgacaaagtagcggtgccagcagttccagcttcagcagcagccgcgcaagcagcagccgcagtggcggaggtggccacggtagcagcagaggatttggtggaggtggctatggaggcttttacaacagtgatggatatggaggaaattataactcccagggggttgactggtggggtaactgagcctgctttgcagtaggtcaccctgccaaacaagctaatatggaaaccacatgtaacttagccagactataccttgtgtagcttcaagaactcgcatgtattggcataatcagtgacttgtacattcagcaatagcatttgagcaagttttatcagcaagcaatattttcagttaataaggtttcaaaaatcatgtaaggatttaaacttgctgaatgtaaagattgaacctcaagtcactgtagctttagtaattgcttattgtattagtttagatgctagcactgcatgtgctgtgcatattctgattttattaaaataaaaagttgaactgcac

SEQ ID NO: 314417 - DNA, 3835 bp, Homo sapiens
gcggccgccctgcgcgcgaagctcgtggcccgagaggggtgcggtcgggccgacggaggcggggccctggctgcctctctccctgctcataggctggccgctcaggcctggccggcctcggggcctcgggattcgcggcggcgctgccaatcaggcgatcgggccccgcccccccggagttgggtgaaatagaggcgggcgtcaagtgtcagtagtcgcggggcaggtacgtgcgctcgcggttctctcgcggaggtcggcggtggcgggagcgggctccggagagcctgagagcacggtggggcggggcgggagaaagtggccgcccggaggacgttggcgtttacgtgtggaagagcggaagagttttgcttttcgtgcgcgccttcgaaaactgcctgccgctgtctgaggagtccacccgaaacctcccctcctccgccggcagccccgcgctgagctcgccgacccaagccagcgtgggcgaggtgggaagtgcgcccgacccgcgcctggagctgcgcccccgagtgcccatggctacaagggtgctgagcatgagcgcccgcctgggacccgtgccccagccgccggcgccgcaggacgagccggtgttcgcgcagctcaagccggtgctgggcgccgcgaatccggcccgcgacgcggcgctcttccccggcgaggagctgaagcacgcgcaccaccgcccgcaggcgcagcccgcgcccgcgcaggccccgcagccggcccagccgcccgccaccggcccgcggctgcctccagaggacctggtccagacaagatgtgaaatggagaagtatctgacacctcagcttcctccagttcctataattccagagcataaaaagtatagacgagacagtgcctcagtcgtagaccagttcttcactgacactgaagggttaccttacagtatcaacatgaacgtcttcctccctgacatcactcacctgagaactggcctctacaaatcccagagaccgtgcgtaacacacatcaagacagaacctgttgccattttcagccaccagagtgaaacgactgcccctcctccggccccgacccaggccctccctgagttcaccagtatattcagctcacaccagaccgcagctccagaggtgaacaatattttcatcaaacaagaacttcctacaccagatcttcatctttctgtccctacccagcagggccacctgtaccagctactgaatacaccggatctagatatgcccagttctacaaatcagacagcagcaatggacactcttaatgtttctatgtcagctgccatggcaggccttaacacacacacctctgctgttccgcagactgcagtgaaacaattccagggcatgcccccttgcacatacacaatgccaagtcagtttcttccacaacaggccacttactttcccccgtcaccaccaagctcagagcctggaagtccagatagacaagcagagatgctccagaatttaaccccacctccatcctatgctgctacaattgcttctaaactggcaattcacaatccaaatttacccaccaccctgccagttaactcacaaaacatccaacctgtcagatacaatagaaggagtaaccccgatttggagaaacgacgcatccactactgcgattaccctggttgcacaaaagtttataccaagtcttctcatttaaaagctcacctgaggactcacactggtgaaaagccatacaagtgtacctgggaaggctgcgactggaggttcgcgcgatcggatgagctgacccgccactaccggaagcacacaggcgccaagcccttccagtgcggggtgtgcaaccgcagcttctcgcgctctgaccacctggccctgcatatgaagaggcaccagaactgagcactgcccgtgtgacccgttccaggtcccctgggctccctcaaatgacagacctaactattcctgtgtaaaaacaacaaaaacaaaaaaaaaacaagaaaaccacaactaaaactggaaatgtatattttgtatatttgagaaaacagggaatacattgtattaataccaaagtgtttggtcattttaagaatctggaatgcttgctgtaatgtatatggctttactcaagcagatctcatctcatgacaggcagccacgtctcaacatgggtaaggggtgggggtggaggggagtgtgtgcagcgtttttacctaggcaccatcatttaatgtgacagtgttcagtaaacaaatcagttggcaggcaccagaagaagaatggattgtatgtcaagattttacttggcattgagtagtttttttcaatagtaggtaattccttagagatacagtatacctggcaattcacaaatagccattgaacaaatgtgtgggtttttaaaaattatatacatatatgagttgcctatatttgctattcaaaattttgtaaatatgcaaatcagctttataggtttattacaagttttttaggattcttttggggaagagtcataattcttttgaaaataaccatgaatacacttacagttaggatttgtggtaaggtacctctcaacattaccaaaatcatttctttagagggaaggaataatcattcaaatgaactttaaaaaagcaaatttcatgcactgattaaaataggattattttaaatacaaaaggcattttatatgaattataaactgaagagcttaaagatagttacaaaatacaaaagttcaacctcttacaataagctaaacgcaatgtcatttttaaaaagaaggacttagggtgtcgttttcacatatgacaatgttgcatttatgatgcagtttcaagtaccaaaacgttgaattgatgatgcagttttcatatatcgagatgttcgctcgtgcagtactgttggttaaatgacaatttatgtggattttgcatgtaatacacagtgagacacagtaattttatctaaattacagtgcagtttagttaatctattaatactgactcagtgtctgcctttaaatataaatgatatgttgaaaacttaaggaagcaaatgctacatatatgcaatataaaatagtaatgtgatgctgatgctgttaaccaaagggcagaataaataagcaaaatgccaaaaggggtcttaattgaaatgaaaatttaattttgtttttaaaatattgtttatctttatttattttgtggtaatatagtaagtttttttagaagacaattttcataacttgataaattatagttttgtttgttagaaaagttgctcttaaaagatgtaaatagatgacaaacgatgtaaataattttgtaagaggcttcaaaatgtttatacgtggaaacacacctacatgaaaagcagaaatcggttgctgttttgcttctttttccctcttatttttgtattgtggtcatttcctatgcaaataatggagcaaacagctgtatagttgtagaattttttgagagaatgagatgtttatatattaacgacaattttttttttggaaaataaaaagtgcctaaaagaaaaaaaaaaaaaaaaaaaaaaaaaaagggaggaaggaaaaaggaaaaaagagaaaaaaaataaaaaaaaaaaaagagaagaggaaaggagggaccaaagaagacaacgaaaacagtggcaaaaaggtgggggcccagaggagaacacggggacgacgcagaaaaggaggagagagaattgagcccacactacaaaacgccccggggggcaaagagaagacgtgcacgaaaacaccccagaggagggcgagagggagcacaaagggggccaaa

SEQ ID NO: 314418 - DNA, 572 bp, Homo sapiens
attctgagactccccaagcagttaatactgactcagtgtctgcctttaaatataaatgatatgttgaaaacttaaggaagcaaatgctacatatatgcaatataaaatagtaatgtgatgctgatgctgttaaccaaagggcagaataaataagcaaaatgccaaaaggggtcttaattgaaatgaaaatttaattttgtttttaaaatattgtttatctttatttattttgtggtaatatagtaagtttttttagaagacaattttcataacttgataaattatagttttgtttgttagaaaagttgctcttaaaagatgtaaatagatgacaaacgatgtaaataattttgtaagaggcttcaaaatgtttatacgtggaaacacacctacatgaaaagcagaaatcggttgctgttttgcttctttttccctcttatttttgtattgtggtcatttcctatgcaaataatggagcaaacagctgtatagttgtagaattttttgagagaatgagatgtttatatattaacgacaattttttttttggaaaataaaaagtgcctaaaaga

SEQ ID NO: 314419 - DNA, 2355 bp, Homo sapiens
gcggccgccctgcgcgcgaagctcgtggcccgagaggggtgcggtcgggccgacggaggcggggccctggctgcctctctccctgctcataggctggccgctcaggcctggccggcctcggggcctcgggattcgcggcggcgctgccaatcaggcgatcgggccccgcccccccggagttgggtgaaatagaggcgggcgtcaagtgtcagtagtcgcggggcaggtacgtgcgctcgcggttctctcgcggaggtcggcggtggcgggagcgggctccggagagcctgagagcacggtggggcggggcgggagaaagtggccgcccggaggacgttggcgtttacgtgtggaagagcggaagagttttgcttttcgtgcgcgccttcgaaaactgcctgccgctgtctgaggagtccacccgaaacctcccctcctccgccggcagccccgcgctgagctcgccgacccaagccagcgtgggcgaggtgggaagtgcgcccgacccgcgcctggagctgcgcccccgagtgcccatggctacaagggtgctgagcatgagcgcccgcctgggacccgtgccccagccgccggcgccgcaggacgagccggtgttcgcgcagctcaagccggtgctgggcgccgcgaatccggcccgcgacgcggcgctcttccccggcgaggagctgaagcacgcgcaccaccgcccgcaggcgcagcccgcgcccgcgcaggccccgcagccggcccagccgcccgccaccggcccgcggctgcctccagaggacctggtccagacaagatgtgaaatggagaagtatctgacacctcagcttcctccagttcctataattccagagcataaaaagtatagacgagacagtgcctcagtcgtagaccagttcttcactgacactgaagggttaccttacagtatcaacatgaacgtcttcctccctgacatcactcacctgagaactggcctctacaaatcccagagaccgtgcgtaacacacatcaagacagaacctgttgccattttcagccaccagagtgaaacgactgcccctcctccggccccgacccaggccctccctgagttcaccagtatattcagctcacaccagaccgcagctccagaggtgaacaatattttcatcaaacaagaacttcctacaccagatcttcatctttctgtccctacccagcagggccacctgtaccagctactgaatacaccggatctagatatgcccagttctacaaatcagacagcagcaatggacactcttaatgtttctatgtcagctgccatggcaggccttaacacacacacctctgctgttccgcagactgcagtgaaacaattccagggcatgcccccttgcacatacacaatgccaagtcagtttcttccacaacaggccacttactttcccccgtcaccaccaagctcagagcctggaagtccagatagacaagcagagatgctccagaatttaaccccacctccatcctatgctgctacaattgcttctaaactggcaattcacaatccaaatttacccaccaccctgccagttaactcacaaaacatccaacctgtcagatacaatagaaggagtaaccccgatttggagaaacgacgcatccactactgcgattaccctggttgcacaaaagtttataccaagtcttctcatttaaaagctcacctgaggactcacactggtgaaaagccatacaagtgtacctgggaaggctgcgactggaggttcgcgcgatcggatgagctgacccgccactaccggaagcacacaggcgccaagcccttccagtgcggggtgtgcaaccgcagcttctcgcgctctgaccacctggccctgcatatgaagaggcaccagaactgagcactgcccgtgtgacccgttccaggtcccctgggctccctcaaatgacagacctaactattcctgtgtaaaaacaacaaaaacaaaaaaaaaacaagaaaaccacaactaaaactggaaatgtatattttgtatatttgagaaaacagggaatacattgtattaataccaaagtgtttggtcattttaagaatctggaatgcttgctgtaatgtatatggctttactcaagcagatctcatctcatgacaggcagccacgtctcaacatgggtaaggggtgggggtggaggggagtgtgtgcagcgtttttacctaggcaccatcatttaatgtgacagtgttcagtaaacaaatcagttggcagaagcaggaagcgcttcctgcttctgcccctgcttctgctgcttcctgcttctgccgtgccagactagagtcaagctcaa

SEQ ID NO: 314420 - DNA, 2853 bp, Homo sapiens
tcagagatgtgactcacatgatgagagcgttaatttttatttttaaatcatgtctatccgggaaaccccgtccgcatccacaccaagacaagatgtgaaatggagaagtatctgacacctcagcttcctccagttcctataattccagagcataaaaagtatagacgagacagtgcctcagtcgtagaccagttcttcactgacactgaagggttaccttacagtatcaacatgaacgtcttcctccctgacatcactcacctgagaactggcctctacaaatcccagagaccgtgcgtaacacacatcaagacagaacctgttgccattttcagccaccagagtgaaacgactgcccctcctccggccccgacccaggccctccctgagttcaccagtatattcagctcacaccagaccgcagctccagaggtgaacaatattttcatcaaacaagaacttcctacaccagatcttcatctttctgtccctacccagcagggccacctgtaccagctactgaatacaccggatctagatatgcccagttctacaaatcagacagcagcaatggacactcttaatgtttctatgtcagctgccatggcaggccttaacacacacacctctgctgttccgcagactgcagtgaaacaattccagggcatgcccccttgcacatacacaatgccaagtcagtttcttccacaacaggccacttactttcccccgtcaccaccaagctcagagcctggaagtccagatagacaagcagagatgctccagaatttaaccccacctccatcctatgctgctacaattgcttctaaactggcaattcacaatccaaatttacccaccaccctgccagttaactcacaaaacatccaacctgtcagatacaatagaaggagtaaccccgatttggagaaacgacgcatccactactgcgattaccctggttgcacaaaagtttataccaagtcttctcatttaaaagctcacctgaggactcacactggtgaaaagccatacaagtgtacctgggaaggctgcgactggaggttcgcgcgatcggatgagctgacccgccactaccggaagcacacaggcgccaagcccttccagtgcggggtgtgcaaccgcagcttctcgcgctctgaccacctggccctgcatatgaagaggcaccagaactgagcactgcccgtgtgacccgttccaggtcccctgggctccctcaaatgacagacctaactattcctgtgtaaaaacaacaaaaacaaaaaaaaaacaagaaaaccacaactaaaactggaaatgtatattttgtatatttgagaaaacagggaatacattgtattaataccaaagtgtttggtcattttaagaatctggaatgcttgctgtaatgtatatggctttactcaagcagatctcatctcatgacaggcagccacgtctcaacatgggtaaggggtgggggtggaggggagtgtgtgcagcgtttttacctaggcaccatcatttaatgtgacagtgttcagtaaacaaatcagttggcaggcaccagaagaagaatggattgtatgtcaagattttacttggcattgagtagtttttttcaatagtaggtaattccttagagatacagtatacctggcaattcacaaatagccattgaacaaatgtgtgggtttttaaaaattatatacatatatgagttgcctatatttgctattcaaaattttgtaaatatgcaaatcagctttataggtttattacaagttttttaggattcttttggggaagagtcataattcttttgaaaataaccatgaatacacttacagttaggatttgtggtaaggtacctctcaacattaccaaaatcatttctttagagggaaggaataatcattcaaatgaactttaaaaaagcaaatttcatgcactgattaaaataggattattttaaatacaaaaggcattttatatgaattataaactgaagagcttaaagatagttacaaaatacaaaagttcaacctcttacaataagctaaacgcaatgtcatttttaaaaagaaggacttagggtgtcgttttcacatatgacaatgttgcatttatgatgcagtttcaagtaccaaaacgttgaattgatgatgcagttttcatatatcgagatgttcgctcgtgcagtactgttggttaaatgacaatttatgtggattttgcatgtaatacacagtgagacacagtaattttatctaaattacagtgcagtttagttaatctattaatactgactcagtgtctgcctttaaatataaatgatatgttgaaaacttaaggaagcaaatgctacatatatgcaatataaaatagtaatgtgatgctgatgctgttaaccaaagggcagaataaataagcaaaatgccaaaaggggtcttaattgaaatgaaaatttaattttgtttttaaaatattgtttatctttatttattttgtggtaatatagtaagtttttttagaagacaattttcataacttgataaattatagttttgtttgttagaaaagttgctcttaaaagatgtaaatagatgacaaacgatgtaaataattttgtaagaggcttcaaaatgtttatacgtggaaacacacctacatgaaaagcagaaatcggttgctgttttgcttctttttccctcttatttttgtattgtggtcatttcctatgcaaataatggagcaaacagctgtatagttgtagaattttttgagagaatgagatgtttatatattaacgacaattttttttttggaaaataaaaagtgcctaaaaga

SEQ ID NO: 314421 - DNA, 2936 bp, Homo sapiens
gttattacacaatcgacaaaataagcctgatatgtttataagcaacactgaggagtttgccctagtaccttacacagggattgggggaatttttagtaggcgccgattgttcgttcttcccgagatggtgaatcaggtggattatgcattttatatctcttcttttttagacaagatgtgaaatggagaagtatctgacacctcagcttcctccagttcctataattccagagcataaaaagtatagacgagacagtgcctcagtcgtagaccagttcttcactgacactgaagggttaccttacagtatcaacatgaacgtcttcctccctgacatcactcacctgagaactggcctctacaaatcccagagaccgtgcgtaacacacatcaagacagaacctgttgccattttcagccaccagagtgaaacgactgcccctcctccggccccgacccaggccctccctgagttcaccagtatattcagctcacaccagaccgcagctccagaggtgaacaatattttcatcaaacaagaacttcctacaccagatcttcatctttctgtccctacccagcagggccacctgtaccagctactgaatacaccggatctagatatgcccagttctacaaatcagacagcagcaatggacactcttaatgtttctatgtcagctgccatggcaggccttaacacacacacctctgctgttccgcagactgcagtgaaacaattccagggcatgcccccttgcacatacacaatgccaagtcagtttcttccacaacaggccacttactttcccccgtcaccaccaagctcagagcctggaagtccagatagacaagcagagatgctccagaatttaaccccacctccatcctatgctgctacaattgcttctaaactggcaattcacaatccaaatttacccaccaccctgccagttaactcacaaaacatccaacctgtcagatacaatagaaggagtaaccccgatttggagaaacgacgcatccactactgcgattaccctggttgcacaaaagtttataccaagtcttctcatttaaaagctcacctgaggactcacactggtgaaaagccatacaagtgtacctgggaaggctgcgactggaggttcgcgcgatcggatgagctgacccgccactaccggaagcacacaggcgccaagcccttccagtgcggggtgtgcaaccgcagcttctcgcgctctgaccacctggccctgcatatgaagaggcaccagaactgagcactgcccgtgtgacccgttccaggtcccctgggctccctcaaatgacagacctaactattcctgtgtaaaaacaacaaaaacaaaaaaaaaacaagaaaaccacaactaaaactggaaatgtatattttgtatatttgagaaaacagggaatacattgtattaataccaaagtgtttggtcattttaagaatctggaatgcttgctgtaatgtatatggctttactcaagcagatctcatctcatgacaggcagccacgtctcaacatgggtaaggggtgggggtggaggggagtgtgtgcagcgtttttacctaggcaccatcatttaatgtgacagtgttcagtaaacaaatcagttggcaggcaccagaagaagaatggattgtatgtcaagattttacttggcattgagtagtttttttcaatagtaggtaattccttagagatacagtatacctggcaattcacaaatagccattgaacaaatgtgtgggtttttaaaaattatatacatatatgagttgcctatatttgctattcaaaattttgtaaatatgcaaatcagctttataggtttattacaagttttttaggattcttttggggaagagtcataattcttttgaaaataaccatgaatacacttacagttaggatttgtggtaaggtacctctcaacattaccaaaatcatttctttagagggaaggaataatcattcaaatgaactttaaaaaagcaaatttcatgcactgattaaaataggattattttaaatacaaaaggcattttatatgaattataaactgaagagcttaaagatagttacaaaatacaaaagttcaacctcttacaataagctaaacgcaatgtcatttttaaaaagaaggacttagggtgtcgttttcacatatgacaatgttgcatttatgatgcagtttcaagtaccaaaacgttgaattgatgatgcagttttcatatatcgagatgttcgctcgtgcagtactgttggttaaatgacaatttatgtggattttgcatgtaatacacagtgagacacagtaattttatctaaattacagtgcagtttagttaatctattaatactgactcagtgtctgcctttaaatataaatgatatgttgaaaacttaaggaagcaaatgctacatatatgcaatataaaatagtaatgtgatgctgatgctgttaaccaaagggcagaataaataagcaaaatgccaaaaggggtcttaattgaaatgaaaatttaattttgtttttaaaatattgtttatctttatttattttgtggtaatatagtaagtttttttagaagacaattttcataacttgataaattatagttttgtttgttagaaaagttgctcttaaaagatgtaaatagatgacaaacgatgtaaataattttgtaagaggcttcaaaatgtttatacgtggaaacacacctacatgaaaagcagaaatcggttgctgttttgcttctttttccctcttatttttgtattgtggtcatttcctatgcaaataatggagcaaacagctgtatagttgtagaattttttgagagaatgagatgtttatatattaacgacaattttttttttggaaaataaaaagtgcctaaaaga

SEQ ID NO: 314422 - DNA, 3425 bp, Homo sapiens
gcggccgccctgcgcgcgaagctcgtggcccgagaggggtgcggtcgggccgacggaggcggggccctggctgcctctctccctgctcataggctggccgctcaggcctggccggcctcggggcctcgggattcgcggcggcgctgccaatcaggcgatcgggccccgcccccccggagttgggtgaaatagaggcgggcgtcaagtgtcagtagtcgcggggcaggtacgtgcgctcgcggttctctcgcggaggtcggcggtggcgggagcgggctccggagagcctgagagcacggtggggcggggcgggagaaagtggccgcccggaggacgttggcgtttacgtgtggaagagcggaagagttttgcttttcgtgcgcgccttcgaaaactgcctgccgctgtctgaggagtccacccgaaacctcccctcctccgccggcagccccgcgctgagctcgccgacccaagccagcgtgggcgaggtgggaagtgcgcccgacccgcgcctggagctgcgcccccgagtgcccatggctacaagggtgctgagcatgagcgcccgcctgggacccgtgccccagccgccggcgccgcaggacgagccggtgttcgcgcagctcaagccggtgctgggcgccgcgaatccggcccgcgacgcggcgctcttccccggcgaggagctgaagcacgcgcaccaccgcccgcaggcgcagcccgcgcccgcgcaggccccgcagccggcccagccgcccgccaccggcccgcggctgcctccagaggacctggtccagacaagatgtgaaatggagaagtatctgacacctcagcttcctccagttcctataattccagagcataaaaagtatagacgagacagtgcctcagtcgtagaccagttcttcactgacactgaagggttaccttacagtatcaacatgaacgtcttcctccctgacatcactcacctgagaactggcctctacaaatcccagagaccgtgcgtaacacacatcaagacagaacctgttgccattttcagccaccagagtgaaacgactgcccctcctccggccccgacccaggccctccctgagttcaccagtatattcagctcacaccagaccgcagctccagaggtgaacaatattttcatcaaacaagaacttcctacaccagatcttcatctttctgtccctacccagcagggccacctgtaccagctactgaatacaccggatctagatatgcccagttctacaaatcagacagcagcaatggacactcttaatgtttctatgtcagctgccatggcaggccttaacacacacacctctgctgttccgcagactgcagtgaaacaattccagggcatgcccccttgcacatacacaatgccaagtcagtttcttccacaacaggccacttactttcccccgtcaccaccaagctcagagcctggaagtccagatagacaagcagagatgctccagaatttaaccccacctccatcctatgctgctacaattgcttctaaactggcaattcacaatccaaatttacccaccaccctgccagttaactcacaaaacatccaacctgtcagatacaatagaaggagtaaccccgatttggagaaacgacgcatccactactgcgattaccctggttgcacaaaagtttataccaagtcttctcatttaaaagctcacctgaggactcacactggtgaaaagccatacaagtgtacctgggaaggctgcgactggaggttcgcgcgatcggatgagctgacccgccactaccggaagcacacaggcgccaagcccttccagtgcggggtgtgcaaccgcagcttctcgcgctctgaccacctggccctgcatatgaagaggcaccagaactgagcactgcccgtgtgacccgttccaggtcccctgggctccctcaaatttttaagaatctggaatgcttgctgtaatgtatatggctttactcaagcagatctcatctcatgacaggcagccacgtctcaacatgggtaaggggtgggggtggaggggagtgtgtgcagcgtttttacctaggcaccatcatttaatgtgacagtgttcagtaaacaaatcagttggcaggcaccagaagaagaatggattgtatgtcaagattttacttggcattgagtagtttttttcaatagtaggtaattccttagagatacagtatacctggcaattcacaaatagccattgaacaaatgtgtgggtttttaaaaattatatacatatatgagttgcctatatttgctattcaaaattttgtaaatatgcaaatcagctttataggtttattacaagttttttaggattcttttggggaagagtcataattcttttgaaaataaccatgaatacacttacagttaggatttgtggtaaggtacctctcaacattaccaaaatcatttctttagagggaaggaataatcattcaaatgaactttaaaaaagcaaatttcatgcactgattaaaataggattattttaaatacaaaaggcattttatatgaattataaactgaagagcttaaagatagttacaaaatacaaaagttcaacctcttacaataagctaaacgcaatgtcatttttaaaaagaaggacttagggtgtcgttttcacatatgacaatgttgcatttatgatgcagtttcaagtaccaaaacgttgaattgatgatgcagttttcatatatcgagatgttcgctcgtgcagtactgttggttaaatgacaatttatgtggattttgcatgtaatacacagtgagacacagtaattttatctaaattacagtgcagtttagttaatctattaatactgactcagtgtctgcctttaaatataaatgatatgttgaaaacttaaggaagcaaatgctacatatatgcaatataaaatagtaatgtgatgctgatgctgttaaccaaagggcagaataaataagcaaaatgccaaaaggggtcttaattgaaatgaaaatttaattttgtttttaaaatattgtttatctttatttattttgtggtaatatagtaagtttttttagaagacaattttcataacttgataaattatagttttgtttgttagaaaagttgctcttaaaagatgtaaatagatgacaaacgatgtaaataattttgtaagaggcttcaaaatgtttatacgtggaaacacacctacatgaaaagcagaaatcggttgctgttttgcttctttttccctcttatttttgtattgtggtcatttcctatgcaaataatggagcaaacagctgtatagttgtagaattttttgagagaatgagatgtttatatattaacgacaattttttttttggaaaataaaaagtgcctaaaaga

SEQ ID NO: 314423 - DNA, 2814 bp, Homo sapiens
gcggccgccctgcgcgcgaagctcgtggcccgagaggggtgcggtcgggccgacggaggcggggccctggctgcctctctccctgctcataggctggccgctcaggcctggccggcctcggggcctcgggattcgcggcggcgctgccaatcaggcgatcgggccccgcccccccggagttgggtgaaatagaggcgggcgtcaagtgtcagtagtcgcggggcaggtacgtgcgctcgcggttctctcgcggaggtcggcggtggcgggagcgggctccggagagcctgagagcacggtggggcggggcgggagaaagtggccgcccggaggacgttggcgtttacgtgtggaagagcggaagagttttgcttttcgtgcgcgccttcgaaaactgcctgccgctgtctgaggagtccacccgaaacctcccctcctccgccggcagccccgcgctgagctcgccgacccaagccagcgtgggcgaggtgggaagtgcgcccgacccgcgcctggagctgcgcccccgagtgcccatggctacaagggtgctgagcatgagcgcccgcctgggacccgtgccccagccgccggcgccgcaggacgagccggtgttcgcgcagctcaagccggtgctgggcgccgcgaatccggcccgcgacgcggcgctcttccccggcgaggagctgaagcacgcgcaccaccgcccgcaggcgcagcccgcgcccgcgcaggccccgcagccggcccagccgcccgccaccggcccgcggctgcctccagaggacctggtccagacaagatgtgaaatggagaagtatctgacacctcagcttcctccagttcctataattccagagcataaaaagtatagacgagacagtgcctcagtcgtagaccagttcttcactgacactgaagggttaccttacagtatcaacatgaacgtcttcctccctgacatcactcacctgagaactggcctctacaaatcccagagaccgtgcgtaacacacatcaagacagaacctgttgccattttcagccaccagagtgaaacgactgcccctcctccggccccgacccaggccctccctgagttcaccagtatattcagctcacaccagaccgcagctccagaggtgaacaatattttcatcaaacaagaacttcctacaccagatcttcatctttctgtccctacccagcagggccacctgtaccagctactgaatacaccggatctagatatgcccagttctacaaatcagacagcagcaatggacactcttaatgtttctatgtcagctgccatggcaggccttaacacacacacctctgctgttccgcagactgcagtgaaacaattccagggcatgcccccttgcacatacacaatgccaagtcagtttcttccacaacaggccacttactttcccccgtcaccaccaagctcagagcctggaagtccagatagacaagcagagatgctccagaatttaaccccacctccatcctatgctgctacaattgcttctaaactggcaattcacaatccaaatttacccaccaccctgccagttaactcacaaaacatccaacctgtcagatacagtatacctggcaattcacaaatagccattgaacaaatgtgtgggtttttaaaaattatatacatatatgagttgcctatatttgctattcaaaattttgtaaatatgcaaatcagctttataggtttattacaagttttttaggattcttttggggaagagtcataattcttttgaaaataaccatgaatacacttacagttaggatttgtggtaaggtacctctcaacattaccaaaatcatttctttagagggaaggaataatcattcaaatgaactttaaaaaagcaaatttcatgcactgattaaaataggattattttaaatacaaaaggcattttatatgaattataaactgaagagcttaaagatagttacaaaatacaaaagttcaacctcttacaataagctaaacgcaatgtcatttttaaaaagaaggacttagggtgtcgttttcacatatgacaatgttgcatttatgatgcagtttcaagtaccaaaacgttgaattgatgatgcagttttcatatatcgagatgttcgctcgtgcagtactgttggttaaatgacaatttatgtggattttgcatgtaatacacagtgagacacagtaattttatctaaattacagtgcagtttagttaatctattaatactgactcagtgtctgcctttaaatataaatgatatgttgaaaacttaaggaagcaaatgctacatatatgcaatataaaatagtaatgtgatgctgatgctgttaaccaaagggcagaataaataagcaaaatgccaaaaggggtcttaattgaaatgaaaatttaattttgtttttaaaatattgtttatctttatttattttgtggtaatatagtaagtttttttagaagacaattttcataacttgataaattatagttttgtttgttagaaaagttgctcttaaaagatgtaaatagatgacaaacgatgtaaataattttgtaagaggcttcaaaatgtttatacgtggaaacacacctacatgaaaagcagaaatcggttgctgttttgcttctttttccctcttatttttgtattgtggtcatttcctatgcaaataatggagcaaacagctgtatagttgtagaattttttgagagaatgagatgtttatatattaacgacaattttttttttggaaaataaaaagtgcctaaaaga

SEQ ID NO: 314424 - DNA, 425 bp, Homo sapiens
gcagttttaccagttacacagagtttcataaggttttggtcaaccagttattacacaatcgacaaaataagcctgatatgtttataagcaacactgaggagtttgccctagtaccttacacagggattgggggaatttttagtaggcgccgattgttcgttcttcccgagatggtgaatcaggtggattatgcattttatatctcttcttttttagacaagatgtgaaatggagaagtatctgacacctcagcttcctccagttcctataattccagagcataaaaagtatagacgagacagtgcctcagtcgtagaccagttcttcactgacactgaagggttaccttacagtatcaacatgaacgtcttcctccctgacatcactcacctgagaactggcctctacaaatcccagagaccgtg

SEQ ID NO: 314425 - DNA, 436 bp, Homo sapiens
tctttgaaattccttctccggtgttatctaggatgtttgcattacaagcaggccgctttacctcctttgttcgttgtcacaggtgtgaaaagccatacaagtgtacctgggaaggctgcgactggaggttcgcgcgatcggatgagctgacccgccactaccggaagcacacaggcgccaagcccttccagtgcggggtgtgcaaccgcagcttctcgcgctctgaccacctggccctgcatatgaagaggcaccagaactgagcactgcccgtgtgacccgttccaggtcccctgggctccctcaaatgacagacctaactattcctgtgtaaaaacaacaaaaacaaaaaaaaaacaagaaaaccacaactaaaactggaaatgtatattttgtatatttgagaaaacagggaatacattgtattaataccaaa

SEQ ID NO: 314426 - DNA, 3563 bp, Homo sapiens
gcggccgccctgcgcgcgaagctcgtggcccgagaggggtgcggtcgggccgacggaggcggggccctggctgcctctctccctgctcataggctggccgctcaggcctggccggcctcggggcctcgggattcgcggcggcgctgccaatcaggcgatcgggccccgcccccccggagttgggtgaaatagaggcgggcgtcaagtgtcagtagtcgcggggcaggtacgtgcgctcgcggttctctcgcggaggtcggcggtggcgggagcgggctccggagagcctgagagcacggtggggcggggcgggagaaagtggccgcccggaggacgttggcgtttacgtgtggaagagcggaagagttttgcttttcgtgcgcgccttcgaaaactgcctgccgctgtctgaggagtccacccgaaacctcccctcctccgccggcagccccgcgctgagctcgccgacccaagccagcgtgggcgaggtgggaagtgcgcccgacccgcgcctggagctgcgcccccgagtgcccatggctacaagggtgctgagcatgagcgcccgcctgggacccgtgccccagccgccggcgccgcaggacgagccggtgttcgcgcagctcaagccggtgctgggcgccgcgaatccggcccgcgacgcggcgctcttccccggcgaggagctgaagcacgcgcaccaccgcccgcaggcgcagcccgcgcccgcgcaggccccgcagccggcccagccgcccgccaccggcccgcggctgcctccagaggacctggtccagacaagatgtgaaatggagaagtatctgacacctcagcttcctccagttcctataattccagagcataaaaagtatagacgagacagtgcctcagtcgtagaccagttcttcactgacactgaagggttaccttacagtatcaacatgaacgtcttcctccctgacatcactcacctgagaactggcctctacaaatcccagagaccgtgcgtaacacacatcaagacagaacctgttgccattttcagccaccagagtgaaacgactgcccctcctccggccccgacccaggccctccctgagttcaccagtatattcagctcacaccagaccgcagctccagaggtgaacaatattttcatcaaacaagaacttcctacaccagatcttcatctttctgtccctacccagcagggccacctgtaccagctactgaatacaccggatctagatatgcccagttctacaaatcagacagcagcaatggacactcttaatgtttctatgtcagctgccatggcaggccttaacacacacacctctgctgttccgcagactgcagtgaaacaattccagggcatgcccccttgcacatacacaatgccaagtcagtttcttccacaacaggccacttactttcccccgtcaccaccaagctcagagcctggaagtccagatagacaagcagagatgctccagaatttaaccccacctccatcctatgctgctacaattgcttctaaactggcaattcacaatccaaatttacccaccaccctgccagttaactcacaaaacatccaacctgtcagatacaatagaaggagtaaccccgatttggagaaacgacgcatccactactgcgattaccctggttgcacaaaagtttataccaagtcttctcatttaaaagctcacctgaggactcacactggtgaaaagccatacaagtgtacctgggaaggctgcgactggaggttcgcgcgatcggatgagctgacccgccactaccggaagcacacaggcgccaagcccttccagtgcggggtgtgcaaccgcagcttctcgcgctctgaccacctggccctgcatatgaagaggcaccagaactgagcactgcccgtgtgacccgttccaggtcccctgggctccctcaaatgacagacctaactattcctgtgtaaaaacaacaaaaacaaaaaaaaaacaagaaaaccacaactaaaactggaaatgtatattttgtatatttgagaaaacagggaatacattgtattaataccaaagtgtttggtcattttaagaatctggaatgcttgctgtaatgtatatggctttactcaagcagatctcatctcatgacaggcagccacgtctcaacatgggtaaggggtgggggtggaggggagtgtgtgcagcgtttttacctaggcaccatcatttaatgtgacagtgttcagtaaacaaatcagttggcaggcaccagaagaagaatggattgtatgtcaagattttacttggcattgagtagtttttttcaatagtaggtaattccttagagatacagtatacctggcaattcacaaatagccattgaacaaatgtgtgggtttttaaaaattatatacatatatgagttgcctatatttgctattcaaaattttgtaaatatgcaaatcagctttataggtttattacaagttttttaggattcttttggggaagagtcataattcttttgaaaataaccatgaatacacttacagttaggatttgtggtaaggtacctctcaacattaccaaaatcatttctttagagggaaggaataatcattcaaatgaactttaaaaaagcaaatttcatgcactgattaaaataggattattttaaatacaaaaggcattttatatgaattataaactgaagagcttaaagatagttacaaaatacaaaagttcaacctcttacaataagctaaacgcaatgtcatttttaaaaagaaggacttagggtgtcgttttcacatatgacaatgttgcatttatgatgcagtttcaagtaccaaaacgttgaattgatgatgcagttttcatatatcgagatgttcgctcgtgcagtactgttggttaaatgacaatttatgtggattttgcatgtaatacacagtgagacacagtaattttatctaaattacagtgcagtttagttaatctattaatactgactcagtgtctgcctttaaatataaatgatatgttgaaaacttaaggaagcaaatgctacatatatgcaatataaaatagtaatgtgatgctgatgctgttaaccaaagggcagaataaataagcaaaatgccaaaaggggtcttaattgaaatgaaaatttaattttgtttttaaaatattgtttatctttatttattttgtggtaatatagtaagtttttttagaagacaattttcataacttgataaattatagttttgtttgttagaaaagttgctcttaaaagatgtaaatagatgacaaacgatgtaaataattttgtaagaggcttcaaaatgtttatacgtggaaacacacctacatgaaaagcagaaatcggttgctgttttgcttctttttccctcttatttttgtattgtggtcatttcctatgcaaataatggagcaaacagctgtatagttgtagaattttttgagagaatgagatgtttatatattaacgacaattttttttttggaaaataaaaagtgcctaaaaga

SEQ ID NO: 314427 - DNA, 2475 bp, Homo sapiens
gcggccgccctgcgcgcgaagctcgtggcccgagaggggtgcggtcgggccgacggaggcggggccctggctgcctctctccctgctcataggctggccgctcaggcctggccggcctcggggcctcgggattcgcggcggcgctgccaatcaggcgatcgggccccgcccccccggagttgggtgaaatagaggcgggcgtcaagtgtcagtagtcgcggggcaggtacgtgcgctcgcggttctctcgcggaggtcggcggtggcgggagcgggctccggagagcctgagagcacggtggggcggggcgggagaaagtggccgcccggaggacgttggcgtttacgtgtggaagagcggaagagttttgcttttcgtgcgcgccttcgaaaactgcctgccgctgtctgaggagtccacccgaaacctcccctcctccgccggcagccccgcgctgagctcgccgacccaagccagcgtgggcgaggtgggaagtgcgcccgacccgcgcctggagctgcgcccccgagtgcccatggctacaagggtgctgagcatgagcgcccgcctgggacccgtgccccagccgccggcgccgcaggacgagccggtgttcgcgcagctcaagccggtgctgggcgccgcgaatccggcccgcgacgcggcgctcttccccggcgaggagctgaagcacgcgcaccaccgcccgcaggcgcagcccgcgcccgcgcaggccccgcagccggcccagccgcccgccaccggcccgcggctgcctccagaggacctggtccagacaagatgtgaaatggagaagtatctgacacctcagcttcctccagttcctataattccagagcataaaaagtatagacgagacagtgcctcagtcgtagaccagttcttcactgacactgaagggttaccttacagtatcaacatgaacgtcttcctccctgacatcactcacctgagaactggcctctacaaatcccagagaccgtgcgtaacacacatcaagacagaacctgttgccattttcagccaccagagtgaaacgactgcccctcctccggccccgacccaggccctccctgagttcaccagtatattcagctcacaccagaccgcagctccagaggtgaacaatattttcatcaaacaagaacttcctacaccagatcttcatctttctgtccctacccagcagggccacctgtaccagctactgaatacaccggatctagatatgcccagttctacaaatcagacagcagcaatggacactcttaatgtttctatgtcagctgccatggcaggccttaacacacacacctctgctgttccgcagactgcagtgaaacaattccagggcatgcccccttgcacatacacaatgccaagtcagtttcttccacaacaggccacttactttcccccgtcaccaccaagctcagagcctggaagtccagatagacaagcagagatgctccagaatttaaccccacctccatcctatgctgctacaattgcttctaaactggcaattcacaatccaaatttacccaccaccctgccagttaactcacaaaacatccaacctgtcagatacaatagaaggagtaaccccgatttggagaaacgacgcatccactactgcgattaccctggttgcacaaaagtttataccaagtcttctcatttaaaagctcacctgaggactcacactggtgaaaagccatacaagtgtacctgggaaggctgcgactggaggttcgcgcgatcggatgagctgacccgccactaccggaagcacacaggcgccaagcccttccagtgcggggtgtgcaaccgcagcttctcgcgctctgaccacctggccctgcatatgaagaggcaccagaactgagcactgcccgtgtgacccgttccaggtcccctgggctccctcaaatgacagacctaactattcctgtgtaaaaacaacaaaaacaaaaaaaaaacaagaaaaccacaactaaaactggaaatgtatattttgtatatttgagaaaacagggaatacattgtattaataccaaagtgtttggtcattttaagaatctggaatgcttgctgtaatgtatatggctttactcaagcagatctcatctcatgacaggcagccacgtctcaacatgggtaaggggtgggggtggaggggagtgtgtgcagcgtttttacctaggcaccatcatttaatgtgacagtgttcagtaaacaaatcagttggcaggcaccagaagaagaatggattgtatgtcaagattttacttggcattgagtagtttttttcaatagtaggtaattccttagagatacagtatacctggcaattcacaaatagccattgaacaaatgtgtggagcctcggcgtgtgcagcaacaacttcgtccatccggacttggcctagtatggaccctcggcgtgtgca

SEQ ID NO: 314428 - DNA, 2953 bp, Homo sapiens
aaccactttagctcagacctttcttttaaccttgcctatcatgtttcgagtcagaatttaaatactgtgcagtttaagctacaatacgcttggcctataacttggttccaggcatttatatttatgtcacttttgtctacttattatactaacaaggtggaaaaagcaatcccagtctctccaaaagacaagatgtgaaatggagaagtatctgacacctcagcttcctccagttcctataattccagagcataaaaagtatagacgagacagtgcctcagtcgtagaccagttcttcactgacactgaagggttaccttacagtatcaacatgaacgtcttcctccctgacatcactcacctgagaactggcctctacaaatcccagagaccgtgcgtaacacacatcaagacagaacctgttgccattttcagccaccagagtgaaacgactgcccctcctccggccccgacccaggccctccctgagttcaccagtatattcagctcacaccagaccgcagctccagaggtgaacaatattttcatcaaacaagaacttcctacaccagatcttcatctttctgtccctacccagcagggccacctgtaccagctactgaatacaccggatctagatatgcccagttctacaaatcagacagcagcaatggacactcttaatgtttctatgtcagctgccatggcaggccttaacacacacacctctgctgttccgcagactgcagtgaaacaattccagggcatgcccccttgcacatacacaatgccaagtcagtttcttccacaacaggccacttactttcccccgtcaccaccaagctcagagcctggaagtccagatagacaagcagagatgctccagaatttaaccccacctccatcctatgctgctacaattgcttctaaactggcaattcacaatccaaatttacccaccaccctgccagttaactcacaaaacatccaacctgtcagatacaatagaaggagtaaccccgatttggagaaacgacgcatccactactgcgattaccctggttgcacaaaagtttataccaagtcttctcatttaaaagctcacctgaggactcacactggtgaaaagccatacaagtgtacctgggaaggctgcgactggaggttcgcgcgatcggatgagctgacccgccactaccggaagcacacaggcgccaagcccttccagtgcggggtgtgcaaccgcagcttctcgcgctctgaccacctggccctgcatatgaagaggcaccagaactgagcactgcccgtgtgacccgttccaggtcccctgggctccctcaaatgacagacctaactattcctgtgtaaaaacaacaaaaacaaaaaaaaaacaagaaaaccacaactaaaactggaaatgtatattttgtatatttgagaaaacagggaatacattgtattaataccaaagtgtttggtcattttaagaatctggaatgcttgctgtaatgtatatggctttactcaagcagatctcatctcatgacaggcagccacgtctcaacatgggtaaggggtgggggtggaggggagtgtgtgcagcgtttttacctaggcaccatcatttaatgtgacagtgttcagtaaacaaatcagttggcaggcaccagaagaagaatggattgtatgtcaagattttacttggcattgagtagtttttttcaatagtaggtaattccttagagatacagtatacctggcaattcacaaatagccattgaacaaatgtgtgggtttttaaaaattatatacatatatgagttgcctatatttgctattcaaaattttgtaaatatgcaaatcagctttataggtttattacaagttttttaggattcttttggggaagagtcataattcttttgaaaataaccatgaatacacttacagttaggatttgtggtaaggtacctctcaacattaccaaaatcatttctttagagggaaggaataatcattcaaatgaactttaaaaaagcaaatttcatgcactgattaaaataggattattttaaatacaaaaggcattttatatgaattataaactgaagagcttaaagatagttacaaaatacaaaagttcaacctcttacaataagctaaacgcaatgtcatttttaaaaagaaggacttagggtgtcgttttcacatatgacaatgttgcatttatgatgcagtttcaagtaccaaaacgttgaattgatgatgcagttttcatatatcgagatgttcgctcgtgcagtactgttggttaaatgacaatttatgtggattttgcatgtaatacacagtgagacacagtaattttatctaaattacagtgcagtttagttaatctattaatactgactcagtgtctgcctttaaatataaatgatatgttgaaaacttaaggaagcaaatgctacatatatgcaatataaaatagtaatgtgatgctgatgctgttaaccaaagggcagaataaataagcaaaatgccaaaaggggtcttaattgaaatgaaaatttaattttgtttttaaaatattgtttatctttatttattttgtggtaatatagtaagtttttttagaagacaattttcataacttgataaattatagttttgtttgttagaaaagttgctcttaaaagatgtaaatagatgacaaacgatgtaaataattttgtaagaggcttcaaaatgtttatacgtggaaacacacctacatgaaaagcagaaatcggttgctgttttgcttctttttccctcttatttttgtattgtggtcatttcctatgcaaataatggagcaaacagctgtatagttgtagaattttttgagagaatgagatgtttatatattaacgacaattttttttttggaaaataaaaagtgcctaaaaga

SEQ ID NO: 314429 - DNA, 2498 bp, Homo sapiens
ggtgaactcaggagggcctgggtcggggccggaggaggggcagtatattcagctcacaccagaccgcagctccagaggtgaacaatattttcatcaaacaagaacttcctacaccagatcttcatctttctgtccctacccagcagggccacctgtaccagctactgaatacaccggatctagatatgcccagttctacaaatcagacagcagcaatggacactcttaatgtttctatgtcagctgccatggcaggccttaacacacacacctctgctgttccgcagactgcagtgaaacaattccagggcatgcccccttgcacatacacaatgccaagtcagtttcttccacaacaggccacttactttcccccgtcaccaccaagctcagagcctggaagtccagatagacaagcagagatgctccagaatttaaccccacctccatcctatgctgctacaattgcttctaaactggcaattcacaatccaaatttacccaccaccctgccagttaactcacaaaacatccaacctgtcagatacaatagaaggagtaaccccgatttggagaaacgacgcatccactactgcgattaccctggttgcacaaaagtttataccaagtcttctcatttaaaagctcacctgaggactcacactggtgaaaagccatacaagtgtacctgggaaggctgcgactggaggttcgcgcgatcggatgagctgacccgccactaccggaagcacacaggcgccaagcccttccagtgcggggtgtgcaaccgcagcttctcgcgctctgaccacctggccctgcatatgaagaggcaccagaactgagcactgcccgtgtgacccgttccaggtcccctgggctccctcaaatgacagacctaactattcctgtgtaaaaacaacaaaaacaaaaaaaaaacaagaaaaccacaactaaaactggaaatgtatattttgtatatttgagaaaacagggaatacattgtattaataccaaagtgtttggtcattttaagaatctggaatgcttgctgtaatgtatatggctttactcaagcagatctcatctcatgacaggcagccacgtctcaacatgggtaaggggtgggggtggaggggagtgtgtgcagcgtttttacctaggcaccatcatttaatgtgacagtgttcagtaaacaaatcagttggcaggcaccagaagaagaatggattgtatgtcaagattttacttggcattgagtagtttttttcaatagtaggtaattccttagagatacagtatacctggcaattcacaaatagccattgaacaaatgtgtgggtttttaaaaattatatacatatatgagttgcctatatttgctattcaaaattttgtaaatatgcaaatcagctttataggtttattacaagttttttaggattcttttggggaagagtcataattcttttgaaaataaccatgaatacacttacagttaggatttgtggtaaggtacctctcaacattaccaaaatcatttctttagagggaaggaataatcattcaaatgaactttaaaaaagcaaatttcatgcactgattaaaataggattattttaaatacaaaaggcattttatatgaattataaactgaagagcttaaagatagttacaaaatacaaaagttcaacctcttacaataagctaaacgcaatgtcatttttaaaaagaaggacttagggtgtcgttttcacatatgacaatgttgcatttatgatgcagtttcaagtaccaaaacgttgaattgatgatgcagttttcatatatcgagatgttcgctcgtgcagtactgttggttaaatgacaatttatgtggattttgcatgtaatacacagtgagacacagtaattttatctaaattacagtgcagtttagttaatctattaatactgactcagtgtctgcctttaaatataaatgatatgttgaaaacttaaggaagcaaatgctacatatatgcaatataaaatagtaatgtgatgctgatgctgttaaccaaagggcagaataaataagcaaaatgccaaaaggggtcttaattgaaatgaaaatttaattttgtttttaaaatattgtttatctttatttattttgtggtaatatagtaagtttttttagaagacaattttcataacttgataaattatagttttgtttgttagaaaagttgctcttaaaagatgtaaatagatgacaaacgatgtaaataattttgtaagaggcttcaaaatgtttatacgtggaaacacacctacatgaaaagcagaaatcggttgctgttttgcttctttttccctcttatttttgtattgtggtcatttcctatgcaaataatggagcaaacagctgtatagttgtagaattttttgagagaatgagatgtttatatattaacgacaattttttttttggaaaataaaaagtgcctaaaaga

SEQ ID NO: 314430 - DNA, 3622 bp, Homo sapiens
gcggccgccctgcgcgcgaagctcgtggcccgagaggggtgcggtcgggccgacggaggcggggccctggctgcctctctccctgctcataggctggccgctcaggcctggccggcctcggggcctcgggattcgcggcggcgctgccaatcaggcgatcgggccccgcccccccggagttgggtgaaatagaggcgggcgtcaagtgtcagtagtcgcggggcaggtacgtgcgctcgcggttctctcgcggaggtcggcggtggcgggagcgggctccggagagcctgagagcacggtggggcggggcgggagaaagtggccgcccggaggacgttggcgtttacgtgtggaagagcggaagagttttgcttttcgtgcgcgccttcgaaaactgcctgccgctgtctgaggagtccacccgaaacctcccctcctccgccggcagccccgcgctgagctcgccgacccaagccagcgtgggcgaggtgggaagtgcgcccgacccgcgcctggagctgcgcccccgagtgcccatggctacaagggtgctgagcatgagcgcccgcctgggacccgtgccccagccgccggcgccgcaggacgagccggtgttcgcgcagctcaagccggtgctgggcgccgcgaatccggcccgcgacgcggcgctcttccccggcgaggagctgaagcacgcgcaccaccgcccgcaggcgcagcccgcgcccgcgcaggccccgcagccggcccagccgcccgccaccggcccgcggctgcctccagaggacctggtccagacaagatgtgaaatggagaagtatctgacacctcagcttcctccagttcctataattccagagcataaaaagtatagacgagacagtgcctcagtcgtagaccagttcttcactgacactgaagggttaccttacagtatcaacatgaacgtcttcctccctgacatcactcacctgagaactggcctctacaaatcccagagaccgtgcgtaacacacatcaagacagaacctgttgccattttcagccaccagagtgaaacgactgcccctcctccggccccgacccaggccctccctgagttcaccagtatattcagctcacaccagaccgcagctccagaggtgaacaatattttcatcaaacaagaacttcctacaccagatcttcatctttctgtccctacccagcagggccacctgtaccagctactgaatacaccggatctagatatgcccagttctacaaatcagacagcagcaatggacactcttaatgtttctatgtcagctgccatggcaggccttaacacacacacctctgctgttccgcagactgcagtgaaacaattccagggcatgcccccttgcacatacacaatgccaagtcagtttcttccacaacaggccacttactttcccccgtcaccaccaagctcagagcctggaagtccagatagacaagcagagatgctccagaatttaaccccacctccatcctatgctgctacaattgcttctaaactggcaattcacaatccaaatttacccaccaccctgccagttaactcacaaaacatccaacctgtcagatacaatagaaggagtaaccccgatttggagaaacgacgcatccactactgcgattaccctggttgcacaaaagtttataccaagtcttctcatttaaaagctcacctgaggactcacactgtgtgaagttatcagtaccagactattttgcttcaatctgcaaaaggaaggtgtgtgaaggtgaaaagccatacaagtgtacctgggaaggctgcgactggaggttcgcgcgatcggatgagctgacccgccactaccggaagcacacaggcgccaagcccttccagtgcggggtgtgcaaccgcagcttctcgcgctctgaccacctggccctgcatatgaagaggcaccagaactgagcactgcccgtgtgacccgttccaggtcccctgggctccctcaaatgacagacctaactattcctgtgtaaaaacaacaaaaacaaaaaaaaaacaagaaaaccacaactaaaactggaaatgtatattttgtatatttgagaaaacagggaatacattgtattaataccaaagtgtttggtcattttaagaatctggaatgcttgctgtaatgtatatggctttactcaagcagatctcatctcatgacaggcagccacgtctcaacatgggtaaggggtgggggtggaggggagtgtgtgcagcgtttttacctaggcaccatcatttaatgtgacagtgttcagtaaacaaatcagttggcaggcaccagaagaagaatggattgtatgtcaagattttacttggcattgagtagtttttttcaatagtaggtaattccttagagatacagtatacctggcaattcacaaatagccattgaacaaatgtgtgggtttttaaaaattatatacatatatgagttgcctatatttgctattcaaaattttgtaaatatgcaaatcagctttataggtttattacaagttttttaggattcttttggggaagagtcataattcttttgaaaataaccatgaatacacttacagttaggatttgtggtaaggtacctctcaacattaccaaaatcatttctttagagggaaggaataatcattcaaatgaactttaaaaaagcaaatttcatgcactgattaaaataggattattttaaatacaaaaggcattttatatgaattataaactgaagagcttaaagatagttacaaaatacaaaagttcaacctcttacaataagctaaacgcaatgtcatttttaaaaagaaggacttagggtgtcgttttcacatatgacaatgttgcatttatgatgcagtttcaagtaccaaaacgttgaattgatgatgcagttttcatatatcgagatgttcgctcgtgcagtactgttggttaaatgacaatttatgtggattttgcatgtaatacacagtgagacacagtaattttatctaaattacagtgcagtttagttaatctattaatactgactcagtgtctgcctttaaatataaatgatatgttgaaaacttaaggaagcaaatgctacatatatgcaatataaaatagtaatgtgatgctgatgctgttaaccaaagggcagaataaataagcaaaatgccaaaaggggtcttaattgaaatgaaaatttaattttgtttttaaaatattgtttatctttatttattttgtggtaatatagtaagtttttttagaagacaattttcataacttgataaattatagttttgtttgttagaaaagttgctcttaaaagatgtaaatagatgacaaacgatgtaaataattttgtaagaggcttcaaaatgtttatacgtggaaacacacctacatgaaaagcagaaatcggttgctgttttgcttctttttccctcttatttttgtattgtggtcatttcctatgcaaataatggagcaaacagctgtatagttgtagaattttttgagagaatgagatgtttatatattaacgacaattttttttttggaaaataaaaagtgcctaaaaga

SEQ ID NO: 314431 - DNA, 200 bp, Homo sapiens
caatagaaggagtaaccccgatttggagaaacgacgcatccactactgcgattaccctggtatgtgctcttacctggttgaagcatcaatagatgtagtgtgtgtgtgtgtgtgtctgtgtgcgcgcgcgtgtgcgtgtgtgcacgcgcgtgcccttttcaacctcatggctttaaataggaaagttgtacttgacagta

SEQ ID NO: 314432 - DNA, 10371 bp, Homo sapiens
  misc_feature (6243)..(6243): n is a, c, g, or t
  misc_feature (6308)..(6308): n is a, c, g, or t
gcacgctgggacctgcagaagcactctttgctaattgtgatcggcgatatcggtacagagagtcagctgagggccgtgcgggcccaccttgaacaagggattctctcctggaacattgacctgtcatcctttgacttgaaccaacagttgagactcttcattacccggcacctagctcacttctcctcagaggtcaaaggccagaggaccctttgccaccagagtgagatcctagagaccatcatcctggtaaatcccagtgcagacagcatcagctctgaggttcatcatcttcttagcagctcatcagcttataaactactaatcttgagtgggcaaagtttagagcctgggggagacctcatcctacagagtggcacctactcatatgaaaactttgcccaggtccttcacaaccccgagatttcccaattgctcagcaatagagaccctgggatacaggccttccttaccgtgtcctgcttaggggaaggtgattggagccacctgggattatccagttcccaagagaccctgcacctccggctaaaccctgagcccactctgcccaccatggacggcgtggctgagttctccgagtatgtctctgagactgtggacgtgccatccccatttgacctactagagccccccacctcagggggcttcctcaagctctccaagccttgttgctacatcttcccaggtggtcgtggggactctgccctctttgctgtcaatggtttcaacatcctggtggatggtggctctgatcgcaagtcctgtttttggaagctggtacggcacttggaccgcattgactcggtgctactcacacacattggggcagacaacctgccaggcatcaatggactactgcagcgcaaagtggcagagctagaggaggagcagtcccagggctctagcagttacagcgactgggtgaagaaccttatctctcctgagcttggagttgtctttttcaacgtgcctgagaagctgcggcttcctgatgcctcccggaaagccaagcgtagcattgaggaggcctgcctcactctgcagcacttaaaccgcctgggcatccaggctgagcctctatatcgtgtggtcagcaataccattgagccactgaccctcttccacaaaatgggtgtgggccggctggacatgtatgtcctcaaccctgtcaaggacagcaaggagatgcagttcctcatgcaaaagtgggcaggcaatagtaaagccaagacaggcatcgtgctgcccaatgggaaggaggctgagatctccgtgccctaccttacctctatcactgctctggtggtctggctaccagccaatcccactgagaagattgtgcgtgtgctttttccaggaaatgctccccaaaacaagatcttggagggcctagaaaagcttcggcatctggacttcctgcgttaccctgtggccacgcagaaggacctggcttctggggctgtgcctaccaacctcaagcccagcaaaatcaaacagcgggctgatagcaaggagagcctcaaagccactaccaagacggccgtgagcaagttggccaaacgggaggaggtggtagaagagggagccaaggaggcacgttcagagctggccaaggagttagccaagacagagaagaaggcaaaagagtcatctgagaagcccccagagaagcctgccaagcctgagagggtgaagacagagtcaagtgaggcactgaaggcagagaagcgaaagctgatcaaagacaaggtagggaaaaagcaccttaaagaaaagatatcaaagctggaagaaaaaaaagacaaggagaaaaaagagatcaaaaaggagaggaaagagctcaagaaggatgaaggaaggaaggaggagaagaaggatgccaagaaggaggagaagaggaaagataccaaacctgagctcaagaagatttccaagccagacctaaagccctttactcctgaggtacgtaagaccctctataaagccaaggtccctggaagagtcaaaatagacaggagccgtgctatccgtggggagaaggagctgtcttctgagccccagacacccccagcccagaagggaactgtaccactcccaaccatcagtgggcacagggagctggtcctatcctcaccagaggacctcacacaggactttgaggagatgaagcgtgaggagagggctttgctggctgaacaaagggacacaggactaggagataagccattccctctagacactgcagaggagggacccccaagtacagctatccagggaacaccaccctctgttccagggctgggacaagaagaacatgtgatgaaggagaaagagcttgtcccagaggtccctgaggaacaaggcagcaaggacagaggcctagactctggggctgaaacagaggaagagaaagatacctgggaggaaaagaagcagagggaagcagagaggctcccagacagaacagaagccagagaggaaagtgaacctgaagtaaaggaggatgtgatagaaaaggctgagttagaagaaatggaggaggtacacccttcagatgaggaggaagaggacgcgacaaaagctgagggtttttaccaaaaacatatgcaggaacccttgaaggtaactccaaggagccgggaggcttttgggggtcgggaattgggactccagggcaaggcccctgagaaggagacctcgttattcctaagcagcctgaccacacctgcaggagccactgagcatgtctcttacatccaggatgagacaatccctggctactcagagactgagcagaccatctcagatgaggagatccatgatgagccggaggagcgcccagctccacccagatttcatacaagtacatatgacctgcccgggcctgaaggtgctggcccattcgaagccagccaacctgccgatagtgctgttcctgctacctctggcaaagtctatggaacgccagagactgaactcacctaccccactaacatagtggctgcccctttggctgaagaggaacatgtgtcctcggccacttcaatcactgagtgtgacaaactttcttcctttgccacatcagtggctgaggaccaatctgtggcctcacttacagctccccagacagaggagacaggcaagagctccctgctgcttgacacagtcacaagcatcccttcctcccgtactgaagctacgcagggcttggactatgtgccatcagctggtaccatctcacccacctcctcactggaagaagacaagggcttcaaatcaccaccctgtgaggacttctctgtgactggggagtcagagaagagaggagagatcatagggaaaggcttgtctggagagagagctgtggaagaggaagaggaggagacagcaaacgtagagatgtctgagaaactttgcagtcaatatggaactccagtgtttagtgcccctgggcatgccctacatccaggagaaccagcccttggagaagcagaggagcggtgccttagcccagatgacagcacagtgaagatggcttctcctccaccatctggcccacccagtgccacccacacaccctttcatcagtccccagtggaagaaaagtctgagccccaagactttcaggaggcagactcctggggagacactaagcgcacaccaggtgtgggcaaagaagatgctgctgaggagacagtcaagccagggcctgaagagggcacactagagaaggaagagaaagttcctcctcccaggagcccccaggcccaggaagcacctgtcaacattgatgaggggcttacaggctgtaccattcaactgttgccagcacaggataaagcaatagtctttgagattatggaggcaggagagcccacaggcccaattctgggagcagaagcccttcccggaggtttgaggactttaccccaagaacctggcaaacctcagaaagatgaggtgctcagatatcctgaccgaagcctctctcctgaagatgcagaatccctctctgtcctcagcgtgccctccccagacactgccaaccaagagcctacccccaagtctccctgtggcctgacagaacagtacctacacaaagaccgttggccagaggtatctccagaagacacccagtcactttctctgtcagaagagagtcccagcaaggagacctccctggatgtctcttctaagcagctctctccagaaagccttggcaccctccagtttggggaactaaaccttgggaaggaagaaatggggcatctgatgcaggccgaggatacctctcaccacacagctcccatgtctgttccagagccccatgcagccacagcgtcacctcccacagatgggacaactcgatactctgcacagacagacatcacagatgacagccttgacaggaagtcacctgccagctcattctctcactctacaccttcaggaaatgggaagtacttacctggggcgatcacaagccctgatgaacacattctgacacctgatagctccttctccaagagtcctgagtctttgccaggccctgccttggaggacattgccataaagtgggaagataaagttccagggttgaaagacagaacctcagaacagaagaaggaacctgagccaaaggatgaagttttacagcagaaagacaaaactctggagcacaaggaggtggtagagccgaaggatacagccatctatcagaaagatgaggctctgcatgtaaagaatgaggctgtgaaacagcaggataaggctttagaacaaaagggcagagacttagagcaaaaagacacagccctagaacagaaggacaaggccctggaaccaaaagacaaagacttagaagaaaaagacaaggccctggaacagaaggataagattccagaagagaaagacaaagccttagaacaaaaggatacagccctggaacagaaggacaaggccctggaaccaaaagataaagacttggaacaaaaggacagggtcctagaacagaaggagaagatcccagaagagaaagacaaagccttagatcaaaaagtcagaagtgttgaacataaggctccggaggacacggtcgctgaaatgaaggacagagacctagaacagacagacaaagcccctgaacagaaacaccaggcccaggaacaaaaggataaagtctcagaaaagaaggatcaggccttagaacaaaaatactgggctttgggacagaaggatgaagccctggaacaaaacattcaggctctggaagagaaccaccaaactcaggagcaggagagcctagtgcaggaggataaaaccaggaaaccaaagatgctagaggaaaaatccccagaaaaggtcaaggccatggaagagaagttagaagctcttctggagaagaccaaagctctgggcctggaagagagcctagtgcaggagggcagggccagagagcaggaagaaaagtactggagggggcaggatgtggtccaggagtggcaagaaacatctcctaccagagaggagccggctggagaacagaaagagcttgccccggcatgggaggacacatctcctgagcaggacaataggtattggaggggcagagaggatgtggccttggaacaggacacatactggagggagctaagctgtgagcggaaggtctggttccctcacgagctggatggccagggggcccgcccacactacactgaggaacgggaaagcactttcctagatgagggcccagatgatgagcaagaagtacccctgcgggaacacgcaacccggagcccctgggcctcagacttcaaggatttccaggaatcctcaccacagaaggggctagaggtggagcgctggcttgctgaatcaccagttgggttgccaccagaggaagaggacaaactgacccgctctccctttgagatcatctcccctccagcttccccacctgagatggttggacaaagggttccttcagccccaggacaagagagtcctatcccagaccctaagctcatgccacacatgaagaatgaacccactactccctcatggctggctgacatcccaccctgggtgcccaaggacagacccctcccccctgcacccctctccccagctcctggtccccccacacctgccccggaatcccatactcctgcacccttctcttggggcacagccgagtatgacagtgtggtggctgcagtncaggagggggcagctgagttggaaggtgggccatactcccccctggggaaggactaccgcaaggntgaaggggaaagggaagaagaaggtagggctgaggctcctgacaaaagctcacacagctcaaaggtaccagaggccagcaaaagccatgccaccacggagcctgagcagactgagccggagcagagagagcccacaccctatcctgatgagagaagctttcagtatgcagacatctatgagcagatgatgcttactgggcttggccctgcatgccccactagagagcctccacttggagcagctggggattggcccccatgcctctcaaccaaggaggcagctgccggccgaaacacatctgcagagaaggagctttcatctcctatctcacccaagagcctccagtctgacactccaaccttcagctatgcagccctggcaggacccactgtacccccaaggccagagccagggccaagtatggagcccagcctcaccccacctgcagttcccccccgtgctcctatcctgagcaaaggcccaagcccccctcttaatggtaacatcctgagctgcagcccagataggaggtccccatcccccaaggaatcaggccggagtcactgggatgacagcactagtgactcagaactggagaagggggctcgggaacagccagaaaaagaggcccaatccccaagtcctcctcaccccattcctatggggtcccccacattatggccagaaactgaggcacatgttagccctcccttggactcacacctggggcctgcccgacccagtctggacttccctgcttcagcctttggcttctcctcattgcagccagctcccccacagctgccctctccagctgaaccccgctcggcaccctgtggctcccttgccttctctggggatcgagctctggctctggctccaggaccccccaccagaacccggcatgatgaatacctggaagtgaccaaggcccccagcctggattcctcactgccccagctcccatcacccagttctcctggggcccctctcctctccaatctgccacgacctgcctcaccagccctgtctgagggctcctcctctgaggctaccacgcctgtgatttcaagtgtggcggagcgcttctctccaagccttgaggctgcagaacaggagtctggagagctggacccaggaatggaaccagctgcccacagcctctgggacctcactcctctgagcccagcacccccagcttcactggacttggccctagctccagctccaagcctgcctggagacatgggtgatggcatcctgccgtgccacctggagtgctcagaggcagccacggagaagccaagccccttccaggttccctctgaggattgtgcagccaatggcccaactgaaaccagccctaaccccccaggccctgccccagccaaggctgaaaatgaagaggctgcggcttgccctgcctgggaacgtggggcctggcctgaaggagctgagaggagctcccggcctgacacattgctctcccctgagcagccagtgtgtcctgcagggggctccgggggcccacccagcagtgcctctcctgaggtcgaagctgggccccagggatgtgccactgagcctcggccccatcgtggggagctctccccatccttcctgaacccacctctgcccccatccatagatgatagggacctctcaactgaggaagttcggctagtaggaagaggggggcggcgccgggtaggggggccagggaccactgggggcccatgccctgtgactgatgagacaccccctacatcagccagtgactcaggctcctcacagtcagattctgatgtcccgccagaaactgaggagtgtccgtccatcacagctgaggcagccctcgactcagatgaagatggagacttcctacctgtggacaaagctgggggtgtcagtggtactcaccaccccaggcctggccatgacccacctcctctcccacagccagacccccgcccatcccctccccgccctgatgtgtgcatggctgaccccgaggggctcagctcagagtctgggagagtagagaggctacgggagaaggaaaaggttcaggggcgagtagggcgtagggccccaggtaaggacaagccagtgtcccctgcacggcgtctggttcttcggggaaaacgctcacccacccctggtaaagggcctgcagatcgagcatcccgggccccacctcgaccacgcagcaccacaagccaggtcaccccagcagaggaaaaggatggacacagccccatgtccaaaggcctagtcaatggactcaaggcaggaccaatggccttgagttccaagggcagctctggtgcccctgtatatgtggatctcgcctacatcccgaatcattgcagtggcaagactgctgaccttgacttcttccgtcgagtgcgtgcatcctactatgtggtcagtgggaatgaccctgccaatggcgagccaagccgggctgtgctggatgccctgctggagggcaaggcccagtggggggagaatcttcaggtgactctgatccctactcatgacacggaggtgactcgtgagtggtaccaacaaactcatgagcagcagcaacaactgaatgtcctggtcctggctagcagcagcaccgtggtgatgcaggatgagtccttccctgcctgcaagattgagttctgaaagagccgccctcccttccccaaggatccactcccccagctcctttagagaatggctactgctgagtcctttggggttgagggagatgggagctagggggaggggagggagatgtcttgttgtggggacttgggctgggctaaatgggaggggttgtccctccccatcatccattcctgtgaggtgtctcaaaccaaagttaacagggagaggatgggggaggggacaaattagaataggatagcatctgatgcctgagaaccctctcctagcactgtcaaatgctggtattgaatggggactgaggatgggtctcagagagcaacctcctccctcgtagagggagattatatccccaactccagggacctctttatctcaatctatttatttggcatcctgggaaggatttccaatagtaatttatgtgacctggggcaggataccgtcagtgaggtgcccagagctgcaccctttcctccatttcccatcccccatctcctcaaccaccagggtctgagttctagcagggtcctgggggtatcccactgctatactgttctactgcttccctcagtatctgaatgtctcaatttaaaacttgaagctctttagaccaatagactggtgagaggagaaaggagcttatcccccagaccctgctttataccattcacatcccagggctgtgtccagacagcacaaaacggcaaggagagcccaagccccaatgccagaattcttccaaactccctgactctttgaagtttttactcaccccatttcaattatcctgatcccttctcatcccctgcttggcttctctgcatgtggtcatctgctgtggcttggtgtttaatgggttaaaaataagccactgcctgacatcccaacatttgacaccccagcaatgtgtgactcccccaacattccactatgccatcctgcagctgaaatgggaacactggctgcctctccaaacccgctcttggacagaggatctgggaggtggaagccaggccagaggacttggggaaaatgagatggaggaaggaaaaagggagaagctgagccacagcttaactcctacagagtgaaatgaaaacgggctgaaaataccaccccaggagaggacctcgccccaagcaagccagtgagcagccctgccagactactgccagactgagaaacccagaagctggtagtcatgtgggcttgccttctctgccaaacgactgggaaaccaaaatgagcccaccttgtgttcttcctagctccaccctccccgtgctgctgtgttctgctcctccccacgcttccctgctatagttcccagctgctgtaacggagccacctccaactctaacaataaaccaagttcattgc

SEQ ID NO: 314433 - DNA, 10217 bp, Homo sapiens
  misc_feature (6089)..(6089): n is a, c, g, or t
  misc_feature (6154)..(6154): n is a, c, g, or t
ttccctgaagctgccggctgaggccggagctgccgcctccatgagaggcttcctcctacaccccagggccagaggaccctttgccaccagagtgagatcctagagaccatcatcctggtaaatcccagtgcagacagcatcagctctgaggttcatcatcttcttagcagctcatcagcttataaactactaatcttgagtgggcaaagtttagagcctgggggagacctcatcctacagagtggcacctactcatatgaaaactttgcccaggtccttcacaaccccgagatttcccaattgctcagcaatagagaccctgggatacaggccttccttaccgtgtcctgcttaggggaaggtgattggagccacctgggattatccagttcccaagagaccctgcacctccggctaaaccctgagcccactctgcccaccatggacggcgtggctgagttctccgagtatgtctctgagactgtggacgtgccatccccatttgacctactagagccccccacctcagggggcttcctcaagctctccaagccttgttgctacatcttcccaggtggtcgtggggactctgccctctttgctgtcaatggtttcaacatcctggtggatggtggctctgatcgcaagtcctgtttttggaagctggtacggcacttggaccgcattgactcggtgctactcacacacattggggcagacaacctgccaggcatcaatggactactgcagcgcaaagtggcagagctagaggaggagcagtcccagggctctagcagttacagcgactgggtgaagaaccttatctctcctgagcttggagttgtctttttcaacgtgcctgagaagctgcggcttcctgatgcctcccggaaagccaagcgtagcattgaggaggcctgcctcactctgcagcacttaaaccgcctgggcatccaggctgagcctctatatcgtgtggtcagcaataccattgagccactgaccctcttccacaaaatgggtgtgggccggctggacatgtatgtcctcaaccctgtcaaggacagcaaggagatgcagttcctcatgcaaaagtgggcaggcaatagtaaagccaagacaggcatcgtgctgcccaatgggaaggaggctgagatctccgtgccctaccttacctctatcactgctctggtggtctggctaccagccaatcccactgagaagattgtgcgtgtgctttttccaggaaatgctccccaaaacaagatcttggagggcctagaaaagcttcggcatctggacttcctgcgttaccctgtggccacgcagaaggacctggcttctggggctgtgcctaccaacctcaagcccagcaaaatcaaacagcgggctgatagcaaggagagcctcaaagccactaccaagacggccgtgagcaagttggccaaacgggaggaggtggtagaagagggagccaaggaggcacgttcagagctggccaaggagttagccaagacagagaagaaggcaaaagagtcatctgagaagcccccagagaagcctgccaagcctgagagggtgaagacagagtcaagtgaggcactgaaggcagagaagcgaaagctgatcaaagacaaggtagggaaaaagcaccttaaagaaaagatatcaaagctggaagaaaaaaaagacaaggagaaaaaagagatcaaaaaggagaggaaagagctcaagaaggatgaaggaaggaaggaggagaagaaggatgccaagaaggaggagaagaggaaagataccaaacctgagctcaagaagatttccaagccagacctaaagccctttactcctgaggtacgtaagaccctctataaagccaaggtccctggaagagtcaaaatagacaggagccgtgctatccgtggggagaaggagctgtcttctgagccccagacacccccagcccagaagggaactgtaccactcccaaccatcagtgggcacagggagctggtcctatcctcaccagaggacctcacacaggactttgaggagatgaagcgtgaggagagggctttgctggctgaacaaagggacacaggactaggagataagccattccctctagacactgcagaggagggacccccaagtacagctatccagggaacaccaccctctgttccagggctgggacaagaagaacatgtgatgaaggagaaagagcttgtcccagaggtccctgaggaacaaggcagcaaggacagaggcctagactctggggctgaaacagaggaagagaaagatacctgggaggaaaagaagcagagggaagcagagaggctcccagacagaacagaagccagagaggaaagtgaacctgaagtaaaggaggatgtgatagaaaaggctgagttagaagaaatggaggaggtacacccttcagatgaggaggaagaggacgcgacaaaagctgagggtttttaccaaaaacatatgcaggaacccttgaaggtaactccaaggagccgggaggcttttgggggtcgggaattgggactccagggcaaggcccctgagaaggagacctcgttattcctaagcagcctgaccacacctgcaggagccactgagcatgtctcttacatccaggatgagacaatccctggctactcagagactgagcagaccatctcagatgaggagatccatgatgagccggaggagcgcccagctccacccagatttcatacaagtacatatgacctgcccgggcctgaaggtgctggcccattcgaagccagccaacctgccgatagtgctgttcctgctacctctggcaaagtctatggaacgccagagactgaactcacctaccccactaacatagtggctgcccctttggctgaagaggaacatgtgtcctcggccacttcaatcactgagtgtgacaaactttcttcctttgccacatcagtggctgaggaccaatctgtggcctcacttacagctccccagacagaggagacaggcaagagctccctgctgcttgacacagtcacaagcatcccttcctcccgtactgaagctacgcagggcttggactatgtgccatcagctggtaccatctcacccacctcctcactggaagaagacaagggcttcaaatcaccaccctgtgaggacttctctgtgactggggagtcagagaagagaggagagatcatagggaaaggcttgtctggagagagagctgtggaagaggaagaggaggagacagcaaacgtagagatgtctgagaaactttgcagtcaatatggaactccagtgtttagtgcccctgggcatgccctacatccaggagaaccagcccttggagaagcagaggagcggtgccttagcccagatgacagcacagtgaagatggcttctcctccaccatctggcccacccagtgccacccacacaccctttcatcagtccccagtggaagaaaagtctgagccccaagactttcaggaggcagactcctggggagacactaagcgcacaccaggtgtgggcaaagaagatgctgctgaggagacagtcaagccagggcctgaagagggcacactagagaaggaagagaaagttcctcctcccaggagcccccaggcccaggaagcacctgtcaacattgatgaggggcttacaggctgtaccattcaactgttgccagcacaggataaagcaatagtctttgagattatggaggcaggagagcccacaggcccaattctgggagcagaagcccttcccggaggtttgaggactttaccccaagaacctggcaaacctcagaaagatgaggtgctcagatatcctgaccgaagcctctctcctgaagatgcagaatccctctctgtcctcagcgtgccctccccagacactgccaaccaagagcctacccccaagtctccctgtggcctgacagaacagtacctacacaaagaccgttggccagaggtatctccagaagacacccagtcactttctctgtcagaagagagtcccagcaaggagacctccctggatgtctcttctaagcagctctctccagaaagccttggcaccctccagtttggggaactaaaccttgggaaggaagaaatggggcatctgatgcaggccgaggatacctctcaccacacagctcccatgtctgttccagagccccatgcagccacagcgtcacctcccacagatgggacaactcgatactctgcacagacagacatcacagatgacagccttgacaggaagtcacctgccagctcattctctcactctacaccttcaggaaatgggaagtacttacctggggcgatcacaagccctgatgaacacattctgacacctgatagctccttctccaagagtcctgagtctttgccaggccctgctgggaagataaagttccagggttgaaagacagaacctcagaacagaagaaggaacctgagccaaaggatgaagttttacagcagaaagacaaaactctggagcacaaggaggtggtagagccgaaggatacagccatctatcagaaagatgaggctctgcatgtaaagaatgaggctgtgaaacagcaggataaggctttagaacaaaagggcagagacttagagcaaaaagacacagccctagaacagaaggacaaggccctggaaccaaaagacaaagacttagaagaaaaagacaaggccctggaacagaaggataagattccagaagagaaagacaaagccttagaacaaaaggatacagccctggaacagaaggacaaggccctggaaccaaaagataaagacttggaacaaaaggacagggtcctagaacagaaggagaagatcccagaagagaaagacaaagccttagatcaaaaagtcagaagtgttgaacataaggctccggaggacacggtcgctgaaatgaaggacagagacctagaacagacagacaaagcccctgaacagaaacaccaggcccaggaacaaaaggataaagtctcagaaaagaaggatcaggccttagaacaaaaatactgggctttgggacagaaggatgaagccctggaacaaaacattcaggctctggaagagaaccaccaaactcaggagcaggagagcctagtgcaggaggataaaaccaggaaaccaaagatgctagaggaaaaatccccagaaaaggtcaaggccatggaagagaagttagaagctcttctggagaagaccaaagctctgggcctggaagagagcctagtgcaggagggcagggccagagagcaggaagaaaagtactggagggggcaggatgtggtccaggagtggcaagaaacatctcctaccagagaggagccggctggagaacagaaagagcttgccccggcatgggaggacacatctcctgagcaggacaataggtattggaggggcagagaggatgtggccttggaacaggacacatactggagggagctaagctgtgagcggaaggtctggttccctcacgagctggatggccagggggcccgcccacactacactgaggaacgggaaagcactttcctagatgagggcccagatgatgagcaagaagtacccctgcgggaacacgcaacccggagcccctgggcctcagacttcaaggatttccaggaatcctcaccacagaaggggctagaggtggagcgctggcttgctgaatcaccagttgggttgccaccagaggaagaggacaaactgacccgctctccctttgagatcatctcccctccagcttccccacctgagatggttggacaaagggttccttcagccccaggacaagagagtcctatcccagaccctaagctcatgccacacatgaagaatgaacccactactccctcatggctggctgacatcccaccctgggtgcccaaggacagacccctcccccctgcacccctctccccagctcctggtccccccacacctgccccggaatcccatactcctgcacccttctcttggggcacagccgagtatgacagtgtggtggctgcagtncaggagggggcagctgagttggaaggtgggccatactcccccctggggaaggactaccgcaaggntgaaggggaaagggaagaagaaggtagggctgaggctcctgacaaaagctcacacagctcaaaggtaccagaggccagcaaaagccatgccaccacggagcctgagcagactgagccggagcagagagagcccacaccctatcctgatgagagaagctttcagtatgcagacatctatgagcagatgatgcttactgggcttggccctgcatgccccactagagagcctccacttggagcagctggggattggcccccatgcctctcaaccaaggaggcagctgccggccgaaacacatctgcagagaaggagctttcatctcctatctcacccaagagcctccagtctgacactccaaccttcagctatgcagccctggcaggacccactgtacccccaaggccagagccagggccaagtatggagcccagcctcaccccacctgcagttcccccccgtgctcctatcctgagcaaaggcccaagcccccctcttaatggtaacatcctgagctgcagcccagataggaggtccccatcccccaaggaatcaggccggagtcactgggatgacagcactagtgactcagaactggagaagggggctcgggaacagccagaaaaagaggcccaatccccaagtcctcctcaccccattcctatggggtcccccacattatggccagaaactgaggcacatgttagccctcccttggactcacacctggggcctgcccgacccagtctggacttccctgcttcagcctttggcttctcctcattgcagccagctcccccacagctgccctctccagctgaaccccgctcggcaccctgtggctcccttgccttctctggggatcgagctctggctctggctccaggaccccccaccagaacccggcatgatgaatacctggaagtgaccaaggcccccagcctggattcctcactgccccagctcccatcacccagttctcctggggcccctctcctctccaatctgccacgacctgcctcaccagccctgtctgagggctcctcctctgaggctaccacgcctgtgatttcaagtgtggcggagcgcttctctccaagccttgaggctgcagaacaggagtctggagagctggacccaggaatggaaccagctgcccacagcctctgggacctcactcctctgagcccagcacccccagcttcactggacttggccctagctccagctccaagcctgcctggagacatgggtgatggcatcctgccgtgccacctggagtgctcagaggcagccacggagaagccaagccccttccaggttccctctgaggattgtgcagccaatggcccaactgaaaccagccctaaccccccaggccctgccccagccaaggctgaaaatgaagaggctgcggcttgccctgcctgggaacgtggggcctggcctgaaggagctgagaggagctcccggcctgacacattgctctcccctgagcagccagtgtgtcctgcagggggctccgggggcccacccagcagtgcctctcctgaggtcgaagctgggccccagggatgtgccactgagcctcggccccatcgtggggagctctccccatccttcctgaacccacctctgcccccatccatagatgatagggacctctcaactgaggaagttcggctagtaggaagaggggggcggcgccgggtaggggggccagggaccactgggggcccatgccctgtgactgatgagacaccccctacatcagccagtgactcaggctcctcacagtcagattctgatgtcccgccagaaactgaggagtgtccgtccatcacagctgaggcagccctcgactcagatgaagatggagacttcctacctgtggacaaagctgggggtgtcagtggtactcaccaccccaggcctggccatgacccacctcctctcccacagccagacccccgcccatcccctccccgccctgatgtgtgcatggctgaccccgaggggctcagctcagagtctgggagagtagagaggctacgggagaaggaaaaggttcaggggcgagtagggcgtagggccccaggtaaggacaagccagtgtcccctgcacggcgtctggttcttcggggaaaacgctcacccacccctggtaaagggcctgcagatcgagcatcccgggccccacctcgaccacgcagcaccacaagccaggtcaccccagcagaggaaaaggatggacacagccccatgtccaaaggcctagtcaatggactcaaggcaggaccaatggccttgagttccaagggcagctctggtgcccctgtatatgtggatctcgcctacatcccgaatcattgcagtggcaagactgctgaccttgacttcttccgtcgagtgcgtgcatcctactatgtggtcagtgggaatgaccctgccaatggcgagccaagccgggctgtgctggatgccctgctggagggcaaggcccagtggggggagaatcttcaggtgactctgatccctactcatgacacggaggtgactcgtgagtggtaccaacaaactcatgagcagcagcaacaactgaatgtcctggtcctggctagcagcagcaccgtggtgatgcaggatgagtccttccctgcctgcaagattgagttctgaaagagccgccctcccttccccaaggatccactcccccagctcctttagagaatggctactgctgagtcctttggggttgagggagatgggagctagggggaggggagggagatgtcttgttgtggggacttgggctgggctaaatgggaggggttgtccctccccatcatccattcctgtgaggtgtctcaaaccaaagttaacagggagaggatgggggaggggacaaattagaataggatagcatctgatgcctgagaaccctctcctagcactgtcaaatgctggtattgaatggggactgaggatgggtctcagagagcaacctcctccctcgtagagggagattatatccccaactccagggacctctttatctcaatctatttatttggcatcctgggaaggatttccaatagtaatttatgtgacctggggcaggataccgtcagtgaggtgcccagagctgcaccctttcctccatttcccatcccccatctcctcaaccaccagggtctgagttctagcagggtcctgggggtatcccactgctatactgttctactgcttccctcagtatctgaatgtctcaatttaaaacttgaagctctttagaccaatagactggtgagaggagaaaggagcttatcccccagaccctgctttataccattcacatcccagggctgtgtccagacagcacaaaacggcaaggagagcccaagccccaatgccagaattcttccaaactccctgactctttgaagtttttactcaccccatttcaattatcctgatcccttctcatcccctgcttggcttctctgcatgtggtcatctgctgtggcttggtgtttaatgggttaaaaataagccactgcctgacatcccaacatttgacaccccagcaatgtgtgactcccccaacattccactatgccatcctgcagctgaaatgggaacactggctgcctctccaaacccgctcttggacagaggatctgggaggtggaagccaggccagaggacttggggaaaatgagatggaggaaggaaaaagggagaagctgagccacagcttaactcctacagagtgaaatgaaaacgggctgaaaataccaccccaggagaggacctcgccccaagcaagccagtgagcagccctgccagactactgccagactgagaaacccagaagctggtagtcatgtgggcttgccttctctgccaaacgactgggaaaccaaaatgagcccaccttgtgttcttcctagctccaccctccccgtgctgctgtgttctgctcctccccacgcttccctgctatagttcccagctgctgtaacggagccacctccaactctaacaataaaccaagttcattgc

SEQ ID NO: 314434 - DNA, 6459 bp, Homo sapiens
  misc_feature (6111)..(6111): n is a, c, g, or t
  misc_feature (6176)..(6176): n is a, c, g, or t
ttccctgaagctgccggctgaggccggagctgccgcctccatgagaggcttcctcctacaccccagggccagaggaccctttgccaccagagtgagatcctagagaccatcatcctggtaaatcccagtgcagacagcatcagctctgaggttcatcatcttcttagcagctcatcagcttataaactactaatcttgagtgggcaaagtttagagcctgggggagacctcatcctacagagtggcacctactcatatgaaaactttgcccaggtccttcacaaccccgagatttcccaattgctcagcaatagagaccctgggatacaggccttccttaccgtgtcctgcttaggggaaggtgattggagccacctgggattatccagttcccaagagaccctgcacctccggctaaaccctgagcccactctgcccaccatggacggcgtggctgagttctccgagtatgtctctgagactgtggacgtgccatccccatttgacctactagagccccccacctcagggggcttcctcaagctctccaagccttgttgctacatcttcccaggtggtcgtggggactctgccctctttgctgtcaatggtttcaacatcctggtggatggtggctctgatcgcaagtcctgtttttggaagctggtacggcacttggaccgcattgactcggtgctactcacacacattggggcagacaacctgccaggcatcaatggactactgcagcgcaaagtggcagagctagaggaggagcagtcccagggctctagcagttacagcgactgggtgaagaaccttatctctcctgagcttggagttgtctttttcaacgtgcctgagaagctgcggcttcctgatgcctcccggaaagccaagcgtagcattgaggaggcctgcctcactctgcagcacttaaaccgcctgggcatccaggctgagcctctatatcgtgtggtcagcaataccattgagccactgaccctcttccacaaaatgggtgtgggccggctggacatgtatgtcctcaaccctgtcaaggacagcaaggagatgcagttcctcatgcaaaagtgggcaggcaatagtaaagccaagacaggcatcgtgctgcccaatgggaaggaggctgagatctccgtgccctaccttacctctatcactgctctggtggtctggctaccagccaatcccactgagaagattgtgcgtgtgctttttccaggaaatgctccccaaaacaagatcttggagggcctagaaaagcttcggcatctggacttcctgcgttaccctgtggccacgcagaaggacctggcttctggggctgtgcctaccaacctcaagcccagcaaaatcaaacagcgggctgatagcaaggagagcctcaaagccactaccaagacggccgtgagcaagttggccaaacgggaggaggtggtagaagagggagccaaggaggcacgttcagagctggccaaggagttagccaagacagagaagaaggcaaaagagtcatctgagaagcccccagagaagcctgccaagcctgagagggtgaagacagagtcaagtgaggcactgaaggcagagaagcgaaagctgatcaaagacaaggtagggaaaaagcaccttaaagaaaagatatcaaagctggaagaaaaaaaagacaaggagaaaaaagagatcaaaaaggagaggaaagagctcaagaaggatgaaggaaggaaggaggagaagaaggatgccaagaaggaggagaagaggaaagataccaaacctgagctcaagaagatttccaagccagacctaaagccctttactcctgaggtacgtaagaccctctataaagccaaggtccctggaagagtcaaaatagacaggagccgtgctatccgtggggagaaggagctgtcttctgagccccagacacccccagcccagaagggaactgtaccactcccaaccatcagtgggcacagggagctggtcctatcctcaccagaggacctcacacaggactttgaggagatgaagcgtgaggagagggctttgctggctgaacaaagggacacaggactaggagataagccattccctctagacactgcagaggagggacccccaagtacagctatccagggaacaccaccctctgttccagggctgggacaagaagaacatgtgatgaaggagaaagagcttgtcccagaggtccctgaggaacaaggcagcaaggacagaggcctagactctggggctgaaacagaggaagagaaagatacctgggaggaaaagaagcagagggaagcagagaggctcccagacagaacagaagccagagaggaaagtgaacctgaagtaaaggaggatgtgatagaaaaggctgagttagaagaaatggaggaggtacacccttcagatgaggaggaagaggacgcgacaaaagctgagggtttttaccaaaaacatatgcaggaacccttgaaggtaactccaaggagccgggaggcttttgggggtcgggaattgggactccagggcaaggcccctgagaaggagacctcgttattcctaagcagcctgaccacacctgcaggagccactgagcatgtctcttacatccaggatgagacaatccctggctactcagagactgagcagaccatctcagatgaggagatccatgatgagccggaggagcgcccagctccacccagatttcatacaagtacatatgacctgcccgggcctgaaggtgctggcccattcgaagccagccaacctgccgatagtgctgttcctgctacctctggcaaagtctatggaacgccagagactgaactcacctaccccactaacatagtggctgcccctttggctgaagaggaacatgtgtcctcggccacttcaatcactgagtgtgacaaactttcttcctttgccacatcagtggctgaggaccaatctgtggcctcacttacagctccccagacagaggagacaggcaagagctccctgctgcttgacacagtcacaagcatcccttcctcccgtactgaagctacgcagggcttggactatgtgccatcagctggtaccatctcacccacctcctcactggaagaagacaagggcttcaaatcaccaccctgtgaggacttctctgtgactggggagtcagagaagagaggagagatcatagggaaaggcttgtctggagagagagctgtggaagaggaagaggaggagacagcaaacgtagagatgtctgagaaactttgcagtcaatatggaactccagtgtttagtgcccctgggcatgccctacatccaggagaaccagcccttggagaagcagaggagcggtgccttagcccagatgacagcacagtgaagatggcttctcctccaccatctggcccacccagtgccacccacacaccctttcatcagtccccagtggaagaaaagtctgagccccaagactttcaggaggcagactcctggggagacactaagcgcacaccaggtgtgggcaaagaagatgctgctgaggagacagtcaagccagggcctgaagagggcacactagagaaggaagagaaagttcctcctcccaggagcccccaggcccaggaagcacctgtcaacattgatgaggggcttacaggctgtaccattcaactgttgccagcacaggataaagcaatagtctttgagattatggaggcaggagagcccacaggcccaattctgggagcagaagcccttcccggaggtttgaggactttaccccaagaacctggcaaacctcagaaagatgaggtgctcagatatcctgaccgaagcctctctcctgaagatgcagaatccctctctgtcctcagcgtgccctccccagacactgccaaccaagagcctacccccaagtctccctgtggcctgacagaacagtacctacacaaagaccgttggccagaggtatctccagaagacacccagtcactttctctgtcagaagagagtcccagcaaggagacctccctggatgtctcttctaagcagctctctccagaaagccttggcaccctccagtttggggaactaaaccttgggaaggaagaaatggggcatctgatgcaggccgaggatacctctcaccacacagctcccatgtctgttccagagccccatgcagccacagcgtcacctcccacagatgggacaactcgatactctgcacagacagacatcacagatgacagccttgacaggaagtcacctgccagctcattctctcactctacaccttcaggaaatgggaagtacttacctggggcgatcacaagccctgatgaacacattctgacacctgatagctccttctccaagagtcctgagtctttgccaggccctgccttggaggacattgccataaagtgggaagataaagttccagggttgaaagacagaacctcagaacagaagaaggaacctgagccaaaggatgaagttttacagcagaaagacaaaactctggagcacaaggaggtggtagagccgaaggatacagccatctatcagaaagatgaggctctgcatgtaaagaatgaggctgtgaaacagcaggataaggctttagaacaaaagggcagagacttagagcaaaaagacacagccctagaacagaaggacaaggccctggaaccaaaagacaaagacttagaagaaaaagacaaggccctggaacagaaggataagattccagaagagaaagacaaagccttagaacaaaaggatacagccctggaacagaaggacaaggccctggaaccaaaagataaagacttggaacaaaaggacagggtcctagaacagaaggagaagatcccagaagagaaagacaaagccttagatcaaaaagtcagaagtgttgaacataaggctccggaggacacggtcgctgaaatgaaggacagagacctagaacagacagacaaagcccctgaacagaaacaccaggcccaggaacaaaaggataaagtctcagaaaagaaggatcaggccttagaacaaaaatactgggctttgggacagaaggatgaagccctggaacaaaacattcaggctctggaagagaaccaccaaactcaggagcaggagagcctagtgcaggaggataaaaccaggaaaccaaagatgctagaggaaaaatccccagaaaaggtcaaggccatggaagagaagttagaagctcttctggagaagaccaaagctctgggcctggaagagagcctagtgcaggagggcagggccagagagcaggaagaaaagtactggagggggcaggatgtggtccaggagtggcaagaaacatctcctaccagagaggagccggctggagaacagaaagagcttgccccggcatgggaggacacatctcctgagcaggacaataggtattggaggggcagagaggatgtggccttggaacaggacacatactggagggagctaagctgtgagcggaaggtctggttccctcacgagctggatggccagggggcccgcccacactacactgaggaacgggaaagcactttcctagatgagggcccagatgatgagcaagaagtacccctgcgggaacacgcaacccggagcccctgggcctcagacttcaaggatttccaggaatcctcaccacagaaggggctagaggtggagcgctggcttgctgaatcaccagttgggttgccaccagaggaagaggacaaactgacccgctctccctttgagatcatctcccctccagcttccccacctgagatggttggacaaagggttccttcagccccaggacaagagagtcctatcccagaccctaagctcatgccacacatgaagaatgaacccactactccctcatggctggctgacatcccaccctgggtgcccaaggacagacccctcccccctgcacccctctccccagctcctggtccccccacacctgccccggaatcccatactcctgcacccttctcttggggcacagccgagtatgacagtgtggtggctgcagtncaggagggggcagctgagttggaaggtgggccatactcccccctggggaaggactaccgcaaggntgaaggggaaagggaagaagaaggtagggctgaggctcctgacaaaagctcacacagctcaaaggtaccagaggccagcaaaagccatgccaccacggagcctgagcagactgagccggagcagagagagcccacaccctatcctgatgagagaagctttcagtatgcagacatctatgagcagatgatgcttactgggcttggccctgcatgccccactagagagcctccacttggttgagaggcatgggggccaatccccagctgctccaagccggaattc

SEQ ID NO: 314435 - DNA, 5112 bp, Homo sapiens
ttccctgaagctgccggctgaggccggagctgccgcctccatgagaggcttcctcctacaccccagggccagaggaccctttgccaccagagtgagatcctagagaccatcatcctggtaaatcccagtgcagacagcatcagctctgaggttcatcatcttcttagcagctcatcagcttataaactactaatcttgagtgggcaaagtttagagcctgggggagacctcatcctacagagtggcacctactcatatgaaaactttgcccaggtccttcacaaccccgagatttcccaattgctcagcaatagagaccctgggatacaggccttccttaccgtgtcctgcttaggggaaggtgattggagccacctgggattatccagttcccaagagaccctgcacctccggctaaaccctgagcccactctgcccaccatggacggcgtggctgagttctccgagtatgtctctgagactgtggacgtgccatccccatttgacctactagagccccccacctcagggggcttcctcaagctctccaagccttgttgctacatcttcccaggtggtcgtggggactctgccctctttgctgtcaatggtttcaacatcctggtggatggtggctctgatcgcaagtcctgtttttggaagctggtacggcacttggaccgcattgactcggtgctactcacacacattggggcagacaacctgccaggcatcaatggactactgcagcgcaaagtggcagagctagaggaggagcagtcccagggctctagcagttacagcgactgggtgaagaaccttatctctcctgagcttggagttgtctttttcaacgtgcctgagaagctgcggcttcctgatgcctcccggaaagccaagcgtagcattgaggaggcctgcctcactctgcagcacttaaaccgcctgggcatccaggctgagcctctatatcgtgtggtcagcaataccattgagccactgaccctcttccacaaaatgggtgtgggccggctggacatgtatgtcctcaaccctgtcaaggacagcaaggagatgcagttcctcatgcaaaagtgggcaggcaatagtaaagccaagacaggcatcgtgctgcccaatgggaaggaggctgagatctccgtgccctaccttacctctatcactgctctggtggtctggctaccagccaatcccactgagaagattgtgcgtgtgctttttccaggaaatgctccccaaaacaagatcttggagggcctagaaaagcttcggcatctggacttcctgcgttaccctgtggccacgcagaaggacctggcttctggggctgtgcctaccaacctcaagcccagcaaaatcaaacagcgggctgatagcaaggagagcctcaaagccactaccaagacggccgtgagcaagttggccaaacgggaggaggtggtagaagagggagccaaggaggcacgttcagagctggccaaggagttagccaagacagagaagaaggcaaaagagtcatctgagaagcccccagagaagcctgccaagcctgagagggtgaagacagagtcaagtgaggcactgaaggcagagaagcgaaagctgatcaaagacaaggtagggaaaaagcaccttaaagaaaagatatcaaagctggaagaaaaaaaagacaaggagaaaaaagagatcaaaaaggagaggaaagagctcaagaaggatgaaggaaggaaggaggagaagaaggatgccaagaaggaggagaagaggaaagataccaaacctgagctcaagaagatttccaagccagacctaaagccctttactcctgaggtacgtaagaccctctataaagccaaggtccctggaagagtcaaaatagacaggagccgtgctatccgtggggagaaggagctgtcttctgagccccagacacccccagcccagaagggaactgtaccactcccaaccatcagtgggcacagggagctggtcctatcctcaccagaggacctcacacaggactttgaggagatgaagcgtgaggagagggctttgctggctgaacaaagggacacaggactaggagataagccattccctctagacactgcagaggagggacccccaagtacagctatccagggaacaccaccctctgttccagggctgggacaagaagaacatgtgatgaaggagaaagagcttgtcccagaggtccctgaggaacaaggcagcaaggacagaggcctagactctggggctgaaacagaggaagagaaagatacctgggaggaaaagaagcagagggaagcagagaggctcccagacagaacagaagccagagaggaaagtgaacctgaagtaaaggaggatgtgatagaaaaggctgagttagaagaaatggaggaggtacacccttcagatgaggaggaagaggacgcgacaaaagctgagggtttttaccaaaaacatatgcaggaacccttgaaggtaactccaaggagccgggaggcttttgggggtcgggaattgggactccagggcaaggcccctgagaaggagacctcgttattcctaagcagcctgaccacacctgcaggagccactgagcatgtctcttacatccaggatgagacaatccctggctactcagagactgagcagaccatctcagatgaggagatccatgatgagccggaggagcgcccagctccacccagatttcatacaagtacatatgacctgcccgggcctgaaggtgctggcccattcgaagccagccaacctgccgatagtgctgttcctgctacctctggcaaagtctatggaacgccagagactgaactcacctaccccactaacatagtggctgcccctttggctgaagaggaacatgtgtcctcggccacttcaatcactgagtgtgacaaactttcttcctttgccacatcagtggctgaggaccaatctgtggcctcacttacagctccccagacagaggagacaggcaagagctccctgctgcttgacacagtcacaagcatcccttcctcccgtactgaagctacgcagggcttggactatgtgccatcagctggtaccatctcacccacctcctcactggaagaagacaagggcttcaaatcaccaccctgtgaggacttctctgtgactggggagtcagagaagagaggagagatcatagggaaaggcttgtctggagagagagctgtggaagaggaagaggaggagacagcaaacgtagagatgtctgagaaactttgcagtcaatatggaactccagtgtttagtgcccctgggcatgccctacatccaggagaaccagcccttggagaagcagaggagcggtgccttagcccagatgacagcacagtgaagatggcttctcctccaccatctggcccacccagtgccacccacacaccctttcatcagtccccagtggaagaaaagtctgagccccaagactttcaggaggcagactcctggggagacactaagcgcacaccaggtgtgggcaaagaagatgctgctgaggagacagtcaagccagggcctgaagagggcacactagagaaggaagagaaagttcctcctcccaggagcccccaggcccaggaagcacctgtcaacattgatgaggggcttacaggctgtaccattcaactgttgccagcacaggataaagcaatagtctttgagattatggaggcaggagagcccacaggcccaattctgggagcagaagcccttcccggaggtttgaggactttaccccaagaacctggcaaacctcagaaagatgaggtgctcagatatcctgaccgaagcctctctcctgaagatgcagaatccctctctgtcctcagcgtgccctccccagacactgccaaccaagagcctacccccaagtctccctgtggcctgacagaacagtacctacacaaagaccgttggccagaggtatctccagaagacacccagtcactttctctgtcagaagagagtcccagcaaggagacctccctggatgtctcttctaagcagctctctccagaaagccttggcaccctccagtttggggaactaaaccttgggaaggaagaaatggggcatctgatgcaggccgaggatacctctcaccacacagctcccatgtctgttccagagccccatgcagccacagcgtcacctcccacagatgggacaactcgatactctgcacagacagacatcacagatgacagccttgacaggaagtcacctgccagctcattctctcactctacaccttcaggaaatgggaagtacttacctggggcgatcacaagccctgatgaacacattctgacacctgatagctccttctccaagagtcctgagtctttgccaggccctgccttggaggacattgccataaagtgggaagataaagttccagggttgaaagacagaacctcagaacagaagaaggaacctgatcccttctcatcccctgcttggcttctctgcatgtggtcatctgctgtggcttggtgtttaatgggttaaaaataagccactgcctgacatcccaacatttgacaccccagcaatgtgtgactcccccaacattccactatgccatcctgcagctgaaatgggaacactggctgcctctccaaacccgctcttggacagaggatctgggaggtggaagccaggccagaggacttggggaaaatgagatggaggaaggaaaaagggagaagctgagccacagcttaactcctacagagtgaaatgaaaacgggctgaaaataccaccccaggagaggacctcgccccaagcaagccagtgagcagccctgccagactactgccagactgagaaacccagaagctggtagtcatgtgggcttgccttctctgccaaacgactgggaaaccaaaatgagcccaccttgtgttcttcctagctccaccctccccgtgctgctgtgttctgctcctccccacgcttccctgctatagttcccagctgctgtaacggagccacctccaactctaacaataaaccaagttcattgc

SEQ ID NO: 314436 - DNA, 920 bp, Homo sapiens
gtccatatgagctgtctccagggaagggaagtcagatgagtcaggatagggcatattctagcagggtcctgggggtatcccactgctatactgttctactgcttccctcagtatctgaatgtctcaatttaaaacttgaagctctttagaccaatagactggtgagaggagaaaggagcttatcccccagaccctgctttataccattcacatcccagggctgtgtccagacagcacaaaacggcaaggagagcccaagccccaatgccagaattcttccaaactccctgactctttgaagtttttactcaccccatttcaattatcctgatcccttctcatcccctgcttggcttctctgcatgtggtcatctgctgtggcttggtgtttaatgggttaaaaataagccactgcctgacatcccaacatttgacaccccagcaatgtgtgactcccccaacattccactatgccatcctgcagctgaaatgggaacactggctgcctctccaaacccgctcttggacagaggatctgggaggtggaagccaggccagaggacttggggaaaatgagatggaggaaggaaaaagggagaagctgagccacagcttaactcctacagagtgaaatgaaaacgggctgaaaataccaccccaggagaggacctcgccccaagcaagccagtgagcagccctgccagactactgccagactgagaaacccagaagctggtagtcatgtgggcttgccttctctgccaaacgactgggaaaccaaaatgagcccaccttgtgttcttcctagctccaccctccccgtgctgctgtgttctgctcctccccacgcttccctgctatagttcccagctgctgtaacggagccacctccaactctaacaataaaccaagttcattgc

SEQ ID NO: 314437 - DNA, 10239 bp, Homo sapiens
  misc_feature (6111)..(6111): n is a, c, g, or t
  misc_feature (6176)..(6176): n is a, c, g, or t
ttccctgaagctgccggctgaggccggagctgccgcctccatgagaggcttcctcctacaccccagggccagaggaccctttgccaccagagtgagatcctagagaccatcatcctggtaaatcccagtgcagacagcatcagctctgaggttcatcatcttcttagcagctcatcagcttataaactactaatcttgagtgggcaaagtttagagcctgggggagacctcatcctacagagtggcacctactcatatgaaaactttgcccaggtccttcacaaccccgagatttcccaattgctcagcaatagagaccctgggatacaggccttccttaccgtgtcctgcttaggggaaggtgattggagccacctgggattatccagttcccaagagaccctgcacctccggctaaaccctgagcccactctgcccaccatggacggcgtggctgagttctccgagtatgtctctgagactgtggacgtgccatccccatttgacctactagagccccccacctcagggggcttcctcaagctctccaagccttgttgctacatcttcccaggtggtcgtggggactctgccctctttgctgtcaatggtttcaacatcctggtggatggtggctctgatcgcaagtcctgtttttggaagctggtacggcacttggaccgcattgactcggtgctactcacacacattggggcagacaacctgccaggcatcaatggactactgcagcgcaaagtggcagagctagaggaggagcagtcccagggctctagcagttacagcgactgggtgaagaaccttatctctcctgagcttggagttgtctttttcaacgtgcctgagaagctgcggcttcctgatgcctcccggaaagccaagcgtagcattgaggaggcctgcctcactctgcagcacttaaaccgcctgggcatccaggctgagcctctatatcgtgtggtcagcaataccattgagccactgaccctcttccacaaaatgggtgtgggccggctggacatgtatgtcctcaaccctgtcaaggacagcaaggagatgcagttcctcatgcaaaagtgggcaggcaatagtaaagccaagacaggcatcgtgctgcccaatgggaaggaggctgagatctccgtgccctaccttacctctatcactgctctggtggtctggctaccagccaatcccactgagaagattgtgcgtgtgctttttccaggaaatgctccccaaaacaagatcttggagggcctagaaaagcttcggcatctggacttcctgcgttaccctgtggccacgcagaaggacctggcttctggggctgtgcctaccaacctcaagcccagcaaaatcaaacagcgggctgatagcaaggagagcctcaaagccactaccaagacggccgtgagcaagttggccaaacgggaggaggtggtagaagagggagccaaggaggcacgttcagagctggccaaggagttagccaagacagagaagaaggcaaaagagtcatctgagaagcccccagagaagcctgccaagcctgagagggtgaagacagagtcaagtgaggcactgaaggcagagaagcgaaagctgatcaaagacaaggtagggaaaaagcaccttaaagaaaagatatcaaagctggaagaaaaaaaagacaaggagaaaaaagagatcaaaaaggagaggaaagagctcaagaaggatgaaggaaggaaggaggagaagaaggatgccaagaaggaggagaagaggaaagataccaaacctgagctcaagaagatttccaagccagacctaaagccctttactcctgaggtacgtaagaccctctataaagccaaggtccctggaagagtcaaaatagacaggagccgtgctatccgtggggagaaggagctgtcttctgagccccagacacccccagcccagaagggaactgtaccactcccaaccatcagtgggcacagggagctggtcctatcctcaccagaggacctcacacaggactttgaggagatgaagcgtgaggagagggctttgctggctgaacaaagggacacaggactaggagataagccattccctctagacactgcagaggagggacccccaagtacagctatccagggaacaccaccctctgttccagggctgggacaagaagaacatgtgatgaaggagaaagagcttgtcccagaggtccctgaggaacaaggcagcaaggacagaggcctagactctggggctgaaacagaggaagagaaagatacctgggaggaaaagaagcagagggaagcagagaggctcccagacagaacagaagccagagaggaaagtgaacctgaagtaaaggaggatgtgatagaaaaggctgagttagaagaaatggaggaggtacacccttcagatgaggaggaagaggacgcgacaaaagctgagggtttttaccaaaaacatatgcaggaacccttgaaggtaactccaaggagccgggaggcttttgggggtcgggaattgggactccagggcaaggcccctgagaaggagacctcgttattcctaagcagcctgaccacacctgcaggagccactgagcatgtctcttacatccaggatgagacaatccctggctactcagagactgagcagaccatctcagatgaggagatccatgatgagccggaggagcgcccagctccacccagatttcatacaagtacatatgacctgcccgggcctgaaggtgctggcccattcgaagccagccaacctgccgatagtgctgttcctgctacctctggcaaagtctatggaacgccagagactgaactcacctaccccactaacatagtggctgcccctttggctgaagaggaacatgtgtcctcggccacttcaatcactgagtgtgacaaactttcttcctttgccacatcagtggctgaggaccaatctgtggcctcacttacagctccccagacagaggagacaggcaagagctccctgctgcttgacacagtcacaagcatcccttcctcccgtactgaagctacgcagggcttggactatgtgccatcagctggtaccatctcacccacctcctcactggaagaagacaagggcttcaaatcaccaccctgtgaggacttctctgtgactggggagtcagagaagagaggagagatcatagggaaaggcttgtctggagagagagctgtggaagaggaagaggaggagacagcaaacgtagagatgtctgagaaactttgcagtcaatatggaactccagtgtttagtgcccctgggcatgccctacatccaggagaaccagcccttggagaagcagaggagcggtgccttagcccagatgacagcacagtgaagatggcttctcctccaccatctggcccacccagtgccacccacacaccctttcatcagtccccagtggaagaaaagtctgagccccaagactttcaggaggcagactcctggggagacactaagcgcacaccaggtgtgggcaaagaagatgctgctgaggagacagtcaagccagggcctgaagagggcacactagagaaggaagagaaagttcctcctcccaggagcccccaggcccaggaagcacctgtcaacattgatgaggggcttacaggctgtaccattcaactgttgccagcacaggataaagcaatagtctttgagattatggaggcaggagagcccacaggcccaattctgggagcagaagcccttcccggaggtttgaggactttaccccaagaacctggcaaacctcagaaagatgaggtgctcagatatcctgaccgaagcctctctcctgaagatgcagaatccctctctgtcctcagcgtgccctccccagacactgccaaccaagagcctacccccaagtctccctgtggcctgacagaacagtacctacacaaagaccgttggccagaggtatctccagaagacacccagtcactttctctgtcagaagagagtcccagcaaggagacctccctggatgtctcttctaagcagctctctccagaaagccttggcaccctccagtttggggaactaaaccttgggaaggaagaaatggggcatctgatgcaggccgaggatacctctcaccacacagctcccatgtctgttccagagccccatgcagccacagcgtcacctcccacagatgggacaactcgatactctgcacagacagacatcacagatgacagccttgacaggaagtcacctgccagctcattctctcactctacaccttcaggaaatgggaagtacttacctggggcgatcacaagccctgatgaacacattctgacacctgatagctccttctccaagagtcctgagtctttgccaggccctgccttggaggacattgccataaagtgggaagataaagttccagggttgaaagacagaacctcagaacagaagaaggaacctgagccaaaggatgaagttttacagcagaaagacaaaactctggagcacaaggaggtggtagagccgaaggatacagccatctatcagaaagatgaggctctgcatgtaaagaatgaggctgtgaaacagcaggataaggctttagaacaaaagggcagagacttagagcaaaaagacacagccctagaacagaaggacaaggccctggaaccaaaagacaaagacttagaagaaaaagacaaggccctggaacagaaggataagattccagaagagaaagacaaagccttagaacaaaaggatacagccctggaacagaaggacaaggccctggaaccaaaagataaagacttggaacaaaaggacagggtcctagaacagaaggagaagatcccagaagagaaagacaaagccttagatcaaaaagtcagaagtgttgaacataaggctccggaggacacggtcgctgaaatgaaggacagagacctagaacagacagacaaagcccctgaacagaaacaccaggcccaggaacaaaaggataaagtctcagaaaagaaggatcaggccttagaacaaaaatactgggctttgggacagaaggatgaagccctggaacaaaacattcaggctctggaagagaaccaccaaactcaggagcaggagagcctagtgcaggaggataaaaccaggaaaccaaagatgctagaggaaaaatccccagaaaaggtcaaggccatggaagagaagttagaagctcttctggagaagaccaaagctctgggcctggaagagagcctagtgcaggagggcagggccagagagcaggaagaaaagtactggagggggcaggatgtggtccaggagtggcaagaaacatctcctaccagagaggagccggctggagaacagaaagagcttgccccggcatgggaggacacatctcctgagcaggacaataggtattggaggggcagagaggatgtggccttggaacaggacacatactggagggagctaagctgtgagcggaaggtctggttccctcacgagctggatggccagggggcccgcccacactacactgaggaacgggaaagcactttcctagatgagggcccagatgatgagcaagaagtacccctgcgggaacacgcaacccggagcccctgggcctcagacttcaaggatttccaggaatcctcaccacagaaggggctagaggtggagcgctggcttgctgaatcaccagttgggttgccaccagaggaagaggacaaactgacccgctctccctttgagatcatctcccctccagcttccccacctgagatggttggacaaagggttccttcagccccaggacaagagagtcctatcccagaccctaagctcatgccacacatgaagaatgaacccactactccctcatggctggctgacatcccaccctgggtgcccaaggacagacccctcccccctgcacccctctccccagctcctggtccccccacacctgccccggaatcccatactcctgcacccttctcttggggcacagccgagtatgacagtgtggtggctgcagtncaggagggggcagctgagttggaaggtgggccatactcccccctggggaaggactaccgcaaggntgaaggggaaagggaagaagaaggtagggctgaggctcctgacaaaagctcacacagctcaaaggtaccagaggccagcaaaagccatgccaccacggagcctgagcagactgagccggagcagagagagcccacaccctatcctgatgagagaagctttcagtatgcagacatctatgagcagatgatgcttactgggcttggccctgcatgccccactagagagcctccacttggagcagctggggattggcccccatgcctctcaaccaaggaggcagctgccggccgaaacacatctgcagagaaggagctttcatctcctatctcacccaagagcctccagtctgacactccaaccttcagctatgcagccctggcaggacccactgtacccccaaggccagagccagggccaagtatggagcccagcctcaccccacctgcagttcccccccgtgctcctatcctgagcaaaggcccaagcccccctcttaatggtaacatcctgagctgcagcccagataggaggtccccatcccccaaggaatcaggccggagtcactgggatgacagcactagtgactcagaactggagaagggggctcgggaacagccagaaaaagaggcccaatccccaagtcctcctcaccccattcctatggggtcccccacattatggccagaaactgaggcacatgttagccctcccttggactcacacctggggcctgcccgacccagtctggacttccctgcttcagcctttggcttctcctcattgcagccagctcccccacagctgccctctccagctgaaccccgctcggcaccctgtggctcccttgccttctctggggatcgagctctggctctggctccaggaccccccaccagaacccggcatgatgaatacctggaagtgaccaaggcccccagcctggattcctcactgccccagctcccatcacccagttctcctggggcccctctcctctccaatctgccacgacctgcctcaccagccctgtctgagggctcctcctctgaggctaccacgcctgtgatttcaagtgtggcggagcgcttctctccaagccttgaggctgcagaacaggagtctggagagctggacccaggaatggaaccagctgcccacagcctctgggacctcactcctctgagcccagcacccccagcttcactggacttggccctagctccagctccaagcctgcctggagacatgggtgatggcatcctgccgtgccacctggagtgctcagaggcagccacggagaagccaagccccttccaggttccctctgaggattgtgcagccaatggcccaactgaaaccagccctaaccccccaggccctgccccagccaaggctgaaaatgaagaggctgcggcttgccctgcctgggaacgtggggcctggcctgaaggagctgagaggagctcccggcctgacacattgctctcccctgagcagccagtgtgtcctgcagggggctccgggggcccacccagcagtgcctctcctgaggtcgaagctgggccccagggatgtgccactgagcctcggccccatcgtggggagctctccccatccttcctgaacccacctctgcccccatccatagatgatagggacctctcaactgaggaagttcggctagtaggaagaggggggcggcgccgggtaggggggccagggaccactgggggcccatgccctgtgactgatgagacaccccctacatcagccagtgactcaggctcctcacagtcagattctgatgtcccgccagaaactgaggagtgtccgtccatcacagctgaggcagccctcgactcagatgaagatggagacttcctacctgtggacaaagctgggggtgtcagtggtactcaccaccccaggcctggccatgacccacctcctctcccacagccagacccccgcccatcccctccccgccctgatgtgtgcatggctgaccccgaggggctcagctcagagtctgggagagtagagaggctacgggagaaggaaaaggttcaggggcgagtagggcgtagggccccaggtaaggacaagccagtgtcccctgcacggcgtctggttcttcggggaaaacgctcacccacccctggtaaagggcctgcagatcgagcatcccgggccccacctcgaccacgcagcaccacaagccaggtcaccccagcagaggaaaaggatggacacagccccatgtccaaaggcctagtcaatggactcaaggcaggaccaatggccttgagttccaagggcagctctggtgcccctgtatatgtggatctcgcctacatcccgaatcattgcagtggcaagactgctgaccttgacttcttccgtcgagtgcgtgcatcctactatgtggtcagtgggaatgaccctgccaatggcgagccaagccgggctgtgctggatgccctgctggagggcaaggcccagtggggggagaatcttcaggtgactctgatccctactcatgacacggaggtgactcgtgagtggtaccaacaaactcatgagcagcagcaacaactgaatgtcctggtcctggctagcagcagcaccgtggtgatgcaggatgagtccttccctgcctgcaagattgagttctgaaagagccgccctcccttccccaaggatccactcccccagctcctttagagaatggctactgctgagtcctttggggttgagggagatgggagctagggggaggggagggagatgtcttgttgtggggacttgggctgggctaaatgggaggggttgtccctccccatcatccattcctgtgaggtgtctcaaaccaaagttaacagggagaggatgggggaggggacaaattagaataggatagcatctgatgcctgagaaccctctcctagcactgtcaaatgctggtattgaatggggactgaggatgggtctcagagagcaacctcctccctcgtagagggagattatatccccaactccagggacctctttatctcaatctatttatttggcatcctgggaaggatttccaatagtaatttatgtgacctggggcaggataccgtcagtgaggtgcccagagctgcaccctttcctccatttcccatcccccatctcctcaaccaccagggtctgagttctagcagggtcctgggggtatcccactgctatactgttctactgcttccctcagtatctgaatgtctcaatttaaaacttgaagctctttagaccaatagactggtgagaggagaaaggagcttatcccccagaccctgctttataccattcacatcccagggctgtgtccagacagcacaaaacggcaaggagagcccaagccccaatgccagaattcttccaaactccctgactctttgaagtttttactcaccccatttcaattatcctgatcccttctcatcccctgcttggcttctctgcatgtggtcatctgctgtggcttggtgtttaatgggttaaaaataagccactgcctgacatcccaacatttgacaccccagcaatgtgtgactcccccaacattccactatgccatcctgcagctgaaatgggaacactggctgcctctccaaacccgctcttggacagaggatctgggaggtggaagccaggccagaggacttggggaaaatgagatggaggaaggaaaaagggagaagctgagccacagcttaactcctacagagtgaaatgaaaacgggctgaaaataccaccccaggagaggacctcgccccaagcaagccagtgagcagccctgccagactactgccagactgagaaacccagaagctggtagtcatgtgggcttgccttctctgccaaacgactgggaaaccaaaatgagcccaccttgtgttcttcctagctccaccctccccgtgctgctgtgttctgctcctccccacgcttccctgctatagttcccagctgctgtaacggagccacctccaactctaacaataaaccaagttcattgc

SEQ ID NO: 314438 - DNA, 10266 bp, Homo sapiens
  misc_feature (6111)..(6111): n is a, c, g, or t
  misc_feature (6176)..(6176): n is a, c, g, or t
ttccctgaagctgccggctgaggccggagctgccgcctccatgagaggcttcctcctacaccccagggccagaggaccctttgccaccagagtgagatcctagagaccatcatcctggtaaatcccagtgcagacagcatcagctctgaggttcatcatcttcttagcagctcatcagcttataaactactaatcttgagtgggcaaagtttagagcctgggggagacctcatcctacagagtggcacctactcatatgaaaactttgcccaggtccttcacaaccccgagatttcccaattgctcagcaatagagaccctgggatacaggccttccttaccgtgtcctgcttaggggaaggtgattggagccacctgggattatccagttcccaagagaccctgcacctccggctaaaccctgagcccactctgcccaccatggacggcgtggctgagttctccgagtatgtctctgagactgtggacgtgccatccccatttgacctactagagccccccacctcagggggcttcctcaagctctccaagccttgttgctacatcttcccaggtggtcgtggggactctgccctctttgctgtcaatggtttcaacatcctggtggatggtggctctgatcgcaagtcctgtttttggaagctggtacggcacttggaccgcattgactcggtgctactcacacacattggggcagacaacctgccaggcatcaatggactactgcagcgcaaagtggcagagctagaggaggagcagtcccagggctctagcagttacagcgactgggtgaagaaccttatctctcctgagcttggagttgtctttttcaacgtgcctgagaagctgcggcttcctgatgcctcccggaaagccaagcgtagcattgaggaggcctgcctcactctgcagcacttaaaccgcctgggcatccaggctgagcctctatatcgtgtggtcagcaataccattgagccactgaccctcttccacaaaatgggtgtgggccggctggacatgtatgtcctcaaccctgtcaaggacagcaaggagatgcagttcctcatgcaaaagtgggcaggcaatagtaaagccaagacaggcatcgtgctgcccaatgggaaggaggctgagatctccgtgccctaccttacctctatcactgctctggtggtctggctaccagccaatcccactgagaagattgtgcgtgtgctttttccaggaaatgctccccaaaacaagatcttggagggcctagaaaagcttcggcatctggacttcctgcgttaccctgtggccacgcagaaggacctggcttctggggctgtgcctaccaacctcaagcccagcaaaatcaaacagcgggctgatagcaaggagagcctcaaagccactaccaagacggccgtgagcaagttggccaaacgggaggaggtggtagaagagggagccaaggaggcacgttcagagctggccaaggagttagccaagacagagaagaaggcaaaagagtcatctgagaagcccccagagaagcctgccaagcctgagagggtgaagacagagtcaagtgaggcactgaaggcagagaagcgaaagctgatcaaagacaaggtagggaaaaagcaccttaaagaaaagatatcaaagctggaagaaaaaaaagacaaggagaaaaaagagatcaaaaaggagaggaaagagctcaagaaggatgaaggaaggaaggaggagaagaaggatgccaagaaggaggagaagaggaaagataccaaacctgagctcaagaagatttccaagccagacctaaagccctttactcctgaggtacgtaagaccctctataaagccaaggtccctggaagagtcaaaatagacaggagccgtgctatccgtggggagaaggagctgtcttctgagccccagacacccccagcccagaagggaactgtaccactcccaaccatcagtgggcacagggagctggtcctatcctcaccagaggacctcacacaggactttgaggagatgaagcgtgaggagagggctttgctggctgaacaaagggacacaggactaggagataagccattccctctagacactgcagaggagggacccccaagtacagctatccagggaacaccaccctctgttccagggctgggacaagaagaacatgtgatgaaggagaaagagcttgtcccagaggtccctgaggaacaaggcagcaaggacagaggcctagactctggggctgaaacagaggaagagaaagatacctgggaggaaaagaagcagagggaagcagagaggctcccagacagaacagaagccagagaggaaagtgaacctgaagtaaaggaggatgtgatagaaaaggctgagttagaagaaatggaggaggtacacccttcagatgaggaggaagaggacgcgacaaaagctgagggtttttaccaaaaacatatgcaggaacccttgaaggtaactccaaggagccgggaggcttttgggggtcgggaattgggactccagggcaaggcccctgagaaggagacctcgttattcctaagcagcctgaccacacctgcaggagccactgagcatgtctcttacatccaggatgagacaatccctggctactcagagactgagcagaccatctcagatgaggagatccatgatgagccggaggagcgcccagctccacccagatttcatacaagtacatatgacctgcccgggcctgaaggtgctggcccattcgaagccagccaacctgccgatagtgctgttcctgctacctctggcaaagtctatggaacgccagagactgaactcacctaccccactaacatagtggctgcccctttggctgaagaggaacatgtgtcctcggccacttcaatcactgagtgtgacaaactttcttcctttgccacatcagtggctgaggaccaatctgtggcctcacttacagctccccagacagaggagacaggcaagagctccctgctgcttgacacagtcacaagcatcccttcctcccgtactgaagctacgcagggcttggactatgtgccatcagctggtaccatctcacccacctcctcactggaagaagacaagggcttcaaatcaccaccctgtgaggacttctctgtgactggggagtcagagaagagaggagagatcatagggaaaggcttgtctggagagagagctgtggaagaggaagaggaggagacagcaaacgtagagatgtctgagaaactttgcagtcaatatggaactccagtgtttagtgcccctgggcatgccctacatccaggagaaccagcccttggagaagcagaggagcggtgccttagcccagatgacagcacagtgaagatggcttctcctccaccatctggcccacccagtgccacccacacaccctttcatcagtccccagtggaagaaaagtctgagccccaagactttcaggaggcagactcctggggagacactaagcgcacaccaggtgtgggcaaagaagatgctgctgaggagacagtcaagccagggcctgaagagggcacactagagaaggaagagaaagttcctcctcccaggagcccccaggcccaggaagcacctgtcaacattgatgaggggcttacaggctgtaccattcaactgttgccagcacaggataaagcaatagtctttgagattatggaggcaggagagcccacaggcccaattctgggagcagaagcccttcccggaggtttgaggactttaccccaagaacctggcaaacctcagaaagatgaggtgctcagatatcctgaccgaagcctctctcctgaagatgcagaatccctctctgtcctcagcgtgccctccccagacactgccaaccaagagcctacccccaagtctccctgtggcctgacagaacagtacctacacaaagaccgttggccagaggtatctccagaagacacccagtcactttctctgtcagaagagagtcccagcaaggagacctccctggatgtctcttctaagcagctctctccagaaagccttggcaccctccagtttggggaactaaaccttgggaaggaagaaatggggcatctgatgcaggccgaggatacctctcaccacacagctcccatgtctgttccagagccccatgcagccacagcgtcacctcccacagatgggacaactcgatactctgcacagacagacatcacagatgacagccttgacaggaagtcacctgccagctcattctctcactctacaccttcaggaaatgggaagtacttacctggggcgatcacaagccctgatgaacacattctgacacctgatagctccttctccaagagtcctgagtctttgccaggccctgccttggaggacattgccataaagtgggaagataaagttccagggttgaaagacagaacctcagaacagaagaaggaacctgagccaaaggatgaagttttacagcagaaagacaaaactctggagcacaaggaggtggtagagccgaaggatacagccatctatcagaaagatgaggctctgcatgtaaagaatgaggctgtgaaacagcaggataaggctttagaacaaaagggcagagacttagagcaaaaagacacagccctagaacagaaggacaaggccctggaaccaaaagacaaagacttagaagaaaaagacaaggccctggaacagaaggataagattccagaagagaaagacaaagccttagaacaaaaggatacagccctggaacagaaggacaaggccctggaaccaaaagataaagacttggaacaaaaggacagggtcctagaacagaaggagaagatcccagaagagaaagacaaagccttagatcaaaaagtcagaagtgttgaacataaggctccggaggacacggtcgctgaaatgaaggacagagacctagaacagacagacaaagcccctgaacagaaacaccaggcccaggaacaaaaggataaagtctcagaaaagaaggatcaggccttagaacaaaaatactgggctttgggacagaaggatgaagccctggaacaaaacattcaggctctggaagagaaccaccaaactcaggagcaggagagcctagtgcaggaggataaaaccaggaaaccaaagatgctagaggaaaaatccccagaaaaggtcaaggccatggaagagaagttagaagctcttctggagaagaccaaagctctgggcctggaagagagcctagtgcaggagggcagggccagagagcaggaagaaaagtactggagggggcaggatgtggtccaggagtggcaagaaacatctcctaccagagaggagccggctggagaacagaaagagcttgccccggcatgggaggacacatctcctgagcaggacaataggtattggaggggcagagaggatgtggccttggaacaggacacatactggagggagctaagctgtgagcggaaggtctggttccctcacgagctggatggccagggggcccgcccacactacactgaggaacgggaaagcactttcctagatgagggcccagatgatgagcaagaagtacccctgcgggaacacgcaacccggagcccctgggcctcagacttcaaggatttccaggaatcctcaccacagaaggggctagaggtggagcgctggcttgctgaatcaccagttgggttgccaccagaggaagaggacaaactgacccgctctccctttgagatcatctcccctccagcttccccacctgagatggttggacaaagggttccttcagccccaggacaagagagtcctatcccagaccctaagctcatgccacacatgaagaatgaacccactactccctcatggctggctgacatcccaccctgggtgcccaaggacagacccctcccccctgcacccctctccccagctcctggtccccccacacctgccccggaatcccatactcctgcacccttctcttggggcacagccgagtatgacagtgtggtggctgcagtncaggagggggcagctgagttggaaggtgggccatactcccccctggggaaggactaccgcaaggntgaaggggaaagggaagaagaaggtagggctgaggctcctgacaaaagctcacacagctcaaaggtaccagaggccagcaaaagccatgccaccacggagcctgagcagactgagccggagcagagagagcccacaccctatcctgatgagagaagctttcagtatgcagacatctatgagcagatgatgcttactgggcttggccctgcatgccccactagagagcctccacttggagcagctggggattggcccccatgcctctcaaccaaggaggcagctgccggccgaaacacatctgcagagaaggagctttcatctcctatctcacccaagagcctccagtctgacactccaaccttcagctatgcagccctggcaggacccactgtacccccaaggccagagccagggccaagtatggagcccagcctcaccccacctgcagttcccccccgtgctcctatcctgagcaaaggcccaagcccccctcttaatggtaacatcctgagctgcagcccagataggaggtccccatcccccaaggaatcaggccggagtcactgggatgacagcactagtgactcagaactggagaagggggctcgggaacagccagaaaaagaggcccaatccccaagtcctcctcaccccattcctatggggtcccccacattatggccagaaactgaggcacatgttagccctcccttggactcacacctggggcctgcccgacccagtctggacttccctgcttcagcctttggcttctcctcattgcagccagctcccccacagctgccctctccagctgaaccccgctcggcaccctgtggctcccttgccttctctggggatcgagctctggctctggctccaggaccccccaccagaacccggcatgatgaatacctggaagtgaccaaggcccccagcctggattcctcactgccccagctcccatcacccagttctcctggggcccctctcctctccaatctgccacgacctgcctcaccagccctgtctgagggctcctcctctgaggctaccacgcctgtgatttcaagtgtggcggagcgcttctctccaagccttgaggctgcagaacaggagtctggagagctggacccaggaatggaaccagctgcccacagcctctgggacctcactcctctgagcccagcacccccagcttcactggacttggccctagctccagctccaagcctgcctggagacatgggtgatggcatcctgccgtgccacctggagtgctcagaggcagccacggagaagccaagccccttccaggttccctctgaggattgtgcagccaatggcccaactgaaaccagccctaaccccccaggccctgccccagccaaggctgaaaatgaagaggctgcggcttgccctgcctgggaacgtggggcctggcctgaaggagctgagaggagctcccggcctgacacattgctctcccctgagcagccagtgtgtcctgcagggggctccgggggcccacccagcagtgcctctcctgaggtcgaagctgggccccagggatgtgccactgagcctcggccccatcgtggggagctctccccatccttcctgaacccacctctgcccccatccatagatgatagggacctctcaactgaggaagttcggctagtaggaagaggggggcggcgccgggtaggggggccagggaccactgggggcccatgccctgtgactgatgagacaccccctacatcagccagtgactcaggctcctcacagtcagattctgatgtcccgccagaaactgaggagtgtccgtccatcacagctgaggcagccctcgactcagatgaagatggagacttcctacctgtggacaaagctgggggtgtcagtggtactcaccaccccaggcctggccatgacccacctcctctcccacagccagacccccgcccatcccctccccgccctgatgtgtgcatggctgaccccgaggggctcagctcagagtctgggagagtagagaggctacgggagaaggaaaaggttcaggggcgagtagggcgtagggccccaggtaaggacaagccagtgtcccctgcacggcgtctggttcttcggggaaaacgctcacccacccctggtaaagggcctgcagatcgagcatcccgggccccacctcgaccacgcagcaccacaagccaggtcaccccagcagaggaaaaggatggacacagccccatgtccaaaggcctagtcaatggactcaaggcaggaccaatggccttgagttccaagggcagctctggtgcccctgtatatgtggatctcgcctacatcccgaatcattgcagtggcaagactgctgaccttgacttcttccgtcgagtgcgtgcatcctactatgtggtcagtgggaatgaccctgccaatggcgagccaagccgggctgtgctggatgccctgctggagggcaaggcccagtggggggagaatcttcaggtgactctgatccctactcatgacacggaggtgactcgtgagtggtaccaacaaactcatgagcagcagcaacaactgaatgtcctggtcctggctagcagcagcaccgtggtgatgcaggatgagtccttccctgcctgcaagattgagttctgaaagagccgccctcccttccccaaggatccactcccccagctcctttagagaatggctactgctgagtcctttggggttgagggagatgggagctagggggaggggagggagatgtcttgttgtggggacttgggctgggctaaatgggaggggttgtccctccccatcatccattcctgtgaggtgtctcaaaccaaagttaacagggagaggatgggggaggggacaaattagaataggatagcatctgatgcctgagaaccctctcctagcactgtcaaatgctggtattgaatggggactgaggatgggtctcagagagcaacctcctccctcgtagagggagattatatccccaactccagggacctctttatctcaatctatttatttggcatcctgggaaggatttccaatagtaatttatgtgacctggggcaggataccgtcagtgaggtgcccagagctgcaccctttcctccatttcccatcccccatctcctcaaccaccagggtctgagttctagcagggtcctgggggtatcccactgctatactgttctactgcttccctcagtatctgaatgtctcaatttaaaacttgaagctctttagaccaatagactggtgagaggagaaaggagcttatcccccagaccctgctttataccattcacatcccagggctgtgtccagacagcacaaaacggcaaggagagcccaagccccaatgccagaattcttccaaactccctgactctttgaagtttttactcaccccatttcaattatcctgatcccttctcatcccctgcttggcttctctgcatgtggtcatctgctgtggcttggtgtttaatgggttaaaaataagccactgcctgacatcccaacatttgacaccccagcaatgtgtgactcccccaacattccactatgccatcctgcagctgaaatgggaacactggctgcctctccaaacccgctcttggacagaggatctgggaggtggaagccaggccagaggacttggggaaaatgagatggaggaaggaaaaagggagaagctgagccacagcttaactcctacagagtgaaatgaaaacgggctgaaaataccaccccaggagaggacctcgccccaagcaagccagtgagcagccctgccagactactgccagactgagaaacccagaagctggtagtcatgtgggcttgccttctctgccaaacgactgggaaaccaaaatgagcccaccttgtgttcttcctagctccaccctccccgtgctgctgtgttctgctcctccccacgcttccctgctatagttcccagctgctgtaacggagccacctccaactctaacaataaaccaagttcattgcacacagtctctagtgatcctctaggct

SEQ ID NO: 314439 - DNA, 7020 bp, Homo sapiens
  misc_feature (2892)..(2892): n is a, c, g, or t
  misc_feature (2957)..(2957): n is a, c, g, or t
cgattgctgatggctgactcttgaggatccccttcctctcctcccacctcggagacagcaaacgtagagatgtctgagaaactttgcagtcaatatggaactccagtgtttagtgcccctgggcatgccctacatccaggagaaccagcccttggagaagcagaggagcggtgccttagcccagatgacagcacagtgaagatggcttctcctccaccatctggcccacccagtgccacccacacaccctttcatcagtccccagtggaagaaaagtctgagccccaagactttcaggaggcagactcctggggagacactaagcgcacaccaggtgtgggcaaagaagatgctgctgaggagacagtcaagccagggcctgaagagggcacactagagaaggaagagaaagttcctcctcccaggagcccccaggcccaggaagcacctgtcaacattgatgaggggcttacaggctgtaccattcaactgttgccagcacaggataaagcaatagtctttgagattatggaggcaggagagcccacaggcccaattctgggagcagaagcccttcccggaggtttgaggactttaccccaagaacctggcaaacctcagaaagatgaggtgctcagatatcctgaccgaagcctctctcctgaagatgcagaatccctctctgtcctcagcgtgccctccccagacactgccaaccaagagcctacccccaagtctccctgtggcctgacagaacagtacctacacaaagaccgttggccagaggtatctccagaagacacccagtcactttctctgtcagaagagagtcccagcaaggagacctccctggatgtctcttctaagcagctctctccagaaagccttggcaccctccagtttggggaactaaaccttgggaaggaagaaatggggcatctgatgcaggccgaggatacctctcaccacacagctcccatgtctgttccagagccccatgcagccacagcgtcacctcccacagatgggacaactcgatactctgcacagacagacatcacagatgacagccttgacaggaagtcacctgccagctcattctctcactctacaccttcaggaaatgggaagtacttacctggggcgatcacaagccctgatgaacacattctgacacctgatagctccttctccaagagtcctgagtctttgccaggccctgccttggaggacattgccataaagtgggaagataaagttccagggttgaaagacagaacctcagaacagaagaaggaacctgagccaaaggatgaagttttacagcagaaagacaaaactctggagcacaaggaggtggtagagccgaaggatacagccatctatcagaaagatgaggctctgcatgtaaagaatgaggctgtgaaacagcaggataaggctttagaacaaaagggcagagacttagagcaaaaagacacagccctagaacagaaggacaaggccctggaaccaaaagacaaagacttagaagaaaaagacaaggccctggaacagaaggataagattccagaagagaaagacaaagccttagaacaaaaggatacagccctggaacagaaggacaaggccctggaaccaaaagataaagacttggaacaaaaggacagggtcctagaacagaaggagaagatcccagaagagaaagacaaagccttagatcaaaaagtcagaagtgttgaacataaggctccggaggacacggtcgctgaaatgaaggacagagacctagaacagacagacaaagcccctgaacagaaacaccaggcccaggaacaaaaggataaagtctcagaaaagaaggatcaggccttagaacaaaaatactgggctttgggacagaaggatgaagccctggaacaaaacattcaggctctggaagagaaccaccaaactcaggagcaggagagcctagtgcaggaggataaaaccaggaaaccaaagatgctagaggaaaaatccccagaaaaggtcaaggccatggaagagaagttagaagctcttctggagaagaccaaagctctgggcctggaagagagcctagtgcaggagggcagggccagagagcaggaagaaaagtactggagggggcaggatgtggtccaggagtggcaagaaacatctcctaccagagaggagccggctggagaacagaaagagcttgccccggcatgggaggacacatctcctgagcaggacaataggtattggaggggcagagaggatgtggccttggaacaggacacatactggagggagctaagctgtgagcggaaggtctggttccctcacgagctggatggccagggggcccgcccacactacactgaggaacgggaaagcactttcctagatgagggcccagatgatgagcaagaagtacccctgcgggaacacgcaacccggagcccctgggcctcagacttcaaggatttccaggaatcctcaccacagaaggggctagaggtggagcgctggcttgctgaatcaccagttgggttgccaccagaggaagaggacaaactgacccgctctccctttgagatcatctcccctccagcttccccacctgagatggttggacaaagggttccttcagccccaggacaagagagtcctatcccagaccctaagctcatgccacacatgaagaatgaacccactactccctcatggctggctgacatcccaccctgggtgcccaaggacagacccctcccccctgcacccctctccccagctcctggtccccccacacctgccccggaatcccatactcctgcacccttctcttggggcacagccgagtatgacagtgtggtggctgcagtncaggagggggcagctgagttggaaggtgggccatactcccccctggggaaggactaccgcaaggntgaaggggaaagggaagaagaaggtagggctgaggctcctgacaaaagctcacacagctcaaaggtaccagaggccagcaaaagccatgccaccacggagcctgagcagactgagccggagcagagagagcccacaccctatcctgatgagagaagctttcagtatgcagacatctatgagcagatgatgcttactgggcttggccctgcatgccccactagagagcctccacttggagcagctggggattggcccccatgcctctcaaccaaggaggcagctgccggccgaaacacatctgcagagaaggagctttcatctcctatctcacccaagagcctccagtctgacactccaaccttcagctatgcagccctggcaggacccactgtacccccaaggccagagccagggccaagtatggagcccagcctcaccccacctgcagttcccccccgtgctcctatcctgagcaaaggcccaagcccccctcttaatggtaacatcctgagctgcagcccagataggaggtccccatcccccaaggaatcaggccggagtcactgggatgacagcactagtgactcagaactggagaagggggctcgggaacagccagaaaaagaggcccaatccccaagtcctcctcaccccattcctatggggtcccccacattatggccagaaactgaggcacatgttagccctcccttggactcacacctggggcctgcccgacccagtctggacttccctgcttcagcctttggcttctcctcattgcagccagctcccccacagctgccctctccagctgaaccccgctcggcaccctgtggctcccttgccttctctggggatcgagctctggctctggctccaggaccccccaccagaacccggcatgatgaatacctggaagtgaccaaggcccccagcctggattcctcactgccccagctcccatcacccagttctcctggggcccctctcctctccaatctgccacgacctgcctcaccagccctgtctgagggctcctcctctgaggctaccacgcctgtgatttcaagtgtggcggagcgcttctctccaagccttgaggctgcagaacaggagtctggagagctggacccaggaatggaaccagctgcccacagcctctgggacctcactcctctgagcccagcacccccagcttcactggacttggccctagctccagctccaagcctgcctggagacatgggtgatggcatcctgccgtgccacctggagtgctcagaggcagccacggagaagccaagccccttccaggttccctctgaggattgtgcagccaatggcccaactgaaaccagccctaaccccccaggccctgccccagccaaggctgaaaatgaagaggctgcggcttgccctgcctgggaacgtggggcctggcctgaaggagctgagaggagctcccggcctgacacattgctctcccctgagcagccagtgtgtcctgcagggggctccgggggcccacccagcagtgcctctcctgaggtcgaagctgggccccagggatgtgccactgagcctcggccccatcgtggggagctctccccatccttcctgaacccacctctgcccccatccatagatgatagggacctctcaactgaggaagttcggctagtaggaagaggggggcggcgccgggtaggggggccagggaccactgggggcccatgccctgtgactgatgagacaccccctacatcagccagtgactcaggctcctcacagtcagattctgatgtcccgccagaaactgaggagtgtccgtccatcacagctgaggcagccctcgactcagatgaagatggagacttcctacctgtggacaaagctgggggtgtcagtggtactcaccaccccaggcctggccatgacccacctcctctcccacagccagacccccgcccatcccctccccgccctgatgtgtgcatggctgaccccgaggggctcagctcagagtctgggagagtagagaggctacgggagaaggaaaaggttcaggggcgagtagggcgtagggccccaggtaaggacaagccagtgtcccctgcacggcgtctggttcttcggggaaaacgctcacccacccctggtaaagggcctgcagatcgagcatcccgggccccacctcgaccacgcagcaccacaagccaggtcaccccagcagaggaaaaggatggacacagccccatgtccaaaggcctagtcaatggactcaaggcaggaccaatggccttgagttccaagggcagctctggtgcccctgtatatgtggatctcgcctacatcccgaatcattgcagtggcaagactgctgaccttgacttcttccgtcgagtgcgtgcatcctactatgtggtcagtgggaatgaccctgccaatggcgagccaagccgggctgtgctggatgccctgctggagggcaaggcccagtggggggagaatcttcaggtgactctgatccctactcatgacacggaggtgactcgtgagtggtaccaacaaactcatgagcagcagcaacaactgaatgtcctggtcctggctagcagcagcaccgtggtgatgcaggatgagtccttccctgcctgcaagattgagttctgaaagagccgccctcccttccccaaggatccactcccccagctcctttagagaatggctactgctgagtcctttggggttgagggagatgggagctagggggaggggagggagatgtcttgttgtggggacttgggctgggctaaatgggaggggttgtccctccccatcatccattcctgtgaggtgtctcaaaccaaagttaacagggagaggatgggggaggggacaaattagaataggatagcatctgatgcctgagaaccctctcctagcactgtcaaatgctggtattgaatggggactgaggatgggtctcagagagcaacctcctccctcgtagagggagattatatccccaactccagggacctctttatctcaatctatttatttggcatcctgggaaggatttccaatagtaatttatgtgacctggggcaggataccgtcagtgaggtgcccagagctgcaccctttcctccatttcccatcccccatctcctcaaccaccagggtctgagttctagcagggtcctgggggtatcccactgctatactgttctactgcttccctcagtatctgaatgtctcaatttaaaacttgaagctctttagaccaatagactggtgagaggagaaaggagcttatcccccagaccctgctttataccattcacatcccagggctgtgtccagacagcacaaaacggcaaggagagcccaagccccaatgccagaattcttccaaactccctgactctttgaagtttttactcaccccatttcaattatcctgatcccttctcatcccctgcttggcttctctgcatgtggtcatctgctgtggcttggtgtttaatgggttaaaaataagccactgcctgacatcccaacatttgacaccccagcaatgtgtgactcccccaacattccactatgccatcctgcagctgaaatgggaacactggctgcctctccaaacccgctcttggacagaggatctgggaggtggaagccaggccagaggacttggggaaaatgagatggaggaaggaaaaagggagaagctgagccacagcttaactcctacagagtgaaatgaaaacgggctgaaaataccaccccaggagaggacctcgccccaagcaagccagtgagcagccctgccagactactgccagactgagaaacccagaagctggtagtcatgtgggcttgccttctctgccaaacgactgggaaaccaaaatgagcccaccttgtgttcttcctagctccaccctccccgtgctgctgtgttctgctcctccccacgcttccctgctatagttcccagctgctgtaacggagccacctccaactctaacaataaaccaagttcattgc

SEQ ID NO: 314440 - DNA, 802 bp, Homo sapiens
aggcagacgggaacctgagactttgtccaaacctcggctggaaggctggtcttggcactcggcgtcttagctagtggatttatcgcattaagactgtacttgggcctttttcatgatgacttgggtctcaatccttggagcagctgaaagaacagctcgggccacctgtggatgcacccacaatgaaatcagaggccacgtgaggtttgcaaggcagagtggcctgcagttttaactcgggcactatggcaatgcagacccaaaccaattgtgccagttctttgctgggtggcaaagtgttttcaggcttgtggtcactcctgatttctgtttggaagcacagttctctctctaaggagaatggaaacttggaaaggcctgtaaaatcggaaagcctgtaaaaggccgtagagtggagatgtataaaaatgtacggtcacccatgttttaggggttgaccgggagcggggcgaggaggagggtgggtatgaggcggtagcggaccgcggagtcgagacctacccgaacgacgcgggcgagcggggctttggacgccggtggagacgcaggcgagggtattaaagataatcaaacattatcaagaagaaggacaaggaactgaagttgttcaaggagtgctttgggtctggttgtagaagatcggttgaaattaccaatgcttttcttttcctcagcacacagaggatgatgctgactttgatgaatcccatatcagatgggaatgatggggagcttggcatgtgaacttgatcttcttcacggggggggattaggcccttat

SEQ ID NO: 314441 - DNA, 1695 bp, Homo sapiens
acgtttgcacgccgtgcgtaacgtgcattctggcggtgccgggagcggggcgaggaggagggtgggtatgaggcggtagcggaccgcggagtcgagacctacccgaacgacgcgggcgagcggggctttggacgccggtggagacgcaggcgagactccagcgggaggaagaagaggcctttgccagcagtcagagcagccaaggggcccaatccctcacattctccaagtttgaaggaaagaaaaccaacaagaagacccgcaaggttaccacagtgaagaaatcttcagtacgtcttccagggtcggatcaaagaaggatattgaaatggattccaggcgtgtgcctcgagacaagctggcctgcatcaccaagtgcagcaagcacatcttcgatgccatcaagatcacctagaacgagctggcgtcagcagatgacttcctccccaccctcatctacattgttttgaagggcaacccccatgccttcagtctaatatccagtatatcacgtgcttctgcaatccaagccgactgatgactggagaggatggctactatttcaccaatctggtgagtaagtgagttcttggcgttgtggagaaggactaggaaggtggtggttttggggatgtgataggtcactcaggcccatgacaggtgaatgcttctgtgtgagaaggcagcacggctgaggaagctcactttgcatcagggagcacaaggaccaggccgtacagacactccgcctccccgcacttgatcagagattgtgtttatcctacagaaacagatgacatgtgttgggcatcactccccacggtcctgggtagaagagtccttcacttggcagggctttttcaaccaatgaataaggcaaattatatataagttaataatgccatttcgaaccgagacagatggcagctaaatgaagtttaattaaagaatgagcgcggggcccttttcattgggtactgcatctacttcgaccacaaaagacgaagtgaccccaacttcaagaacaggcttcgagatggaagaaagaaacagaagcttgccaaggagagagctgggctttccaagttacctgaccttaaagatgctgaagctgttcagaagttcttccttgaagaaatacagcttggtgaagagttactagctcaaggtgaatatgagaagggcgtagaccatctgacaaatggaattgctgtgtgtggacagccacagcagttactgcaggccttacagcaaactcttccaccactagtgttccagatgcttttgactaagctcccaacaattagagaattctaagtgctcagagcttggctgaagatgatgtggaatgagaaacaaatgttaacataataaaatctcagttaaaaatatttaaaaaattcttggtagttgagcagctctgggggaataagggcaaatatccttgttatgaactacactgaaatctaccaaagttaatgtttactttgtgtaggtccatttgtctattttatttatttttcccagtgaaaagtgtattttgatagagaacttttcattttataaatacactatgagttactgaaaattcatatcatggatttcatttattcctgaaacatagttaaaatgtacatatgacatggcttatgttaaaaatacccagtgctcagttttgaaagataggcacaaaaa

SEQ ID NO: 314442 - DNA, 2293 bp, Homo sapiens
aggcagacgggaacctgagactttgtccaaacctcggctggaaggctggtcttggcactcggcgtcttagctagtggatttatcgcattaagactgtacttgggcctttttcatgatgacttgggtctcaatccttggagcagctgaaagaacagctcgggccacctgtggatgcacccacaatgaaatcagaggccacgtgaggtttgcaaggcagagtggcctgcagttttaactcgggcactatggcaatgcagacccaaaccaattgtgccagttctttgctgggtggcaaagtgttttcaggcttgtggtcactcctgatttctgtttggaagcacagttctctctctaaggagaatggaaacttggaaaggcctgtaaaatcggaaagcctgtaaaaggccgtagagtggagatgtataaaaatgtacggtcacccatgttttaggggttgaccgggagcggggcgaggaggagggtgggtatgaggcggtagcggaccgcggagtcgagacctacccgaacgacgcgggcgagcggggctttggacgccggtggagacgcaggcgagcaggaagaagatgagccttaggtctgaacgccgaggaattcatgtggatcctgtgcaagaaaggatgtggttactgtggcaaccctacctggcagggtttctgctccaagtgctggagggaagagtagcacaaagccaggcagaagcagattcaggagtactgggagctggtggaacgactccagcgggaggaagaagaggcctttgccagcagtcagagcagccaaggggcccaatccctcacattctccaagtttgaaggaaagaaaaccaacaagaagacccgcaaggttaccacagtgaagaaatcttcagtacgtcttccagggtcggatcaaagaaggatattgaaatggattccaggcgtgtgcctcgagacaagctggcctgcatcaccaagtgcagcaagcacatcttcgatgccatcaagatcacctagaacgagctggcgtcagcagatgacttcctccccaccctcatctacattgttttgaagggcaacccccatgccttcagtctaatatccagtatatcacgtgcttctgcaatccaagccgactgatgactggagaggatggctactatttcaccaatctggtgagtaagtgagttcttggcgttgtggagaaggactaggaaggtggtggttttggggatgtgataggtcactcaggcccatgacaggtgaatgcttctgtgtgagaaggcagcacggctgaggaagctcactttgcatcagggagcacaaggaccaggccgtacagacactccgcctccccgcacttgatcagagattgtgtttatcctacagaaacagatgacatgtgttgggcatcactccccacggtcctgggtagaagagtccttcacttggcagggctttttcaaccaatgaataaggcaaattatatataagttaataatgccatttcgaaccgagacagatggcagctaaatgaagtttaattaaagaatgagcgcggggcccttttcattgggtactgcatctacttcgaccacaaaagacgaagtgaccccaacttcaagaacaggcttcgagatggaagaaagaaacagaagcttgccaaggagagagctgggctttccaagttacctgaccttaaagatgctgaagctgttcagaagttcttccttgaagaaatacagcttggtgaagagttactagctcaaggtgaatatgagaagggcgtagaccatctgacaaatggaattgctgtgtgtggacagccacagcagttactgcaggccttacagcaaactcttccaccactagtgttccagatgcttttgactaagctcccaacaattagagaattctaagtgctcagagcttggctgaagatgatgtggaatgagaaacaaatgttaacataataaaatctcagttaaaaatatttaaaaaattcttggtagttgagcagctctgggggaataagggcaaatatccttgttatgaactacactgaaatctaccaaagttaatgtttactttgtgtaggtccatttgtctattttatttatttttcccagtgaaaagtgtattttgatagagaacttttcattttataaatacactatgagttactgaaaattcatatcatggatttcatttattcctgaaacatagttaaaatgtacatatgacatggcttatgttaaaaatacccagtgctcagttttgaaagataggcacaaaaa

SEQ ID NO: 314443 - DNA, 2390 bp, Homo sapiens
aggcagacgggaacctgagactttgtccaaacctcggctggaaggctggtcttggcactcggcgtcttagctagtggatttatcgcattaagactgtacttgggcctttttcatgatgacttgggtctcaatccttggagcagctgaaagaacagctcgggccacctgtggatgcacccacaatgaaatcagaggccacgtgaggtttgcaaggcagagtggcctgcagttttaactcgggcactatggcaatgcagacccaaaccaattgtgccagttctttgctgggtggcaaagtgttttcaggcttgtggtcactcctgatttctgtttggaagcacagttctctctctaaggagaatggaaacttggaaaggcctgtaaaatcggaaagcctgtaaaaggccgtagagtggagatgtataaaaatgtacggtcacccatgttttaggggttgaccgggagcggggcgaggaggagggtgggtatgaggcggtagcggaccgcggagtcgagacctacccgaacgacgcgggcgagcggggctttggacgccggtggagacgcaggcgagcaggaagaagatgagccttaggtctgaacgccgaggaattcatgtggatcctgtgcaagaaaggatgtggttactgtggcaaccctacctggcagggtttctgctccaagtgctggagggaagagtagcacaaagccaggcagaagcagattcaggagtactgggagctggtggaacgactccagcgggaggaagaagaggcctttgccagcagtcagagcagccaaggggcccaatccctcacattctccaagtttgaaggaaagaaaaccaacaagaagacccgcaaggttaccacagtgaagaaatcttcagtacgtcttccagggtcggatcaaagaagggctggagtgcaatggcgcgatctcggctcactgcaacctccacctattgggttcaagtgattctcctgcctcagcctcccaatagctgggattacagatattgaaatggattccaggcgtgtgcctcgagacaagctggcctgcatcaccaagtgcagcaagcacatcttcgatgccatcaagatcacctagaacgagctggcgtcagcagatgacttcctccccaccctcatctacattgttttgaagggcaacccccatgccttcagtctaatatccagtatatcacgtgcttctgcaatccaagccgactgatgactggagaggatggctactatttcaccaatctggtgagtaagtgagttcttggcgttgtggagaaggactaggaaggtggtggttttggggatgtgataggtcactcaggcccatgacaggtgaatgcttctgtgtgagaaggcagcacggctgaggaagctcactttgcatcagggagcacaaggaccaggccgtacagacactccgcctccccgcacttgatcagagattgtgtttatcctacagaaacagatgacatgtgttgggcatcactccccacggtcctgggtagaagagtccttcacttggcagggctttttcaaccaatgaataaggcaaattatatataagttaataatgccatttcgaaccgagacagatggcagctaaatgaagtttaattaaagaatgagcgcggggcccttttcattgggtactgcatctacttcgaccacaaaagacgaagtgaccccaacttcaagaacaggcttcgagatggaagaaagaaacagaagcttgccaaggagagagctgggctttccaagttacctgaccttaaagatgctgaagctgttcagaagttcttccttgaagaaatacagcttggtgaagagttactagctcaaggtgaatatgagaagggcgtagaccatctgacaaatggaattgctgtgtgtggacagccacagcagttactgcaggccttacagcaaactcttccaccactagtgttccagatgcttttgactaagctcccaacaattagagaattctaagtgctcagagcttggctgaagatgatgtggaatgagaaacaaatgttaacataataaaatctcagttaaaaatatttaaaaaattcttggtagttgagcagctctgggggaataagggcaaatatccttgttatgaactacactgaaatctaccaaagttaatgtttactttgtgtaggtccatttgtctattttatttatttttcccagtgaaaagtgtattttgatagagaacttttcattttataaatacactatgagttactgaaaattcatatcatggatttcatttattcctgaaacatagttaaaatgtacatatgacatggcttatgttaaaaatacccagtgctcagttttgaaagataggcacaaaaa

SEQ ID NO: 314444 - DNA, 1002 bp, Homo sapiens
  misc_feature (14)..(14): n is a, c, g, or t
  misc_feature (17)..(17): n is a, c, g, or t
gggggcaggcgcanganccgcgctctgggcctctgctcaggctctgccgcggacgacctcgaggcccttagttgactgggaccggaagtggcgtgtgctcggcctttctgtgttcctggcccgcggccgtcgggtgtgagctgcgccgaccgctctgagggttcgtggcccaccgctccttcgcggtccctgccgccaccgtccacgctcagcgttgtagagaagatggtgggtcggaacagcgccatcgccgccggtgtatgcggggcccttttcattgggtactgcatctacttcgaccacaaaagacgaagtgaccccaacttcaagaacaggcttcgagatggaagaaagaaacagaagcttgccaaggagagagctgggctttccaagttacctgaccttaaagatgctgaagctgttcagaagttcttccttgaagaaatacagcttggtgaagagttactagctcaaggtgaatatgagaagggcgtagaccatctgacaaatggaattgctgtgtgtggacagccacagcagttactgcaggccttacagcaaactcttccaccactagtgttccagatgcttttgactaagctcccaacaattagagaattctaagtgctcagagcttggctgaagatgatgtggaatgagaaacaaatgttaacataataaaatctcagttaaaaatatttaaaaaattcttggtagttgagcagctctgggggaataagggcaaatatccttgttatgaactacactgaaatctaccaaagttaatgtttactttgtgtaggtccatttgtctattttatttatttttcccagtgaaaagtgtattttgatagagaacttttcattttataaatacactatgagttactgaaaattcatatcatggatttcatttattcctgaaacatagttaaaatgtacatatgacatggcttatgttaaaaatacccagtgctcagttttgaaagataggcacaaaaa

SEQ ID NO: 314445 - DNA, 1890 bp, Homo sapiens
aggtaccttcagtgaaccaccagacaccaacatctgttgacttcctgatcttgaacttgccagcttcctgaactcaggaagaagatgagccttaggtctgaacgccgaggaattcatgtggatcctgtgcaagaaaggatgtggttactgtggcaaccctacctggcagggtttctgctccaagtgctggagggaagagtagcacaaagccaggcagaagcagattcaggagtactgggagctggtggaacgactccagcgggaggaagaagaggcctttgccagcagtcagagcagccaaggggcccaatccctcacattctccaagtttgaaggaaagaaaaccaacaagaagacccgcaaggttaccacagtgaagaaatcttcagtacgtcttccagggtcggatcaaagaagggctggagtgcaatggcgcgatctcggctcactgcaacctccacctattgggttcaagtgattctcctgcctcagcctcccaatagctgggattacagatattgaaatggattccaggcgtgtgcctcgagacaagctggcctgcatcaccaagtgcagcaagcacatcttcgatgccatcaagatcacctagaacgagctggcgtcagcagatgacttcctccccaccctcatctacattgttttgaagggcaacccccatgccttcagtctaatatccagtatatcacgtgcttctgcaatccaagccgactgatgactggagaggatggctactatttcaccaatctggtgagtaagtgagttcttggcgttgtggagaaggactaggaaggtggtggttttggggatgtgataggtcactcaggcccatgacaggtgaatgcttctgtgtgagaaggcagcacggctgaggaagctcactttgcatcagggagcacaaggaccaggccgtacagacactccgcctccccgcacttgatcagagattgtgtttatcctacagaaacagatgacatgtgttgggcatcactccccacggtcctgggtagaagagtccttcacttggcagggctttttcaaccaatgaataaggcaaattatatataagttaataatgccatttcgaaccgagacagatggcagctaaatgaagtttaattaaagaatgagcgcggggcccttttcattgggtactgcatctacttcgaccacaaaagacgaagtgaccccaacttcaagaacaggcttcgagatggaagaaagaaacagaagcttgccaaggagagagctgggctttccaagttacctgaccttaaagatgctgaagctgttcagaagttcttccttgaagaaatacagcttggtgaagagttactagctcaaggtgaatatgagaagggcgtagaccatctgacaaatggaattgctgtgtgtggacagccacagcagttactgcaggccttacagcaaactcttccaccactagtgttccagatgcttttgactaagctcccaacaattagagaattctaagtgctcagagcttggctgaagatgatgtggaatgagaaacaaatgttaacataataaaatctcagttaaaaatatttaaaaaattcttggtagttgagcagctctgggggaataagggcaaatatccttgttatgaactacactgaaatctaccaaagttaatgtttactttgtgtaggtccatttgtctattttatttatttttcccagtgaaaagtgtattttgatagagaacttttcattttataaatacactatgagttactgaaaattcatatcatggatttcatttattcctgaaacatagttaaaatgtacatatgacatggcttatgttaaaaatacccagtgctcagttttgaaagataggcacaaaaa

SEQ ID NO: 314446 - DNA, 1062 bp, Homo sapiens
tcctcgaatcgacggtttctcccggtagcttaactttctcaattcttttcgtcccatcagcatggtatctgctcaatgctgctaatgacctccaggaagatcgcttggacaaacaaattcttggtaggcacagagaggagatttcgatcttcattggagagaggtcattcagctctgtcacctgcttcatagcggaggcatgtcgtcgtagcgctccgccttgctcgggcagccgcgcccgctgcagcagctgtcccggtcccccatgccatttcgaaccgagacagatggcagctaaatgaagtttaattaaagaatgagcgcggggcccttttcattgggtactgcatctacttcgaccacaaaagacgaagtgaccccaacttcaagaacaggcttcgagatggaagaaagaaacagaagcttgccaaggagagagctgggctttccaagttacctgaccttaaagatgctgaagctgttcagaagttcttccttgaagaaatacagcttggtgaagagttactagctcaaggtgaatatgagaagggcgtagaccatctgacaaatggaattgctgtgtgtggacagccacagcagttactgcaggccttacagcaaactcttccaccactagtgttccagatgcttttgactaagctcccaacaattagagaattctaagtgctcagagcttggctgaagatgatgtggaatgagaaacaaatgttaacataataaaatctcagttaaaaatatttaaaaaattcttggtagttgagcagctctgggggaataagggcaaatatccttgttatgaactacactgaaatctaccaaagttaatgtttactttgtgtaggtccatttgtctattttatttatttttcccagtgaaaagtgtattttgatagagaacttttcattttataaatacactatgagttactgaaaattcatatcatggatttcatttattcctgaaacatagttaaaatgtacatatgacatggcttatgttaaaaatacccagtgctcagttttgaaagataggcacaaaaa

SEQ ID NO: 314447 - DNA, 1419 bp, Homo sapiens
acgtttgcacgccgtgcgtaacgtgcattctggcggtgccgggagcggggcgaggaggagggtgggtatgaggcggtagcggaccgcggagtcgagacctacccgaacgacgcgggcgagcggggctttggacgccggtggagacgcaggcgagactccagcgggaggaagaagaggcctttgccagcagtcagagcagccaaggggcccaatccctcacattctccaagtttgaaggaaagaaaaccaacaagaagacccgcaaggttaccacagtgaagaaatcttcagtacgtcttccagggtcggatcaaagaaggatattgaaatggattccaggcgtgtgcctcgagacaagctggcctgcatcaccaagtgcagcaagcacatcttcgatgccatcaagatcacctagaacgagctggcgtcagcagatgacttcctccccaccctcatctacattgttttgaagggcaacccccatgccttcagtctaatatccagtatatcacgtgcttctgcaatccaagccgactgatgactggagaggatggctactatttcaccaatctggtgagtaagtgagttcttggcgttgtggagaaggactaggaaggtggtggttttggggatgtgataggtcactcaggcccatgacaggtgaatgcttctgtgtgagaaggcagcacggctgaggaagctcactttgcatcagggagcacaaggaccaggccgtacagacactccgcctccccgcacttgatcagagattgtgtttatcctacagaaacagatgacatgtgttgggcatcactccccacggtcctgggtagaagagtccttcacttggcagggctttttcaaccaatgaataaggcaaattatatataagttaataatgccatttcgaaccgagacagatggcagctaaatgaagtttaattaaagaatgagcgcggggcccttttcattgggtactgcatctacttcgaccacaaaagacgaagtgaccccaacttcaagaacaggcttcgagatggaagaaagaaacagaagcttgccaaggagagagctgggctttccaagttacctgaccttaaagatgctgaagctgttcagaagttcttccttgaagaaatacagcttggtgaagagttactagctcaaggtgaatatgagaagggcgtagaccatctgacaaatggaattgctgtgtgtggacagccacagcagttactgcaggccttacagcaaactcttccaccactagtgttccagatgacatagctgactcagcgtggtcaacaaacgagcgccgtgttaaatccgtcatgcccgggtataaatcatgtacgtcggtgaaacacgcctcccggtcaatgatgtatcccgagtgtaacacgtccgcacaagttaaac

SEQ ID NO: 314448 - DNA, 2242 bp, Homo sapiens
acgtttgcacgccgtgcgtaacgtgcattctggcggtgccgggagcggggcgaggaggagggtgggtatgaggcggtagcggaccgcggagtcgagacctacccgaacgacgcgggcgagcggggctttggacgccggtggagacgcaggcgagactccagcgggaggaagaagaggcctttgccagcagtcagagcagccaaggggcccaatccctcacattctccaagtttgaaggaaagaaaaccaacaagaagacccgcaaggttaccacagtgaagaaatcttcagtacgtcttccagggtcggatcaaagaaggatattgaaatggattccaggcgtgtgcctcgagacaagctggcctgcatcaccaagtgcagcaagcacatcttcgatgccatcaagatcacctagaacgagctggcgtcagcagatgacttcctccccaccctcatctacattgttttgaagggcaacccccatgccttcagtctaatatccagtatatcacgtgcttctgcaatccaagccgactgatgactggagaggatggctactatttcaccaatctggtgagtaagtgagttcttggcgttgtggagaaggactaggaaggtggtggttttggggatgtgataggtcactcaggcccatgacaggtgaatgcttctgtgtgagaaggcagcacggctgaggaagctcactttgcatcagggagcacaaggaccaggccgtacagacactccgcctccccgcacttgatcagagattgtgtttatcctacagaaacagatgacatgtgttgggcatcactccccacggtcctgggtagaagagtccttcacttggcagggctttttcaaccaatgaataaggcaaattatatataagttaataatgccatttcgaaccgagacagatggcagctaaatgaagtttaattaaagaatgagcgcggggcccttttcattgggtactgcatctacttcgaccacaaaagacgaagtgaccccaacttcaagaacaggcttcgagatggaagaaagaaacagaagcttgccaaggagagagctgggctttccaagttacctgaccttaaagatgctgaagctgttcagaagttcttccttgaagaaatacagcttggtgaagagttactagctcaagaggctgggcactcactgcagctggctaatgatgaccatgtggacatgctttcgggccttcaggatcttctccagccagtggatgtcgtacgtgttggggttccggaaagggatgtcaggtggtggctcacacctgcgatcccagcactttgggaggccaaggcgggtggatcgcttgagcccagaagatcaagaccagtctgggcaacatggtgaaacctcgtctctactaaaaatagaaaaattagccgggagtggtggcgcacgcttgtagtcccagctacttgagaggctggggcaggaggattgcctaagcccatgaggtggaggctgcagtgagcagacattgcaccactgtactccagcctgggcaacagagtgagacgctgtttaaaaaaaaaaaaagaaaatcaacatacacaaaatgtgggtcatgggcagagcagccatgtccccagggagcaggcaggccagctgggggctcctgaaggctaggctggctgcagagggagggagggcctccccctttccccgggaggagggcttggtgtgctgaccctgaccacagacactgactgtatttctcgttgaagagttccttcacctgctcctgcaggatcacctccccaagtctgttggtatcatcttcatctaaagaggaagacaagggggcctgagagttggcactggcttggccaccagacctgctgcttctcccaccaggcatccctgacctgccaaaacattctctgcaggccctgcctactcccattgctggagtgcagaggcgcgatctcagcttactgcaacctccacctcccaggttcaagtgattctcctgcgtcagccccccaagtagctggaatcacaggcaccgcaccaccatgcctagctaatttttgtattttttagtagagacgggttttcatcatgttgctcaggctggtctcaaactcttgggctcaggtgatccacccgccttggcctcccaaagtgttgggattacaggcgtgagccactgtgcctggctgtagctggtttctagccccagttgttggtctgtccatccatccat

SEQ ID NO: 314449 - DNA, 1202 bp, Homo sapiens
aagttgtatgtttcaggagaaagaggcaggaactattgtagtacacctgggtctggatcccagctgacccaccatgaccttgactttcaccctccccatggtcttgccctctctgttccccgttccagaggctgggcactcactgcagctggctaatgatgaccatgtggacatgctttcgggccttcaggatcttctccagccagtggatgtcgtacgtgttggggttccggaaagggatgtcaggtggtggctcacacctgcgatcccagcactttgggaggccaaggcgggtggatcgcttgagcccagaagatcaagaccagtctgggcaacatggtgaaacctcgtctctactaaaaatagaaaaattagccgggagtggtggcgcacgcttgtagtcccagctacttgagaggctggggcaggaggattgcctaagcccatgaggtggaggctgcagtgagcagacattgcaccactgtactccagcctgggcaacagagtgagacgctgtttaaaaaaaaaaaaagaaaatcaacatacacaaaatgtgggtcatgggcagagcagccatgtccccagggagcaggcaggccagctgggggctcctgaaggctaggctggctgcagagggagggagggcctccccctttccccgggaggagggcttggtgtgctgaccctgaccacagacactgactgtatttctcgttgaagagttccttcacctgctcctgcaggatcacctccccaagtctgttggtatcatcttcatctaaagaggaagacaagggggcctgagagttggcactggcttggccaccagacctgctgcttctcccaccaggcatccctgacctgccaaaacattctctgcaggccctgcctactcccattgctggagtgcagaggcgcgatctcagcttactgcaacctccacctcccaggttcaagtgattctcctgcgtcagccccccaagtagctggaatcacaggcaccgcaccaccatgcctagctaatttttgtattttttagtagagacgggttttcatcatgttgctcaggctggtctcaaactcttgggctcaggtgatccacccgccttggcctcccaaagtgttgggattacaggcgtgagccactgtgcctggctgtagctggtttctagccccagttgttggtctgtccatccatccat

SEQ ID NO: 314450 - DNA, 882 bp, Homo sapiens
ggaacatcctgggaaattaaaaagcctgctaccccaaaaaaaaaaaaaaaaaaaaaaaaaaaaaaattaactaggctagtgcctgtagcccaatctactctggaggctgaggttggaggatcatttcagcctgagcagttgaggcagaagtgagctgtgatctggccaccgtactccagcctgggtgacagagtgagaccttgattaagacaaaacaaaacaaaaacaaaacaaaaaaaacaaacacaaggtgactttaagttgaagagcaagcacttgccatttgagccttagccagaactataaactgtaatgtgggtgaggttgtccttttccatatttccttcttcttcacagaggttgatttttagaaaacttagagaaaaacaaccaagtgttgacttcagtaacttctatgatcgtaactagctagtagaattaattgtcatttatatttttaaagggttttttttttttaaagcaaattgtctctttgtgaagaacatgtgcgttccttagacactgtctagctgctgaaaatgacggatttctggtttttggttggtttgttttcggagatgcaaaatgagcatatgtaccttaacggttcccaccacctttattttgccagtaatttaatttgagaaaattagttagttttgccctgttttcttcatctaaatatggaaatgtttaaatctgtgttctgctaggtactgatgacctcaagatatattccctggtgagatggactttctcagaatatgaggactgcatgcctggcacacttgaaatgttagcgtttcatttttcaagaggattaaagccctcatatgtttattttcctttaaaaaactacttaaggcagcacaaattggtaaa

SEQ ID NO: 314451 - DNA, 587 bp, Homo sapiens
aggtaccttcagtgaaccaccagacaccaacatctgttgacttcctgatcttgaacttgccagcttcctgaactcaggaagaagatgagccttaggtctgaacgccgaggaattcatgtggatcctgtgcaagaaaggatgtggttactgtggcaaccctacctggcagggtttctgctccaagtgctggagggaagagtagcacaaagccaggcagaagcagattcaggagtactgggagctggtggaacgactccagcgggaggaagaagaggcctttgccagcagtcagagcagccaaggggcccaatccctcacattctccaagtttgaaggaaagaaaaccaacaagaagacccgcaaggttaccacagtgaagaaatcttcagtacgtcttccagggtcggatcaaagaagggtactgatgacctcaagatatattccctggtgagatggactttctcagaatatgaggactgcatgcctggcacacttgaaatgttagcgtttcatttttcaagaggattaaagccctcatatgtttattttcctttaaaaaactacttaaggcagcacaaattggtaaa

SEQ ID NO: 314452 - DNA, 436 bp, Homo sapiens
ttatttatttcactgagcttgttggggaaaaggactagacttgatttctttcatgtaacctagagcagttgctgaatgagcatgagaggatcccatttgaaatctgtagtgcatgaagagccgtccatcctgtagctatgtgagacctcagactgatttggcatatttagtctctaggtctaaaatctttagatcctcctgaattaatggagtaataaccttcaggtatagagaaatcttggagaatatctagatcattctaatcctctcttgaattgcagactccagcgggaggaagaagaggcctttgccagcagtcagagcagccaaggggcccaatccctcacattctccaagtttgaaggaaagaaaaccaacaagaagacccgcaaggttaccacagtgaagaaatcttcagtacgtcttccagggtcgg

SEQ ID NO: 314453 - DNA, 693 bp, Homo sapiens
ggaaagggggttagtgaggattccttcataactttagagatgaaacatgattttcctattgcttcttttttgtgattcttttctcatgggaaatactgtcttttctgctttgtagatattgaaatggattccaggcgtgtgcctcgagacaagctggcctgcatcaccaagtgcagcaagcacatcttcgatgccatcaagatcacctagaacgagctggcgtcagcagatgacttcctccccaccctcatctacattgttttgaagggcaacccccatgccttcagtctaatatccagtatatcacgtgcttctgcaatccaagccgactgatgactggagaggatggctactatttcaccaatctggtgagtaagtgagttcttggcgttgtggagaaggactaggaaggtggtggttttggggatgtgataggtcactcaggcccatgacaggtgaatgcttctgtgtgagaaggcagcacggctgaggaagctcactttgcatcagggagcacaaggaccaggccgtacagacactccgcctccccgcacttgatcagagattgtgtttatcctacagaaacagatgacatgtgttgggcatcactccccacggtcctgggtagaagagtccttcacttggcagggctttttcaaccaatgaataaggcaaattatatataagttaata

SEQ ID NO: 314454 - DNA, 444 bp, Homo sapiens
tgttttgaagggcaacccccatgccttcagtctaatatccagtatatcacgtgcttctgcaatccaagccgactgatgactggagaggatggctactatttcaccaatctggtgagtaagtgagttcttggcgttgtggagaaggactaggaaggtggtggttttggggatgtgataggtcactcaggcccatgacaggtgaatgcttctgtgtgagaaggcagcacggctgaggaagctcactttgcatcagggagcacaaggaccaggccgtacagacactccgcctccccgcacttgatcagagattgtgtttatcctacagaaacagatgacatgtgttgggcatcactccccacggtcctgggtagaagagtccttcacttggcagggctttttcaaccaatgaataaggcaaattatatataagttaataatgccatt

SEQ ID NO: 314455 - DNA, 1792 bp, Homo sapiens
acgtttgcacgccgtgcgtaacgtgcattctggcggtgccgggagcggggcgaggaggagggtgggtatgaggcggtagcggaccgcggagtcgagacctacccgaacgacgcgggcgagcggggctttggacgccggtggagacgcaggcgagactccagcgggaggaagaagaggcctttgccagcagtcagagcagccaaggggcccaatccctcacattctccaagtttgaaggaaagaaaaccaacaagaagacccgcaaggttaccacagtgaagaaatcttcagtacgtcttccagggtcggatcaaagaagggctggagtgcaatggcgcgatctcggctcactgcaacctccacctattgggttcaagtgattctcctgcctcagcctcccaatagctgggattacagatattgaaatggattccaggcgtgtgcctcgagacaagctggcctgcatcaccaagtgcagcaagcacatcttcgatgccatcaagatcacctagaacgagctggcgtcagcagatgacttcctccccaccctcatctacattgttttgaagggcaacccccatgccttcagtctaatatccagtatatcacgtgcttctgcaatccaagccgactgatgactggagaggatggctactatttcaccaatctggtgagtaagtgagttcttggcgttgtggagaaggactaggaaggtggtggttttggggatgtgataggtcactcaggcccatgacaggtgaatgcttctgtgtgagaaggcagcacggctgaggaagctcactttgcatcagggagcacaaggaccaggccgtacagacactccgcctccccgcacttgatcagagattgtgtttatcctacagaaacagatgacatgtgttgggcatcactccccacggtcctgggtagaagagtccttcacttggcagggctttttcaaccaatgaataaggcaaattatatataagttaataatgccatttcgaaccgagacagatggcagctaaatgaagtttaattaaagaatgagcgcggggcccttttcattgggtactgcatctacttcgaccacaaaagacgaagtgaccccaacttcaagaacaggcttcgagatggaagaaagaaacagaagcttgccaaggagagagctgggctttccaagttacctgaccttaaagatgctgaagctgttcagaagttcttccttgaagaaatacagcttggtgaagagttactagctcaaggtgaatatgagaagggcgtagaccatctgacaaatggaattgctgtgtgtggacagccacagcagttactgcaggccttacagcaaactcttccaccactagtgttccagatgcttttgactaagctcccaacaattagagaattctaagtgctcagagcttggctgaagatgatgtggaatgagaaacaaatgttaacataataaaatctcagttaaaaatatttaaaaaattcttggtagttgagcagctctgggggaataagggcaaatatccttgttatgaactacactgaaatctaccaaagttaatgtttactttgtgtaggtccatttgtctattttatttatttttcccagtgaaaagtgtattttgatagagaacttttcattttataaatacactatgagttactgaaaattcatatcatggatttcatttattcctgaaacatagttaaaatgtacatatgacatggcttatgttaaaaatacccagtgctcagttttgaaagataggcacaaaaa

SEQ ID NO: 314456 - DNA, 1585 bp, Homo sapiens
acgtttgcacgccgtgcgtaacgtgcattctggcggtgccgggagcggggcgaggaggagggtgggtatgaggcggtagcggaccgcggagtcgagacctacccgaacgacgcgggcgagcggggctttggacgccggtggagacgcaggcgagactccagcgggaggaagaagaggcctttgccagcagtcagagcagccaaggggcccaatccctcacattctccaagtttgaaggaaagaaaaccaacaagaagacccgcaaggttaccacagtgaagaaatcttcagtacgtcttccagggtcggatcaaagaaggatattgaaatggattccaggcgtgtgcctcgagacaagctggcctgcatcaccaagtgcagcaagcacatcttcgatgccatcaagatcacctagaacgagctggcgtcagcagatgacttcctccccaccctcatctacattgttttgaagggcaacccccatgccttcagtctaatatccagtatatcacgtgcttctgcaatccaagccgactgatgactggagaggatggctactatttcaccaatctggtgagtaagtgagttcttggcgttgtggagaaggactaggaaggtggtggttttggggatgtgataggtcactcaggcccatgacaggtgaatgcttctgtgtgagaaggcagcacggctgaggaagctcactttgcatcagggagcacaaggaccaggccgtacagacactccgcctccccgcacttgatcagagattgtgtttatcctacagaaacagatgacatgtgttgggcatcactccccacggtcctgggtagaagagtccttcacttggcagggctttttcaaccaatgaataaggcaaattatatataagttaataatgccatttcgaaccgagacagatggcagctaaatgaagtttaattaaagaatgagcgcggggcccttttcattgggtactgcatctacttcgaccacaaaagacgaagtgaccccaacttcaagaacaggcttcgagatggaagaaagaaacagaagcttgccaaggagagagctgggctttccaagttacctgaccttaaagatgctgaagctgttcagaagttcttccttgaagaaatacagcttggtgaagagttactagctcaaggtgaatatgagaagggcgtagaccatctgacaaatggaattgctgtgtgtggacagccacagcagttactgcaggccttacagcaaactcttccaccactagtgttccagatgcttttgactaagctcccaacaattagagaattctaagtgctcagagcttggctgaagatgatgtggaatgagaaacaaatgttaacataataaaatctcagttaaaaatatttaaaaaattcttggtagttgagcagctctgggggaataagggcaaatatccttgttatgaactacactgaaatctaccaaagttaatgtttactttgtgtaggtccatttgtctattttatttatttttcccagtgaaaagtgtattttgatagagaacttttcattttataaatacactatgagttactga

SEQ ID NO: 314457 - DNA, 948 bp, Homo sapiens
  misc_feature (14)..(14): n is a, c, g, or t
  misc_feature (17)..(17): n is a, c, g, or t
gggggcaggcgcanganccgcgctctgggcctctgctcaggctctgccgcggacgacctcgaggcccttagttgactgggaccggaagtggcgtgtgctcggcctttctgtgttcctggcccgcggccgtcgggtgtgagctgcgccgaccgctctgagggttcgtggcccaccgctccttcgcggtccctgccgccaccgtccacgctcagcgttgtagagaagatggtgggtcggaacagcgccatcgccgccggtgtatgcggggcccttttcattgggtactgcatctacttcgaccgccagaagcttgccaaggagagagctgggctttccaagttacctgaccttaaagatgctgaagctgttcagaagttcttccttgaagaaatacagcttggtgaagagttactagctcaaggtgaatatgagaagggcgtagaccatctgacaaatggaattgctgtgtgtggacagccacagcagttactgcaggccttacagcaaactcttccaccactagtgttccagatgcttttgactaagctcccaacaattagagaattctaagtgctcagagcttggctgaagatgatgtggaatgagaaacaaatgttaacataataaaatctcagttaaaaatatttaaaaaattcttggtagttgagcagctctgggggaataagggcaaatatccttgttatgaactacactgaaatctaccaaagttaatgtttactttgtgtaggtccatttgtctattttatttatttttcccagtgaaaagtgtattttgatagagaacttttcattttataaatacactatgagttactgaaaattcatatcatggatttcatttattcctgaaacatagttaaaatgtacatatgacatggcttatgttaaaaatacccagtgctcagttttgaaagataggcacaaaaa

SEQ ID NO: 314458 - DNA, 5007 bp, Homo sapiens
tctgaagcgaatcagtgggaagtggcctacagtgggtcggctaccgaatacaccttcacccacttgaaaccaggcactttgtacaaactccgagcatgctgcatcagtaccggcggacacagccagtgttctgaaagtctccctgttcgcacactaagcattgcaccaggtcaatgtcgaccaccgagggttttgggtagaccaaagcacaaagaagtccacttagagtgggatgttcctgcatcggaaagtggctgtgaggtctcagagtacagcgtggagatgacggagcccgaagacgtagcctcggaagtgtaccatggcccagagctggagtgcaccgtcggcaacctgcttcctggaaccgtgtatcgcttccgggtgagggctctgaatgatggagggtatggtccctattctgatgtctcagaaattaccactgctgcagggcctcctggacaatgcaaagcaccttgtatttcttgtacacctgatggatgtgtcttagtgggttgggagagtcctgatagttctggtgctgacatctcagagtacaggttggaatggggagaagatgaagaatccttagaactcatttatcatgggacagacacccgttttgaaataagagacctgttgcctgctgcacagtattgctgtagactacaggccttcaatcaagcaggggcagggccgtacagtgaacttgtcctttgccagacgccagcgtctgcccctgaccccgtctccactctctgtgtcctggaggaggagccccttgatgcctaccctgattcaccttctgcgtgccttgtactgaactgggaagagccgtgcaataacggatctgaaatccttgcttacaccattgatctaggagacactagcattaccgtgggcaacaccaccatgcatgttatgaaagatctccttccagaaaccacctaccggatcagaattcaggctataaatgaaattggagctggaccatttagtcagttcattaaagcaaaaactcggccattaccacccttgcctcctaggctagaatgtgctgctgctggtcctcagagcctgaagctaaaatggggagacagtaactccaagacacatgctgctgaggacattgtgtacacactacagctggaggacagaaacaagaggtttatttcaatctacagaggacccagccacacctacaaggtccagagactgacggaattcacatgctactccttcagaatccaggcagcaagcgaggctggagaagggcccttctcagaaacctataccttcagcacaaccaaaagtgtcccccccaccatcaaagcacctcgagtaacacagttagaaggaaattcatgtgaaattttatgggagacggtaccatcaatgaaaggtgaccctgttaactacattctgcaggtattggttggaagagaatctgagtacaaacaggtgtacaagggagaagaagccacattccaaatctcaggcctccagaccaacacagactacaggttccgcgtatgtgcgtgtcgtcgctgtttagacacctctcaggagctaagcggagccttcagcccctctgcggcttttgtattacaacgaagtgaggtcatgcttacaggggacatggggagcttagatgatcccaaaatgaagagcatgatgcctactgatgaacagtttgcagccatcattgtgcttggctttgcaactttgtccattttatttgcctttatattacagtacttcttaatgaagtaaacccaacaaaactagaggtatgaattaatgctacacattttaatacacacatttattcagatactcccctttttaaagcccttttgttttttgatttatatactctgttttacagatttagctagaaaaaaaatgtcagtgttttggtgcacctttttgaaatgcaaaactaggaaaaggttaaactggattttttttttaaaaaaaaagaaaaaaaaagaagaaaagtataccagataccaaaagctagctttcttatgttttcctttaaattttcagatttaccttcattctgttttcactgatgtcttttgcaagcctttgatttttttttttttgttacagtttagtaatttatattcaccagtcacttcttatgtcttgaacatctgtatctgtaaacatgaatcaccgtgtgtgtacttacagggctaggatttcagtgttgtcagagtattaccacacagcaacagcaacatacagaagatatgttcactcagataagactgccctaaacaaccattttgtcactcagttatttaactgtgtttagctcatttaaatcaaaatgtgtactttaatctaaaatgttttaataatctgtatttcttataattttaacactatgagctgcctatataagaaatcaagtaaccagaatgcacctataaattatggagcattgtaggattttaccacatcaattcatagcagtaactttaagagggcattgtgcaatagttagttgttttcttgttcagctattttaaaggctgctttaacttgtttgtttgtctttgtatataactacttctaatctaatcactagagttattatattctgttatgtttgaccagaattatatgacaagaactggtgacagtttagtgcctctgcccattgtccatgatttacactaattgtgagcagtcttcttatgtgtcagctcattatttttgaaacatttgcctttaggctgttctttgaggtatcaatgaagtgattgaatttcaataccttaattcagtgcacataatactaatgtaacagcagatgaaaattgataaaacccaaaagagagtcatctaaatttgtagttcctatttctgtgggtttgcctggccatggttggagagggaatggtgtttgatggtaaacacagggtgtttggggatcaaggagcctagattctctccctggatctgtcactaacttgctgcgtgacctgaacacgtcactttacctctctgtgcctcagttttcccatgcatgaaaaataaaataaaataaaacggggattctaatgtttgtaagtgctttgagatctttgaccaacaggtgctattggagtgcaaagtgttactcttacgtgtttattttgagtcatgagataatcaattttaacccaaagtcattggattatttatatgaagtccataatgttcgagtacctcagggacatttaagagttggaggtgcaaatatattccaaaagggtgcaacagacacagtgtatccccctgcttctgtttttgtatatttttgctacttggtttttcttgatcatagctattttgtgcttgatctttattgtctaagatgcagtatcctgtactagcttataatattcccataccaaagtcatggggaaacaaacattattttgtttttggtttatttatactatattctgcatacagtactttaaatgccaattacagtgcaatctttatttattgtaaaattttttaagtgtacttatgtactaattttcccttgtagcatgttatatttttgtgttttatacttttgtaattttaggtcagtcttgttccttggcaacatctgtagtattattaatcttctgacattttcttatgtttttaaaaagataagagcatctagtgcattaaatgccaaaaaaaaaatacattatcagtgattgaaacgtttacatgtacccaaaaaccataatcatctcttggaagaaaatgctgagatcaatgaattattctgtgtgcctatattgacgtagtgagtactagagagttctgtattttattattgactataataattagtttaattagctttgcaaactgatggcatcaaggtaaatatatttttgccaaagttctggccttccaaaactcacccccttatttaaatgtgtgctatgacccactatgaccacagcatctgcattttctaaaaaattccatgcaggtgttttggggagaggtattttttaagcaatgaaaattcaactgagtacaaagccccctcttggggggttggggaagtctcttttttgaaacacttcagaactgctgctataaagaaattctctaattggttgaatttttttttaagtaaatagtactttaggccaaaatttatatgaatatttgatcttcttgagattttcatactatcatttaaccaccaggaagctgaagtgtgtgaagtacaaagctgacagcactttattttattgctctccattatttggtattcattatattccttcagtcagaaaattattactctctatggcactgttttttatcacaaatatgtatatgtgatattgatatataactatatatattgccatcacacacgaacaataaaataaagtgttctattaacctgatctctttgcccttttgctatgtgaggagtgaatgagtggccttctgatgctctgactcttctctgtatgtcaaactcatccctggcacaagaaattccagtcatgtgaagcaaactgccctttgtcctcaaagaaattgttgaaaaagaaaactttttaaagagattttttgcatattctctgccttgttcttatcaacttgaaatgttggcattttctaaccttgttttgttggctacaataattcagtattcatgtcaaaattgagaagtgccctaattgaatgtgtttgaatgttatccttgcacaattctttaaattgaaagataaaatgttttacctcactgttggacatacattccaagcttttcaactctaggagaaaaagaaaatcatgttttcctgtattgtaaattttagactatttcatatacattgtattaaaactgccatatcaattttaatgtatagattttgcaaatattatgctatatgtaatacctaactgtatctgtagtgtatatgtaatatatttatgcccaataaatgttttaattctttctgacttaaaaaaaaaaat

SEQ ID NO: 314459 - DNA, 4218 bp, Homo sapiens
aggtgatctagaggatccctggcgcgtctgaactgggaagagccgtgcaataacggatctgaaatccttgcttacaccattgatctaggagacactagcattaccgtgggcaacaccaccatgcatgttatgaaagatctccttccagaaaccacctaccggatcagaattcaggctataaatgaaattggagctggaccatttagtcagttcattaaagcaaaaactcggccattaccacccttgcctcctaggctagaatgtgctgctgctggtcctcagagcctgaagctaaaatggggagacagtaactccaagacacatgctgctgaggacattgtgtacacactacagctggaggacagaaacaagaggtttatttcaatctacagaggacccagccacacctacaaggtccagagactgacggaattcacatgctactccttcagaatccaggcagcaagcgaggctggagaagggcccttctcagaaacctataccttcagcacaaccaaaagtgtcccccccaccatcaaagcacctcgagtaacacagttagaaggaaattcatgtgaaattttatgggagacggtaccatcaatgaaaggtgaccctgttaactacattctgcaggtattggttggaagagaatctgagtacaaacaggtgtacaagggagaagaagccacattccaaatctcaggcctccagaccaacacagactacaggttccgcgtatgtgcgtgtcgtcgctgtttagacacctctcaggagctaagcggagccttcagcccctctgcggcttttgtattacaacgaagtgaggtcatgcttacaggggacatggggagcttagatgatcccaaaatgaagagcatgatgcctactgatgaacagtttgcagccatcattgtgcttggctttgcaactttgtccattttatttgcctttatattacagtacttcttaatgaagtaaacccaacaaaactagaggtatgaattaatgctacacattttaatacacacatttattcagatactcccctttttaaagcccttttgttttttgatttatatactctgttttacagatttagctagaaaaaaaatgtcagtgttttggtgcacctttttgaaatgcaaaactaggaaaaggttaaactggattttttttttaaaaaaaaagaaaaaaaaagaagaaaagtataccagataccaaaagctagctttcttatgttttcctttaaattttcagatttaccttcattctgttttcactgatgtcttttgcaagcctttgatttttttttttttgttacagtttagtaatttatattcaccagtcacttcttatgtcttgaacatctgtatctgtaaacatgaatcaccgtgtgtgtacttacagggctaggatttcagtgttgtcagagtattaccacacagcaacagcaacatacagaagatatgttcactcagataagactgccctaaacaaccattttgtcactcagttatttaactgtgtttagctcatttaaatcaaaatgtgtactttaatctaaaatgttttaataatctgtatttcttataattttaacactatgagctgcctatataagaaatcaagtaaccagaatgcacctataaattatggagcattgtaggattttaccacatcaattcatagcagtaactttaagagggcattgtgcaatagttagttgttttcttgttcagctattttaaaggctgctttaacttgtttgtttgtctttgtatataactacttctaatctaatcactagagttattatattctgttatgtttgaccagaattatatgacaagaactggtgacagtttagtgcctctgcccattgtccatgatttacactaattgtgagcagtcttcttatgtgtcagctcattatttttgaaacatttgcctttaggctgttctttgaggtatcaatgaagtgattgaatttcaataccttaattcagtgcacataatactaatgtaacagcagatgaaaattgataaaacccaaaagagagtcatctaaatttgtagttcctatttctgtgggtttgcctggccatggttggagagggaatggtgtttgatggtaaacacagggtgtttggggatcaaggagcctagattctctccctggatctgtcactaacttgctgcgtgacctgaacacgtcactttacctctctgtgcctcagttttcccatgcatgaaaaataaaataaaataaaacggggattctaatgtttgtaagtgctttgagatctttgaccaacaggtgctattggagtgcaaagtgttactcttacgtgtttattttgagtcatgagataatcaattttaacccaaagtcattggattatttatatgaagtccataatgttcgagtacctcagggacatttaagagttggaggtgcaaatatattccaaaagggtgcaacagacacagtgtatccccctgcttctgtttttgtatatttttgctacttggtttttcttgatcatagctattttgtgcttgatctttattgtctaagatgcagtatcctgtactagcttataatattcccataccaaagtcatggggaaacaaacattattttgtttttggtttatttatactatattctgcatacagtactttaaatgccaattacagtgcaatctttatttattgtaaaattttttaagtgtacttatgtactaattttcccttgtagcatgttatatttttgtgttttatacttttgtaattttaggtcagtcttgttccttggcaacatctgtagtattattaatcttctgacattttcttatgtttttaaaaagataagagcatctagtgcattaaatgccaaaaaaaaaatacattatcagtgattgaaacgtttacatgtacccaaaaaccataatcatctcttggaagaaaatgctgagatcaatgaattattctgtgtgcctatattgacgtagtgagtactagagagttctgtattttattattgactataataattagtttaattagctttgcaaactgatggcatcaaggtaaatatatttttgccaaagttctggccttccaaaactcacccccttatttaaatgtgtgctatgacccactatgaccacagcatctgcattttctaaaaaattccatgcaggtgttttggggagaggtattttttaagcaatgaaaattcaactgagtacaaagccccctcttggggggttggggaagtctcttttttgaaacacttcagaactgctgctataaagaaattctctaattggttgaatttttttttaagtaaatagtactttaggccaaaatttatatgaatatttgatcttcttgagattttcatactatcatttaaccaccaggaagctgaagtgtgtgaagtacaaagctgacagcactttattttattgctctccattatttggtattcattatattccttcagtcagaaaattattactctctatggcactgttttttatcacaaatatgtatatgtgatattgatatataactatatatattgccatcacacacgaacaataaaataaagtgttctattaacctgatctctttgcccttttgctatgtgaggagtgaatgagtggccttctgatgctctgactcttctctgtatgtcaaactcatccctggcacaagaaattccagtcatgtgaagcaaactgccctttgtcctcaaagaaattgttgaaaaagaaaactttttaaagagattttttgcatattctctgccttgttcttatcaacttgaaatgttggcattttctaaccttgttttgttggctacaataattcagtattcatgtcaaaattgagaagtgccctaattgaatgtgtttgaatgttatccttgcacaattctttaaattgaaagataaaatgttttacctcactgttggacatacattccaagcttttcaactctaggagaaaaagaaaatcatgttttcctgtattgtaaattttagactatttcatatacattgtattaaaactgccatatcaattttaatgtatagattttgcaaatattatgctatatgtaatacctaactgtatctgtagtgtatatgtaatatatttatgcccaataaatgttttaattctttctgacttaaaaaaaaaaat

SEQ ID NO: 314460 - DNA, 4005 bp, Homo sapiens
aggtgatctagaggatccctggcgcgtctgaactgggaagagccgtgcaataacggatctgaaatccttgcttacaccattgatctaggagacactagcattaccgtgggcaacaccaccatgcatgttatgaaagatctccttccagaaaccacctaccggtttatttcaatctacagaggacccagccacacctacaaggtccagagactgacggaattcacatgctactccttcagaatccaggcagcaagcgaggctggagaagggcccttctcagaaacctataccttcagcacaaccaaaagtgtcccccccaccatcaaagcacctcgagtaacacagttagaaggaaattcatgtgaaattttatgggagacggtaccatcaatgaaaggtgaccctgttaactacattctgcaggtattggttggaagagaatctgagtacaaacaggtgtacaagggagaagaagccacattccaaatctcaggcctccagaccaacacagactacaggttccgcgtatgtgcgtgtcgtcgctgtttagacacctctcaggagctaagcggagccttcagcccctctgcggcttttgtattacaacgaagtgaggtcatgcttacaggggacatggggagcttagatgatcccaaaatgaagagcatgatgcctactgatgaacagtttgcagccatcattgtgcttggctttgcaactttgtccattttatttgcctttatattacagtacttcttaatgaagtaaacccaacaaaactagaggtatgaattaatgctacacattttaatacacacatttattcagatactcccctttttaaagcccttttgttttttgatttatatactctgttttacagatttagctagaaaaaaaatgtcagtgttttggtgcacctttttgaaatgcaaaactaggaaaaggttaaactggattttttttttaaaaaaaaagaaaaaaaaagaagaaaagtataccagataccaaaagctagctttcttatgttttcctttaaattttcagatttaccttcattctgttttcactgatgtcttttgcaagcctttgatttttttttttttgttacagtttagtaatttatattcaccagtcacttcttatgtcttgaacatctgtatctgtaaacatgaatcaccgtgtgtgtacttacagggctaggatttcagtgttgtcagagtattaccacacagcaacagcaacatacagaagatatgttcactcagataagactgccctaaacaaccattttgtcactcagttatttaactgtgtttagctcatttaaatcaaaatgtgtactttaatctaaaatgttttaataatctgtatttcttataattttaacactatgagctgcctatataagaaatcaagtaaccagaatgcacctataaattatggagcattgtaggattttaccacatcaattcatagcagtaactttaagagggcattgtgcaatagttagttgttttcttgttcagctattttaaaggctgctttaacttgtttgtttgtctttgtatataactacttctaatctaatcactagagttattatattctgttatgtttgaccagaattatatgacaagaactggtgacagtttagtgcctctgcccattgtccatgatttacactaattgtgagcagtcttcttatgtgtcagctcattatttttgaaacatttgcctttaggctgttctttgaggtatcaatgaagtgattgaatttcaataccttaattcagtgcacataatactaatgtaacagcagatgaaaattgataaaacccaaaagagagtcatctaaatttgtagttcctatttctgtgggtttgcctggccatggttggagagggaatggtgtttgatggtaaacacagggtgtttggggatcaaggagcctagattctctccctggatctgtcactaacttgctgcgtgacctgaacacgtcactttacctctctgtgcctcagttttcccatgcatgaaaaataaaataaaataaaacggggattctaatgtttgtaagtgctttgagatctttgaccaacaggtgctattggagtgcaaagtgttactcttacgtgtttattttgagtcatgagataatcaattttaacccaaagtcattggattatttatatgaagtccataatgttcgagtacctcagggacatttaagagttggaggtgcaaatatattccaaaagggtgcaacagacacagtgtatccccctgcttctgtttttgtatatttttgctacttggtttttcttgatcatagctattttgtgcttgatctttattgtctaagatgcagtatcctgtactagcttataatattcccataccaaagtcatggggaaacaaacattattttgtttttggtttatttatactatattctgcatacagtactttaaatgccaattacagtgcaatctttatttattgtaaaattttttaagtgtacttatgtactaattttcccttgtagcatgttatatttttgtgttttatacttttgtaattttaggtcagtcttgttccttggcaacatctgtagtattattaatcttctgacattttcttatgtttttaaaaagataagagcatctagtgcattaaatgccaaaaaaaaaatacattatcagtgattgaaacgtttacatgtacccaaaaaccataatcatctcttggaagaaaatgctgagatcaatgaattattctgtgtgcctatattgacgtagtgagtactagagagttctgtattttattattgactataataattagtttaattagctttgcaaactgatggcatcaaggtaaatatatttttgccaaagttctggccttccaaaactcacccccttatttaaatgtgtgctatgacccactatgaccacagcatctgcattttctaaaaaattccatgcaggtgttttggggagaggtattttttaagcaatgaaaattcaactgagtacaaagccccctcttggggggttggggaagtctcttttttgaaacacttcagaactgctgctataaagaaattctctaattggttgaatttttttttaagtaaatagtactttaggccaaaatttatatgaatatttgatcttcttgagattttcatactatcatttaaccaccaggaagctgaagtgtgtgaagtacaaagctgacagcactttattttattgctctccattatttggtattcattatattccttcagtcagaaaattattactctctatggcactgttttttatcacaaatatgtatatgtgatattgatatataactatatatattgccatcacacacgaacaataaaataaagtgttctattaacctgatctctttgcccttttgctatgtgaggagtgaatgagtggccttctgatgctctgactcttctctgtatgtcaaactcatccctggcacaagaaattccagtcatgtgaagcaaactgccctttgtcctcaaagaaattgttgaaaaagaaaactttttaaagagattttttgcatattctctgccttgttcttatcaacttgaaatgttggcattttctaaccttgttttgttggctacaataattcagtattcatgtcaaaattgagaagtgccctaattgaatgtgtttgaatgttatccttgcacaattctttaaattgaaagataaaatgttttacctcactgttggacatacattccaagcttttcaactctaggagaaaaagaaaatcatgttttcctgtattgtaaattttagactatttcatatacattgtattaaaactgccatatcaattttaatgtatagattttgcaaatattatgctatatgtaatacctaactgtatctgtagtgtatatgtaatatatttatgcccaataaatgttttaattctttctgacttaaaaaaaaaaat

SEQ ID NO: 314461 - DNA, 3283 bp, Homo sapiens
aaagctggaagctcagcgcgccttgcaggtcgaacaactagtggatccaaagcaaaactagaggtatgaattaatgctacacattttaatacacacatttattcagatactcccctttttaaagcccttttgttttttgatttatatactctgttttacagatttagctagaaaaaaaatgtcagtgttttggtgcacctttttgaaatgcaaaactaggaaaaggttaaactggattttttttttaaaaaaaaagaaaaaaaaagaagaaaagtataccagataccaaaagctagctttcttatgttttcctttaaattttcagatttaccttcattctgttttcactgatgtcttttgcaagcctttgatttttttttttttgttacagtttagtaatttatattcaccagtcacttcttatgtcttgaacatctgtatctgtaaacatgaatcaccgtgtgtgtacttacagggctaggatttcagtgttgtcagagtattaccacacagcaacagcaacatacagaagatatgttcactcagataagactgccctaaacaaccattttgtcactcagttatttaactgtgtttagctcatttaaatcaaaatgtgtactttaatctaaaatgttttaataatctgtatttcttataattttaacactatgagctgcctatataagaaatcaagtaaccagaatgcacctataaattatggagcattgtaggattttaccacatcaattcatagcagtaactttaagagggcattgtgcaatagttagttgttttcttgttcagctattttaaaggctgctttaacttgtttgtttgtctttgtatataactacttctaatctaatcactagagttattatattctgttatgtttgaccagaattatatgacaagaactggtgacagtttagtgcctctgcccattgtccatgatttacactaattgtgagcagtcttcttatgtgtcagctcattatttttgaaacatttgcctttaggctgttctttgaggtatcaatgaagtgattgaatttcaataccttaattcagtgcacataatactaatgtaacagcagatgaaaattgataaaacccaaaagagagtcatctaaatttgtagttcctatttctgtgggtttgcctggccatggttggagagggaatggtgtttgatggtaaacacagggtgtttggggatcaaggagcctagattctctccctggatctgtcactaacttgctgcgtgacctgaacacgtcactttacctctctgtgcctcagttttcccatgcatgaaaaataaaataaaataaaacggggattctaatgtttgtaagtgctttgagatctttgaccaacaggtgctattggagtgcaaagtgttactcttacgtgtttattttgagtcatgagataatcaattttaacccaaagtcattggattatttatatgaagtccataatgttcgagtacctcagggacatttaagagttggaggtgcaaatatattccaaaagggtgcaacagacacagtgtatccccctgcttctgtttttgtatatttttgctacttggtttttcttgatcatagctattttgtgcttgatctttattgtctaagatgcagtatcctgtactagcttataatattcccataccaaagtcatggggaaacaaacattattttgtttttggtttatttatactatattctgcatacagtactttaaatgccaattacagtgcaatctttatttattgtaaaattttttaagtgtacttatgtactaattttcccttgtagcatgttatatttttgtgttttatacttttgtaattttaggtcagtcttgttccttggcaacatctgtagtattattaatcttctgacattttcttatgtttttaaaaagataagagcatctagtgcattaaatgccaaaaaaaaaatacattatcagtgattgaaacgtttacatgtacccaaaaaccataatcatctcttggaagaaaatgctgagatcaatgaattattctgtgtgcctatattgacgtagtgagtactagagagttctgtattttattattgactataataattagtttaattagctttgcaaactgatggcatcaaggtaaatatatttttgccaaagttctggccttccaaaactcacccccttatttaaatgtgtgctatgacccactatgaccacagcatctgcattttctaaaaaattccatgcaggtgttttggggagaggtattttttaagcaatgaaaattcaactgagtacaaagccccctcttggggggttggggaagtctcttttttgaaacacttcagaactgctgctataaagaaattctctaattggttgaatttttttttaagtaaatagtactttaggccaaaatttatatgaatatttgatcttcttgagattttcatactatcatttaaccaccaggaagctgaagtgtgtgaagtacaaagctgacagcactttattttattgctctccattatttggtattcattatattccttcagtcagaaaattattactctctatggcactgttttttatcacaaatatgtatatgtgatattgatatataactatatatattgccatcacacacgaacaataaaataaagtgttctattaacctgatctctttgcccttttgctatgtgaggagtgaatgagtggccttctgatgctctgactcttctctgtatgtcaaactcatccctggcacaagaaattccagtcatgtgaagcaaactgccctttgtcctcaaagaaattgttgaaaaagaaaactttttaaagagattttttgcatattctctgccttgttcttatcaacttgaaatgttggcattttctaaccttgttttgttggctacaataattcagtattcatgtcaaaattgagaagtgccctaattgaatgtgtttgaatgttatccttgcacaattctttaaattgaaagataaaatgttttacctcactgttggacatacattccaagcttttcaactctaggagaaaaagaaaatcatgttttcctgtattgtaaattttagactatttcatatacattgtattaaaactgccatatcaattttaatgtatagattttgcaaatattatgctatatgtaatacctaactgtatctgtagtgtatatgtaatatatttatgcccaataaatgttttaattctttctgacttaaaaaaaaaaat

SEQ ID NO: 314462 - DNA, 2616 bp, Homo sapiens
tcggtaccccttttggggtctttgctcaagtaaccagaatgcacctataaattatggagcattgtaggattttaccacatcaattcatagcagtaactttaagagggcattgtgcaatagttagttgttttcttgttcagctattttaaaggctgctttaacttgtttgtttgtctttgtatataactacttctaatctaatcactagagttattatattctgttatgtttgaccagaattatatgacaagaactggtgacagtttagtgcctctgcccattgtccatgatttacactaattgtgagcagtcttcttatgtgtcagctcattatttttgaaacatttgcctttaggctgttctttgaggtatcaatgaagtgattgaatttcaataccttaattcagtgcacataatactaatgtaacagcagatgaaaattgataaaacccaaaagagagtcatctaaatttgtagttcctatttctgtgggtttgcctggccatggttggagagggaatggtgtttgatggtaaacacagggtgtttggggatcaaggagcctagattctctccctggatctgtcactaacttgctgcgtgacctgaacacgtcactttacctctctgtgcctcagttttcccatgcatgaaaaataaaataaaataaaacggggattctaatgtttgtaagtgctttgagatctttgaccaacaggtgctattggagtgcaaagtgttactcttacgtgtttattttgagtcatgagataatcaattttaacccaaagtcattggattatttatatgaagtccataatgttcgagtacctcagggacatttaagagttggaggtgcaaatatattccaaaagggtgcaacagacacagtgtatccccctgcttctgtttttgtatatttttgctacttggtttttcttgatcatagctattttgtgcttgatctttattgtctaagatgcagtatcctgtactagcttataatattcccataccaaagtcatggggaaacaaacattattttgtttttggtttatttatactatattctgcatacagtactttaaatgccaattacagtgcaatctttatttattgtaaaattttttaagtgtacttatgtactaattttcccttgtagcatgttatatttttgtgttttatacttttgtaattttaggtcagtcttgttccttggcaacatctgtagtattattaatcttctgacattttcttatgtttttaaaaagataagagcatctagtgcattaaatgccaaaaaaaaaatacattatcagtgattgaaacgtttacatgtacccaaaaaccataatcatctcttggaagaaaatgctgagatcaatgaattattctgtgtgcctatattgacgtagtgagtactagagagttctgtattttattattgactataataattagtttaattagctttgcaaactgatggcatcaaggtaaatatatttttgccaaagttctggccttccaaaactcacccccttatttaaatgtgtgctatgacccactatgaccacagcatctgcattttctaaaaaattccatgcaggtgttttggggagaggtattttttaagcaatgaaaattcaactgagtacaaagccccctcttggggggttggggaagtctcttttttgaaacacttcagaactgctgctataaagaaattctctaattggttgaatttttttttaagtaaatagtactttaggccaaaatttatatgaatatttgatcttcttgagattttcatactatcatttaaccaccaggaagctgaagtgtgtgaagtacaaagctgacagcactttattttattgctctccattatttggtattcattatattccttcagtcagaaaattattactctctatggcactgttttttatcacaaatatgtatatgtgatattgatatataactatatatattgccatcacacacgaacaataaaataaagtgttctattaacctgatctctttgcccttttgctatgtgaggagtgaatgagtggccttctgatgctctgactcttctctgtatgtcaaactcatccctggcacaagaaattccagtcatgtgaagcaaactgccctttgtcctcaaagaaattgttgaaaaagaaaactttttaaagagattttttgcatattctctgccttgttcttatcaacttgaaatgttggcattttctaaccttgttttgttggctacaataattcagtattcatgtcaaaattgagaagtgccctaattgaatgtgtttgaatgttatccttgcacaattctttaaattgaaagataaaatgttttacctcactgttggacatacattccaagcttttcaactctaggagaaaaagaaaatcatgttttcctgtattgtaaattttagactatttcatatacattgtattaaaactgccatatcaattttaatgtatagattttgcaaatattatgctatatgtaatacctaactgtatctgtagtgtatatgtaatatatttatgcccaataaatgttttaattctttctgacttaaaaaaaaaaat

SEQ ID NO: 314463 - DNA, 1180 bp, Homo sapiens
tctgaagcgaatcagtgggaagtggcctacagtgggtcggctaccgaatacaccttcacccacttgaaaccaggcactttgtacaaactccgagcatgctgcatcagtaccggcggacacagccagtgttctgaaagtctccctgttcgcacactaagcattgcaccaggtcaatgtcgaccaccgagggttttgggtagaccaaagcacaaagaagtccacttagagtgggatgttcctgcatcggaaagtggctgtgaggtctcagagtacagcgtggagatgacggagcccgaagacgtagcctcggaagtgtaccatggcccagagctggagtgcaccgtcggcaacctgcttcctggaaccgtgtatcgcttccgggtgagggctctgaatgatggagggtatggtccctattctgatgtctcagaaattaccactgctgcagggcctcctggacaatgcaaagcaccttgtatttcttgtacacctgatggatgtgtcttagtgggttgggagagtcctgatagttctggtgctgacatctcagagtacaggttggaatggggagaagatgaagaatccttagaactcatttatcatgggacagacacccgttttgaaataagagacctgttgcctgctgcacagtattgctgtagactacaggccttcaatcaagcaggggcagggccgtacagtgaacttgtcctttgccagacgccagcgtctgcccctgaccccgtctccactctctgtgtcctggaggaggagccccttgatgcctaccctgattcaccttctgcgtgccttgtactgaactgggaagagccgtgcaataacggatctgaaatccttgcttacaccattgatctaggagacactagcattaccgtgggcaacaccaccatgcatgttatgaaagatctccttccagaaaccacctaccggatcagaattcaggctataaatgaaattggagctggaccatttagtcagttcattaaagcaaaaactcggccattaccacccttgcctcctaggctagaatgtgctgctgctggtcctcagagcctgaagctaaaatggggagacaagtgcatacaagatcaagaacatacacatcgtgtctgagtaaacagctagtgaccatggaacagctataccactgagtacgagt

SEQ ID NO: 314464 - DNA, 326 bp, Homo sapiens
cctataattttgggattattttatcaatgtaattaaataaacttcagtggacccgctttggagagtatggataacatcattcagaaacttttatttttatatctcttttttggtgggcatggattcttttgtaagggagatactgaggccggccacctatgtgatattttgctcaacttgtgtgaaatctggtgcactttggtcaactggaagcacaaagtgttctaagatgaaaaaaattcttcattcccagatgttcctgcatcggaaagtggctgtgaggtctcagagtacagcgtggagatgacggagcccgaagacgtagc

SEQ ID NO: 314465 - DNA, 4021 bp, Homo sapiens
cgcggccgtatctagaggatccgacgcaatatcgtcattaccacccttgcctcctaggctagaatgtgctgctgctggtcctcagagcctgaagctaaaatggggagacagtaactccaagacacatgctgctgaggacattgtgtacacactacagctggaggacagaaacaagaggtttatttcaatctacagaggacccagccacacctacaaggtccagagactgacggaattcacatgctactccttcagaatccaggcagcaagcgaggctggagaagggcccttctcagaaacctataccttcagcacaaccaaaagtgtcccccccaccatcaaagcacctcgagtaacacagttagaaggaaattcatgtgaaattttatgggagacggtaccatcaatgaaaggtgaccctgttaactacattctgcaggtattggttggaagagaatctgagtacaaacaggtgtacaagggagaagaagccacattccaaatctcaggcctccagaccaacacagactacaggttccgcgtatgtgcgtgtcgtcgctgtttagacacctctcaggagctaagcggagccttcagcccctctgcggcttttgtattacaacgaagtgaggtcatgcttacaggggacatggggagcttagatgatcccaaaatgaagagcatgatgcctactgatgaacagtttgcagccatcattgtgcttggctttgcaactttgtccattttatttgcctttatattacagtacttcttaatgaagtaaacccaacaaaactagaggtatgaattaatgctacacattttaatacacacatttattcagatactcccctttttaaagcccttttgttttttgatttatatactctgttttacagatttagctagaaaaaaaatgtcagtgttttggtgcacctttttgaaatgcaaaactaggaaaaggttaaactggattttttttttaaaaaaaaagaaaaaaaaagaagaaaagtataccagataccaaaagctagctttcttatgttttcctttaaattttcagatttaccttcattctgttttcactgatgtcttttgcaagcctttgatttttttttttttgttacagtttagtaatttatattcaccagtcacttcttatgtcttgaacatctgtatctgtaaacatgaatcaccgtgtgtgtacttacagggctaggatttcagtgttgtcagagtattaccacacagcaacagcaacatacagaagatatgttcactcagataagactgccctaaacaaccattttgtcactcagttatttaactgtgtttagctcatttaaatcaaaatgtgtactttaatctaaaatgttttaataatctgtatttcttataattttaacactatgagctgcctatataagaaatcaagtaaccagaatgcacctataaattatggagcattgtaggattttaccacatcaattcatagcagtaactttaagagggcattgtgcaatagttagttgttttcttgttcagctattttaaaggctgctttaacttgtttgtttgtctttgtatataactacttctaatctaatcactagagttattatattctgttatgtttgaccagaattatatgacaagaactggtgacagtttagtgcctctgcccattgtccatgatttacactaattgtgagcagtcttcttatgtgtcagctcattatttttgaaacatttgcctttaggctgttctttgaggtatcaatgaagtgattgaatttcaataccttaattcagtgcacataatactaatgtaacagcagatgaaaattgataaaacccaaaagagagtcatctaaatttgtagttcctatttctgtgggtttgcctggccatggttggagagggaatggtgtttgatggtaaacacagggtgtttggggatcaaggagcctagattctctccctggatctgtcactaacttgctgcgtgacctgaacacgtcactttacctctctgtgcctcagttttcccatgcatgaaaaataaaataaaataaaacggggattctaatgtttgtaagtgctttgagatctttgaccaacaggtgctattggagtgcaaagtgttactcttacgtgtttattttgagtcatgagataatcaattttaacccaaagtcattggattatttatatgaagtccataatgttcgagtacctcagggacatttaagagttggaggtgcaaatatattccaaaagggtgcaacagacacagtgtatccccctgcttctgtttttgtatatttttgctacttggtttttcttgatcatagctattttgtgcttgatctttattgtctaagatgcagtatcctgtactagcttataatattcccataccaaagtcatggggaaacaaacattattttgtttttggtttatttatactatattctgcatacagtactttaaatgccaattacagtgcaatctttatttattgtaaaattttttaagtgtacttatgtactaattttcccttgtagcatgttatatttttgtgttttatacttttgtaattttaggtcagtcttgttccttggcaacatctgtagtattattaatcttctgacattttcttatgtttttaaaaagataagagcatctagtgcattaaatgccaaaaaaaaaatacattatcagtgattgaaacgtttacatgtacccaaaaaccataatcatctcttggaagaaaatgctgagatcaatgaattattctgtgtgcctatattgacgtagtgagtactagagagttctgtattttattattgactataataattagtttaattagctttgcaaactgatggcatcaaggtaaatatatttttgccaaagttctggccttccaaaactcacccccttatttaaatgtgtgctatgacccactatgaccacagcatctgcattttctaaaaaattccatgcaggtgttttggggagaggtattttttaagcaatgaaaattcaactgagtacaaagccccctcttggggggttggggaagtctcttttttgaaacacttcagaactgctgctataaagaaattctctaattggttgaatttttttttaagtaaatagtactttaggccaaaatttatatgaatatttgatcttcttgagattttcatactatcatttaaccaccaggaagctgaagtgtgtgaagtacaaagctgacagcactttattttattgctctccattatttggtattcattatattccttcagtcagaaaattattactctctatggcactgttttttatcacaaatatgtatatgtgatattgatatataactatatatattgccatcacacacgaacaataaaataaagtgttctattaacctgatctctttgcccttttgctatgtgaggagtgaatgagtggccttctgatgctctgactcttctctgtatgtcaaactcatccctggcacaagaaattccagtcatgtgaagcaaactgccctttgtcctcaaagaaattgttgaaaaagaaaactttttaaagagattttttgcatattctctgccttgttcttatcaacttgaaatgttggcattttctaaccttgttttgttggctacaataattcagtattcatgtcaaaattgagaagtgccctaattgaatgtgtttgaatgttatccttgcacaattctttaaattgaaagataaaatgttttacctcactgttggacatacattccaagcttttcaactctaggagaaaaagaaaatcatgttttcctgtattgtaaattttagactatttcatatacattgtattaaaactgccatatcaattttaatgtatagattttgcaaatattatgctatatgtaatacctaactgtatctgtagtgtatatgtaatatatttatgcccaataaatgttttaattctttctgacttaaaaaaaaaaat

SEQ ID NO: 314466 - DNA, 3079 bp, Homo sapiens
tctgaagcgaatcagtgggaagtggcctacagtgggtcggctaccgaatacaccttcacccacttgaaaccaggcactttgtacaaactccgagcatgctgcatcagtaccggcggacacagccagtgttctgaaagtctccctgttcgcacactaagcattgcaccaggtcaatgtcgaccaccgagggttttgggtagaccaaagcacaaagaagtccacttagagtgggatgttcctgcatcggaaagtggctgtgaggtctcagagtacagcgtggagatgacggagcccgaagacgtagcctcggaagtgtaccatggcccagagctggagtgcaccgtcggcaacctgcttcctggaaccgtgtatcgcttccgggtgagggctctgaatgatggagggtatggtccctattctgatgtctcagaaattaccactgctgcagggcctcctggacaatgcaaagcaccttgtatttcttgtacacctgatggatgtgtcttagtgggttgggagagtcctgatagttctggtgctgacatctcagagtacaggttggaatggggagaagatgaagaatccttagaactcatttatcatgggacagacacccgttttgaaataagagacctgttgcctgctgcacagtattgctgtagactacaggccttcaatcaagcaggggcagggccgtacagtgaacttgtcctttgccagacgccagcgtctgcccctgaccccgtctccactctctgtgtcctggaggaggagccccttgatgcctaccctgattcaccttctgcgtgccttgtactgaactgggaagagccgtgcaataacggatctgaaatccttgcttacaccattgatctaggagacactagcattaccgtgggcaacaccaccatgcatgttatgaaagatctccttccagaaaccacctaccggatcagaattcaggctataaatgaaattggagctggaccatttagtcagttcattaaagcaaaaactcggccattaccacccttgcctcctaggctagaatgtgctgctgctggtcctcagagcctgaagctaaaatggggagacagtaactccaagacacatgctgctgaggacattgtgtacacactacagctggaggacagaaacaagaggtttatttcaatctacagaggacccagccacacctacaaggtccagagactgacggaattcacatgctactccttcagaatccaggcagcaagcgaggctggagaagggcccttctcagaaacctataccttcagcacaaccaaaagtgtcccccccaccatcaaagcacctcgagtaacacagttagaaggaaattcatgtgaaattttatgggagacggtaccatcaatgaaaggtgaccctgttaactacattctgcaggtattggttggaagagaatctgagtacaaacaggtgtacaagggagaagaagccacattccaaatctcaggcctccagaccaacacagactacaggttccgcgtatgtgcgtgtcgtcgctgtttagacacctctcaggagctaagcggagccttcagcccctctgcggcttttgtattacaacgaagtgaggtcatgcttacaggggacatggggagcttagatgatcccaaaatgaagagcatgatgcctactgatgaacagtttgcagccatcattgtgcttggctttgcaactttgtccattttatttgcctttatattacagtacttcttaatgaagtaaacccaacaaaactagaggtatgaattaatgctacacattttaatacacacatttattcagatactcccctttttaaagcccttttgttttttgatttatatactctgttttacagatttagctagaaaaaaaatgtcagtgttttggtgcacctttttgaaatgcaaaactaggaaaaggttaaactggattttttttttaaaaaaaaagaaaaaaaaagaagaaaagtataccagataccaaaagctagctttcttatgttttcctttaaattttcagatttaccttcattctgttttcactgatgtcttttgcaagcctttgatttttttttttttgttacagtttagtaatttatattcaccagtcacttcttatgtcttgaacatctgtatctgtaaacatgaatcaccgtgtgtgtacttacagggctaggatttcagtgttgtcagagtattaccacacagcaacagcaacatacagaagatatgttcactcagataagactgccctaaacaaccattttgtcactcagttatttaactgtgtttagctcatttaaatcaaaatgtgtactttaatctaaaatgttttaataatctgtatttcttataattttaacactatgagctgcctatataagaaatcaagtaaccagaatgcacctataaattatggagcattgtaggattttaccacatcaattcatagcagtaactttaagagggcattgtgcaatagttagttgttttcttgttcagctattttaaaggctgctttaacttgtttgtttgtctttgtatataactacttctaatctaatcactagagttattatattctgttatgtttgaccagaattatatgacaagaactggtgacagtttagtgcctctgcccattgtccatgatttacactaattgtgagcagtcttcttatgtgtcagctcattatttttgaaacatttgcctttaggctgttctttgaggtatcaatgaagtgattgaatttcaataccttaattcagtgcacataatactaatgtaacagcagatgaaaattgataaaacccaaaagagagtcatctaaatttgtagttcctatttctgtgggtttgcctggccatggttggagagggaatggtgtttgatggtaaacacagggtgtttggggatcaaggagcctagattctctccctggatctgtcactaacttgctgcgtgacctgaacacgtcactttacctctctgtgcctcagttttcccatgcatgaaaaataaaataaaataaaacggggattctaatgtt

SEQ ID NO: 314467 - DNA, 1288 bp, Homo sapiens
ggagccaccagcagaacctcttcaatatcttgcatgttacagatttcactgctcccaccagcttggagacaacatgtggttcttgacaactctgctcctttgggggtgggcaagtggacaccacaaaggcagtgatcactttgcagcctccatgggtcagcgtgttccaagaggaaaccgtaaccttgcactgtgaggtgctccatctgcctgggagcagctctacacagtggtttctcaatggcacagccactcagacctcgacccccagctacagaatcacctctgccagtgtcaatgacagtggtgaatacaggtgccagagaggtctctcagggcgaagtgaccccatacagctggaaatccacagaggctggctactactgcaggtctccagcagagtcttcacggaaggagaacctctggccttgaggtgtcatgcgtggaaggataagctggtgtacaatgtgctttactatcgaaatggcaaagcctttaagtttttccactggaattctaacctcaccattctgaaaaccaacataagtcacaatggcacctaccattgctcaggcatgggaaagcatcgctacacatcagcaggaatatctgtcactgtgaaagagctatttccagctccagtgctgaatgcatctgtgacatccccactcctggaggggaatctggtcaccctgagctgtgaaacaaagttgctcttgcagaggcctggtttgcagctttacttctccttctacatgggcagcaagaccctgcgaggcaggaacacatcctctgaataccaaatactaactgctagaagagaagactctgggttatactggtgcgaggctgccacagaggatggaaatgtccttaagcgcagccctgagttggagcttcaagtgcttggcctccagttaccaactcctgtctggtttcatgtccttttctatctggcagtgggaataatgtttttagtgaacactgttctctgggtgacaatacgtaaagaactgaaaagaaagaaaaagtgggatttagaaatctctttggattctggaggccaagcacttgaagctccaactcagggctgcgcttaaggacatttacatcctctgaataccaaatactaactgctagaagagaagactctgggttatactggtgcgaggctgccacagagtcttctcttctagcagttagtatttggtacttcagaggatgtgttcctgcctcgcagggtcttgcagctttacttctccttctacatgggcagcaagctttagag

SEQ ID NO: 314468 - DNA, 888 bp, Homo sapiens
ggagccaccagcagaacctcttcaatatcttgcatgttacagatttcactgctcccaccagcttggagacaacatgtggttcttgacaactctgctcctttgggggttccagttgatgggcaagtgggtgagtgatctctaactcagcttctccttctatgccactttcctacttccaaaggatgggtcctattaacctgcagaagagcatatagggaaagcagagaaagaagaaagatttataaattatgtaaaatctcccatattcagagcatgattttcataaaaactatgatttgtaagctttctttctaaagttttctgaatgagctctttcctctgagcgaaatgcctgaatgtatatataacagcaggaaagggccagaattgcacaaacactaaagtagtctgctgacactgaagtagtctgctgggtttcccaacatcccctaaaccagtcccctttacaagaaagcagagtgggttttttctcctcagaaagagccaggcaaatactgaaggcttcaaagagaggagtttgaacctccgtttccaatgtacaagctgctgaagccctgcaatgtactctcagagacagtatagctcagaggataaggaaaacagctccgcttggcttgcccaagtctaaaaccctgcttcattgctcccaacagaaaaacctacatcagtaatttaatcctcaggagccccagattcccaacacccagatgaggatttaataacaatgaacagaggtctctgcagcaggaggacactcttaaaggctggcttttgtaggtttccacttgcctatttttcaaataaatctaaatatgtatttttcccttgtgctatccacaaaagcctcaccagttgctcagagccctc

SEQ ID NO: 314469 - DNA, 1422 bp, Homo sapiens
ggagccaccagcagaacctcttcaatatcttgcatgttacagatttcactgctcccaccagcttggagacaacatgtggttcttgacaactctgctcctttgggggtgggcaagtggacaccacaaaggcagtgatcactttgcagcctccatgggtcagcgtgttccaagaggaaaccgtaaccttgcactgtgaggtgctccatctgcctgggagcagctctacacagtggtttctcaatggcacagccactcagacctcgacccccagctacagaatcacctctgccagtgtcaatgacagtggtgaatacaggtgccagagaggtctctcagggcgaagtgaccccatacagctggaaatccacagaggctggctactactgcaggtctccagcagagtcttcacggaaggagaacctctggccttgaggtgtcatgcgtggaaggataagctggtgtacaatgtgctttactatcgaaatggcaaagcctttaagtttttccactggaattctaacctcaccattctgaaaaccaacataagtcacaatggcacctaccattgctcaggcatgggaaagcatcgctacacatcagcaggaatatctgtcactgtgaaagagctatttccagctccagtgctgaatgcatctgtgacatccccactcctggaggggaatctggtcaccctgagctgtgaaacaaagttgctcttgcagaggcctggtttgcagctttacttctccttctacatgggcagcaagaccctgcgaggcaggaacacatcctctgaataccaaatactaactgctagaagagaagactctgggttatactggtgcgaggctgccacagaggatggaaatgtccttaagcgcagccctgagttggagcttcaagtgcttggcctccagttaccaactcctgtctggtttcatgtccttttctatctggcagtgggaataatgtttttagtgaacactgttctctgggtgacaatacgtaaagaactgaaaagaaagaaaaagtgggatttagaaatctctttggattctggtcatgagaagaaggtaatttccagccttcaagaagacagacatttagaagaagagctgaaatgtcaggaacaaaaagaagaacagctgcaggaaggggtgcaccggaaggagccccagggggccacgtagcagcggctcagtgggtggccatcgatctggaccgtcccctgcccacttgctccccgtgagcactgcgtacaaacatccaaaagttcaacaacaccagaactgtgtgtctcatggtatgtaactcttaaagcaaataaatgaactgacttcaactgggatacatttggaaatgtggtcatcaaagatgacttgaaatgaggcctactctaaagaattcttgaaaaacttaaaa

SEQ ID NO: 314470 - DNA, 322 bp, Homo sapiens
aacctcaccattctgaaaaccaacataagtcacaatggcacctaccattgctcaggcatgggaaagcatcgctacacatcagcaggaatatctgtcactgtgaaaggtattgtattggaatagtcatagaactgatagtccctccccctgagggaccatcataaatattctaaactcctcactttaatttacaagtgaagaaaccgggctccagagaggtaaactgcattactaaaggccacaccatgaccagtagctggaaccagaactgaggtctctgggtcctagtccaatactctttccagtgtaccgcaacccccat

SEQ ID NO: 314471 - DNA, 1348 bp, Homo sapiens
ggagccaccagcagaacctcttcaatatcttgcatgttacagatttcactgctcccaccagcttggagacaacatgtggttcttgacaactctgctcctttgggggtgggcaagtggacaccacaaaggcagtgatcactttgcagcctccatgggtcagcgtgttccaagaggaaaccgtaaccttgcactgtgaggtgctccatctgcctgggagcagctctacacagtggtttctcaatggcacagccactcagacctcgacccccagctacagaatcacctctgccagtgtcaatgacagtggtgaatacaggtgccagagaggtctctcagggcgaagtgaccccatacagctggaaatccacagaggctggctactactgcaggtctccagcagagtcttcacggaaggagaacctctggccttgaggtgtcatgcgtggaaggataagctggtgtacaatgtgctttactatcgaaatggcaaagcctttaagtttttccactggaattctaacctcaccattctgaaaaccaacataagtcacaatggcacctaccattgctcaggcatgggaaagcatcgctacacatcagcaggaatatctgtcactgtgaaagagctatttccagctccagtgctgaatgcatctgtgacatccccactcctggaggggaatctggtcaccctgagctgtgaaacaaagttgctcttgcagaggcctggtttgcagctttacttctccttctacatgggcagcaagaccctgcgaggcaggaacacatcctctgaataccaaatactaactgctagaagagaagactctgggttatactggtgcgaggctgccacagaggatggaaatgtccttaagcgcagccctgagttggagcttcaagtgcttggcctccagttaccaactcctgtctggtttcatgtccttttctatctggcagtgggaataatgtttttagtgaacactgttctctgggtgacaatacgtaaagaactgaaaagaaagaaaaagtgggatttagaaatctctttggattctggtcatgagaagaaggtaatttccagccttcaagaagacagacatttagaagaagagctgaaatgtcaggaacaaaaagaagaacagctgcaggaaggggtgcaccggaaggagccccagggggccacgtagcagcggctcagtgggtggccatcgatctggaccgtcccctgcccacttgctccccgtgagcactgcgtacaaacatccaaaagttcaacaacaccagaactgtgtgtctcatggtatgtaactcttaaagcaaataaatgaactgacttcaactggga

SEQ ID NO: 314472 - DNA, 1082 bp, Homo sapiens
ggagccaccagcagaacctcttcaatatcttgcatgttacagatttcactgctcccaccagcttggagacaacatgtggttcttgacaactctgctcctttggggggctggctactactgcaggtctccagcagagtcttcacggaaggagaacctctggccttgaggtgtcatgcgtggaaggataagctggtgtacaatgtgctttactatcgaaatggcaaagcctttaagtttttccactggaattctaacctcaccattctgaaaaccaacataagtcacaatggcacctaccattgctcaggcatgggaaagcatcgctacacatcagcaggaatatctgtcactgtgaaagagctatttccagctccagtgctgaatgcatctgtgacatccccactcctggaggggaatctggtcaccctgagctgtgaaacaaagttgctcttgcagaggcctggtttgcagctttacttctccttctacatgggcagcaagaccctgcgaggcaggaacacatcctctgaataccaaatactaactgctagaagagaagactctgggttatactggtgcgaggctgccacagaggatggaaatgtccttaagcgcagccctgagttggagcttcaagtgcttggcctccagttaccaactcctgtctggtttcatgtccttttctatctggcagtgggaataatgtttttagtgaacactgttctctgggtgacaatacgtaaagaactgaaaagaaagaaaaagtgggatttagaaatctctttggattctggtcatgagaagaaggtaatttccagccttcaagaagacagacatttagaagaagagctgaaatgtcaggaacaaaaagaagaacagctgcaggaaggggtgcaccggaaggagccccagggggccacgtagcagcggctcagtgggtggccatcgatctggaccgtcccctgcccacttgctccccgtgagcactgcgtacaaacatccaaaagttcaacaacaccagaactgtgtgtctcatggtatgtaactcttaaagcaaataaatgaactgacttcaactggga

SEQ ID NO: 314473 - DNA, 440 bp, Homo sapiens
  misc_feature (5)..(5): n is a, c, g, or t
  misc_feature (64)..(64): n is a, c, g, or t
  misc_feature (144)..(144): n is a, c, g, or t
  misc_feature (151)..(151): n is a, c, g, or t
ttatncctcccgggccccgtatgtgtgggggaattgtgaaccgggataaccaatttccaccacngggaaacagcctatgacatgattccgaatttaaatacgacctcacctataggggaatttggcccctcgaggcccaagaantcgggcncgaggattggaatcattgtcttttaaaccagtggtttatgtcagggtatagcgtttcaagggatttgagggtcagatggggaaatgtagccccttattttgccagtgtgaagcagataccctgcttttctttacagtagcggagtcagcttaagagctttaaaggtcctaaacttcaaaaacattacagtgccccatcctccgccttaatgtaattcaaaatacaaacaatactaaactgtaaaataaatgtaacaaagtccaataaagtttttatttttttctcatga

SEQ ID NO: 314474 - DNA, 475 bp, Homo sapiens
  misc_feature (36)..(36): n is a, c, g, or t
  misc_feature (48)..(48): n is a, c, g, or t
  misc_feature (68)..(68): n is a, c, g, or t
  misc_feature (103)..(104): n is a, c, g, or t
ccccccccgcctaaccgtccggacccccctgtgggncccccccactgnccccctcaccccagtcgggnccctccagccgaacccctccgagtgcccccaaggnncccccacggaaccccacaaagggtcgtctccttcaccgaaaacccatataccttttaagtttgtttcaactaaaatattaagtgaatgctttgcaagtttgactgtatgcaggtttatatcagaaggtgagattgaataatgcttgatgcagaatcgaaacttctcatttatctgtatattatgtttacttctaaggatatagcacaaagggaacattttttgtttaaagtgaactacagctgtgctgtgaagagagttctttataaagcctgtaggttcttttaactttggtttaaaatgtaagataggaaaatgttggatatttgaggccatgcttaatatatttatattgcagtatcctttaaaagca

SEQ ID NO: 314475 - DNA, 419 bp, Homo sapiens
  misc_feature (33)..(33): n is a, c, g, or t
  misc_feature (35)..(35): n is a, c, g, or t
tcggagtactctagaggatcgccccgggagccntnacctacctcatgctctgcttggcttccttgtacatcatgatgaccctgaccagctggtacagccctgatgcaaagtttcagagcatgaccagcaagtggccagctgtgtgggtcaagatcagctccagctgggtctgcctcctgctttacgtctggacccttgtggctccacttgtcctcaccagtcgggacttcagctgaacctctgagtgccaaggacaccactggaactcacaaaggcacccaactcagtgatgtcctaattactgctggatgactcaagccacaccatgcctatgttctcaggtgaagaagaataatagaaaccacatagatgggtaggtgtaccaagcattaaacagacagtatccacaaaaaagtaag

SEQ ID NO: 314476 - DNA, 4682 bp, Homo sapiens
catccgtgcgtctgtggaaggctgcgtttccggcctgagaaaccgtcatgtttctggggagtcacctcagctggcagttaccaccgtgttagaaagcagcctcaggaccggccacctccatcactggcgtcaccatgggggctgtgctgggtgtcttctccctcgccagctgggttccatgcctctgcagcggtgcctcatgtttgctgtgtagttgctgtcctaacagtaagaattccacggtgactcgcctcatttatgctttcattctcctcctgagcactgtcgtatcctatatcatgcagagaaaagagatggaaacttacttgaagaagattcctggattttgtgaagggggatttaaaatccatgaggctgatataaatgcagataaagattgtgatgtgctggttggttataaagctgtgtatcggatcagctttgccatggccatctttttctttgtcttttctctgctcatgttcaaagtaaaaacaagtaaagatctccgagcggcagtacacaatgggttttggttcttcaaaattgctgcccttattggaatcatggttggctctttctacatccctgggggctatttcagctcagtctggtttgttgttggcatgataggggccgccctcttcatcctcattcagctggtgctgctggtagattttgctcattcttggaatgaatcatgggtaaatcgaatggaagaaggaaacccaaggttgtggtatgctgctttactgtctttcacaagcgccttttatatcctgtcaatcatctgtgtcgggctgctctatacatattacaccaaaccagatggctgcacagaaaacaagttcttcatcagtattaacctgatcctttgcgttgtggcttctattatatcgatccacccaaaaattcaggaacaccagcctcgctccggcctcttgcagtcctccctcatcaccctctacactatgtacctcacctggtcagccatgtccaatgaacctgatcgttcctgcaatcccaacctgatgagctttattacacgcataactgcaccaaccctggctcctggaaattcaactgctgtggtccctacccctactccaccatcaaagagtgggtctttactggattcagataattttattggactgtttgtctttgttctctgcctcttgtattctagcatccgcacttccactaatagccaagtagacaagctgaccctgtcagggagtgacagcgtcatccttggtgatacaactaccagtggtgccagtgatgaagaagatggacagcctcggcgggctgtggacaacgagaaagagggagtgcagtatagctactccttattccacctcatgctctgcttggcttccttgtacatcatgatgaccctgaccagctggtacagccctgatgcaaagtttcagagcatgaccagcaagtggccagctgtgtgggtcaagatcagctccagctgggtctgcctcctgctttacgtctggacccttgtggctccacttgtcctcaccagtcgggacttcagctgaacctctgagtgccaaggacaccactggaactcacaaaggtctccttcaccgaaaacccatataccttttaagtttgtttcaactaaaatattaagtgaatgctttgcaagtttgactgtatgcaggtttatatcagaaggtgagattgaataatgcttgatgcagaatcgaaacttctcatttatctgtatattatgtttacttctaaggatatagcacaaagggaacattttttgtttaaagtgaactacagctgtgctgtgaagagagttctttataaagcctgtaggttcttttaactttggtttaaaatgtaagataggaaaatgttggatatttgaggccatgcttaatatatttatattgcagtatcctttaaaagcaaaaaaaaaaaaatgcatttatattacagttttcctctatgaaagtccttacttatatgatacaagcactgtgttttgtgcttaaactcttcagcggggtagcatcaaagttcttggggaaggatcgtatatgtgggtcccttccctagaagaatggttgctgatatggctactgcttctacatcttgagttttttaatttactttttttacactgtagcattgagactgcttgattcaagtctggtgctttgccagatgtattaatttccataaatgctttgtgagtttggttaaaatgaagattcacttgggaaaacactgcagctttagtctgtgttactatcttgttatgagtatgtaaaagtaaaatgcatgtgaatttatcatatttgcactatgaaggtatttggttaaaatacaaagacttttaagattttaaggccctttcttccaacagcttttatagttagcagccattctttattttctggatagccaggttttatcacgcttctagtcaggatgctcctattccttctaaaaattacggtctgactagtgagcaaagtcttgaatttattcaaaagtcctaaataccttctctaggtaagacacttggtagatgagagacggaaggcattgtcaagaaccattttcatgagaggtggtgtgcaaaaaggtagaataaaagagttctttcaacaaagatttactgtctattctgtactagaccctgtaggttttggggtacagtgttaaacatgatagaggctctgccgtcttggactttaatagcttagagaagagagcaaatgagctgacaggtggttataatgtgaattagtgctgtggtttaggaattggagagaactcaaaggagaggtatttggtgtaatggtaggctttctggagaaaatgatatttaagccaagaactcttagaagttagctaagagagagatgggaaaatgagacgacattgctggagtagataaaactgcatgttaaaggcaggaagatggggaaaaaaagttcagtaaagctggaatggggaaatgtagtcagggactgaattttaaagggctttatcaacctcagtaaagagtttggaccttatgttgagggtggctgaaaacatattcatagtgtcatgaacaaattttatcttcagtcacttgggctgatatatagagaatggatttagagagatgagaccaggtgcagtccatatgagatgtgaaatagagaagtggaatcgtagggacggggagaaattgacaggtgagggctacttagcaattagaatttttttttttcaattttaatttttttttttgagacggagtcttgctctgtcgcccaggctggagtgcaatggtgcgatctccgctcactgcaggctccgcctcccgggttcacgccattctcccgcctcagcctccctagtagctgggactacaggcacccaccaccacgcctggctaattttttttgtatttttagtagagacagggtttcaccatgttagccaggatggtctcgatctcctgacctcgtgatccacctgccgcggcctcccaaagttctaggattactggcatgagccaccgtgcctggccagcaattagaattttaacactggcagttatgaataatatgaaggagaggtagatttctgagtgattctggtttaaccagctgggtggatggtggttccacgtattcaggtggcaaacaggaaaaacatgtgttcgaagaagaatggaggtaggtggtctcttaagaatggttaagaggcttgggagtcagactgcttgggtttgcatcccagctttgccgttttctggctatcaaacttgtcagctattatttgttgagtacgtactatttgatttatgaccacaggcagctgagcctcagtgttggtgcctagtgtacaagattgttaaagaataaagttattttgcaaagtgtaacccatttttagcactgacatagcactgacagtagctgctgatctcattatgggctaaaataagacaatattcaaaggtcagagatatctagccagaatctgatggaggctggatttcagattttgttacagaattagacagaggaacacagaggggacaggctcagttagggtggaggtgtggggtagggaagcaggacttgatataaattattggaatcattgtcttttaaaccagtggtttatgtcagggtatagcgtttcaagggatttgagggtcagatggggaaatgtagccccttattttgccagtgtgaagcagataccctgcttttctttacagtagcggagtcagcttaagagctttaaaggtcctaaacttcaaaaacattacagtgccccatcctccgccttaatgtaattcaaaatacaaacaatactaaactgtaaaataaatgtaacaaagtccaataaagtttttatttttttctcatgatgataactgatattaatttgaagtaacaaatgctctttaaaagtcgggaggcagtgtccctgctttgcttggtcctaccttaagaagtagtgaagtctgcctcttagtaggaaaaccagtagtctaatcaagactcaagtgaattatacatgtgaatgctgaattatatacaagcatgagtaagacagcattctgaataaggccaggatcatcatttaaagcaggggagtattttgagtcatcagatctcagggtggcctttcattccaga

SEQ ID NO: 314477 - DNA, 4440 bp, Homo sapiens
actaccatctcctctcttctttcagacttctccgtcttgttctctcgtttcttctcctcctaccctagaaaccgtcatgtttctggggagtcacctcagctggcagttaccaccgtgttagaaagcagcctcaggaccggccacctccatcactggcgtcaccatgggggctgtgctgggtgtcttctccctcgccagctgggttccatgcctctgcagcggtgcctcatgtttgctgtgtagttgctgtcctaacagtaagaattccacggtgactcgcctcatttatgctttcattctcctcctgagcactgtcgtatcctatatcatgcagagaaaagagatggaaacttacttgaagaagattcctggattttgtgaagggggatttaaaatccatgaggctgatataaatgcagataaagattgtgatgtgctggttggttataaagctgtgtatcggatcagctttgccatggccatctttttctttgtcttttctctgctcatgttcaaagtaaaaacaagtaaagatctccgagcggcagtacacaatgggttttggttcttcaaaattgctgcccttattggaatcatggttggctctttctacatccctgggggctatttcagctcagtctggtttgttgttggcatgataggggccgccctcttcatcctcattcagctggtgctgctggtagattttgctcattcttggaatgaatcatgggtaaatcgaatggaagaaggaaacccaaggttgtggtatgctgctttactgtctttcacaagcgccttttatatcctgtcaatcatctgtgtcgggctgctctatacatattacaccaaaccagatggctgcacagaaaacaagttcttcatcagtattaacctgatcctttgcgttgtggcttctattatatcgatccacccaaaaattcaggaacaccagcctcgctccggcctcttgcagtcctccctcatcaccctctacactatgtacctcacctggtcagccatgtccaatgaacctgatcgttcctgcaatcccaacctgatgagctttattacacgcataactgcaccaaccctggctcctggaaattcaactgctgtggtccctacccctactccaccatcaaagagtgggtctttactggattcagataattttattggactgtttgtctttgttctctgcctcttgtattctagcatccgcacttccactaatagccaagtagacaagctgaccctgtcagggagtgacagcgtcatccttggtgatacaactaccagtggtgccagtgatgaagaagatggacagcctcggcgggctgtggacaacgagaaagagggagtgcagtatagctactccttattccacctcatgctctgcttggcttccttgtacatcatgatgaccctgaccagctggtacagccctgatgcaaagtttcagagcatgaccagcaagtggccagctgtgtgggtcaagatcagctccagctgggtctgcctcctgctttacgtctggacccttgtggctccacttgtcctcaccagtcgggacttcagctgaacctctgagtgccaaggacaccactggaactcacaaaggtctccttcaccgaaaacccatataccttttaagtttgtttcaactaaaatattaagtgaatgctttgcaagtttgactgtatgcaggtttatatcagaaggtgagattgaataatgcttgatgcagaatcgaaacttctcatttatctgtatattatgtttacttctaaggatatagcacaaagggaacattttttgtttaaagtgaactacagctgtgctgtgaagagagttctttataaagcctgtaggttcttttaactttggtttaaaatgtaagataggaaaatgttggatatttgaggccatgcttaatatatttatattgcagtatcctttaaaagcaaaaaaaaaaaaatgcatttatattacagttttcctctatgaaagtccttacttatatgatacaagcactgtgttttgtgcttaaactcttcagcggggtagcatcaaagttcttggggaaggatcgtatatgtgggtcccttccctagaagaatggttgctgatatggctactgcttctacatcttgagttttttaatttactttttttacactgtagcattgagactgcttgattcaagtctggtgctttgccagatgtattaatttccataaatgctttgtgagtttggttaaaatgaagattcacttgggaaaacactgcagctttagtctgtgttactatcttgttatgagtatgtaaaagtaaaatgcatgtgaatttatcatatttgcactatgaaggtatttggttaaaatacaaagacttttaagattttaaggccctttcttccaacagcttttatagttagcagccattctttattttctggatagccaggttttatcacgcttctagtcaggatgctcctattccttctaaaaattacggtctgactagtgagcaaagtcttgaatttattcaaaagtcctaaataccttctctaggtaagacacttggtagatgagagacggaaggcattgtcaagaaccattttcatgagaggtggtgtgcaaaaaggtagaataaaagagttctttcaacaaagatttactgtctattctgtactagaccctgtaggttttggggtacagtgttaaacatgatagaggctctgccgtcttggactttaatagcttagagaagagagcaaatgagctgacaggtggttataatgtgaattagtgctgtggtttaggaattggagagaactcaaaggagaggtatttggtgtaatggtaggctttctggagaaaatgatatttaagccaagaactcttagaagttagctaagagagagatgggaaaatgagacgacattgctggagtagataaaactgcatgttaaaggcaggaagatggggaaaaaaagttcagtaaagctggaatggggaaatgtagtcagggactgaattttaaagggctttatcaacctcagtaaagagtttggaccttatgttgagggtggctgaaaacatattcatagtgtcatgaacaaattttatcttcagtcacttgggctgatatatagagaatggatttagagagatgagaccaggtgcagtccatatgagatgtgaaatagagaagtggaatcgtagggacggggagaaattgacaggtgagggctacttagcaattagaatttttttttttcaattttaatttttttttttgagacggagtcttgctctgtcgcccaggctggagtgcaatggtgcgatctccgctcactgcaggctccgcctcccgggttcacgccattctcccgcctcagcctccctagtagctgggactacaggcacccaccaccacgcctggctaattttttttgtatttttagtagagacagggtttcaccatgttagccaggatggtctcgatctcctgacctcgtgatccacctgccgcggcctcccaaagttctaggattactggcatgagccaccgtgcctggccagcaattagaattttaacactggcagttatgaataatatgaaggagaggtagatttctgagtgattctggtttaaccagctgggtggatggtggttccacgtattcaggtggcaaacaggaaaaacatgtgttcgaagaagaatggaggtaggtggtctcttaagaatggttaagaggcttgggagtcagactgcttgggtttgcatcccagctttgccgttttctggctatcaaacttgtcagctattatttgttgagtacgtactatttgatttatgaccacaggcagctgagcctcagtgttggtgcctagtgtacaagattgttaaagaataaagttattttgcaaagtgtaacccatttttagcactgacatagcactgacagtagctgctgatctcattatgggctaaaataagacaatattcaaaggtcagagatatctagccagaatctgatggaggctggatttcagattttgttacagaattagacagaggaacacagaggggacaggctcagttagggtggaggtgtggggtagggaagcaggacttgatataaattattggaatcattgtcttttaaaccagtggtttatgtcagggtatagcgtttcaagggatttgagggtcagatggggaaatgtagccccttattttgccagtgtgaagcagataccctgcttttctttacagtagcggagtcagcttaagagctttaaaggtcctaaacttcaaaaacattacagtgccccatcctccgccttaatgtaattcaaaatacaaacaatactaaactgtaaaataaatgtaacaaagtccaataaagtttttatttttttctcatga

SEQ ID NO: 314478 - DNA, 3747 bp, Homo sapiens
  misc_feature (3739)..(3739): n is a, c, g, or t
catccgtgcgtctgtggaaggctgcgtttccggcctgagaaaccgtcatgtttctggggagtcacctcagctggcagttaccaccgtgttagaaagcagcctcaggaccggccacctccatcactggcgtcaccatgggggctgtgctgggtgtcttctccctcgccagctgggttccatgcctctgcagcggtgcctcatgtttgctgtgtagttgctgtcctaacagtaagaattccacggtgactcgcctcatttatgctttcattctcctcctgagcactgtcgtatcctatatcatgcagagaaaagagatggaaacttacttgaagaagattcctggattttgtgaagggggatttaaaatccatgaggctgatataaatgcagataaagattgtgatgtgctggttggttataaagctgtgtatcggatcagctttgccatggccatctttttctttgtcttttctctgctcatgttcaaagtaaaaacaagtaaagatctccgagcggcagtacacaatgggttttggttcttcaaaattgctgcccttattggaatcatggttggctctttctacatccctgggggctatttcagctcagtctggtttgttgttggcatgataggggccgccctcttcatcctcattcagctggtgctgctggtagattttgctcattcttggaatgaatcatgggtaaatcgaatggaagaaggaaacccaaggttgtggtatgctgctttactgtctttcacaagcgccttttatatcctgtcaatcatctgtgtcgggctgctctatacatattacaccaaaccagatggctgcacagaaaacaagttcttcatcagtattaacctgatcctttgcgttgtggcttctattatatcgatccacccaaaaattcaggaacaccagcctcgctccggcctcttgcagtcctccctcatcaccctctacactatgtacctcacctggtcagccatgtccaatgaacctgatcgttcctgcaatcccaacctgatgagctttattacacgcataactgcaccaaccctggctcctggaaattcaactgctgtggtccctacccctactccaccatcaaagagtgggtctttactggattcagataattttattggactgtttgtctttgttctctgcctcttgtattctagcatccgcacttccactaatagccaagtagacaagctgaccctgtcagggagtgacagcgtcatccttggtgatacaactaccagtggtgccagtgatgaagaagatggacagcctcggcgggctgtggacaacgagaaagagggagtgcagtatagctactccttattccacctcatgctctgcttggcttccttgtacatcatgatgaccctgaccagctggtacagccctgatgcaaagtttcagagcatgaccagcaagtggccagctgtgtgggtcaagatcagctccagctgggtctgcctcctgctttacgtctggacccttgtggctccacttgtcctcaccagtcgggacttcagctgaacctctgagtgccaaggacaccactggaactcacaaaggtctccttcaccgaaaacccatataccttttaagtttgtttcaactaaaatattaagtgaatgctttgcaagtttgactgtatgcaggtttatatcagaaggtgagattgaataatgcttgatgcagaatcgaaacttctcatttatctgtatattatgtttacttctaaggatatagcacaaagggaacattttttgtttaaagtgaactacagctgtgctgtgaagagagttctttataaagcctgtaggttcttttaactttggtttaaaatgtaagataggaaaatgttggatatttgaggccatgcttaatatatttatattgcagtatcctttaaaagcaaaaaaaaaaaaatgcatttatattacagttttcctctatgaaagtccttacttatatgatacaagcactgtgttttgtgcttaaactcttcagcggggtagcatcaaagttcttggggaaggatcgtatatgtgggtcccttccctagaagaatggttgctgatatggctactgcttctacatcttgagttttttaatttactttttttacactgtagcattgagactgcttgattcaagtctggtgctttgccagatgtattaatttccataaatgctttgtgagtttggttaaaatgaagattcacttgggaaaacactgcagctttagtctgtgttactatcttgttatgagtatgtaaaagtaaaatgcatgtgaatttatcatatttgcactatgaaggtatttggttaaaatacaaagacttttaagattttaaggccctttcttccaacagcttttatagttagcagccattctttattttctggatagccaggttttatcacgcttctagtcaggatgctcctattccttctaaaaattacggtctgactagtgagcaaagtcttgaatttattcaaaagtcctaaataccttctctaggtaagacacttggtagatgagagacggaaggcattgtcaagaaccattttcatgagaggtggtgtgcaaaaaggtagaataaaagagttctttcaacaaagatttactgtctattctgtactagaccctgtaggttttggggtacagtgttaaacatgatagaggctctgccgtcttggactttaatagcttagagaagagagcaaatgagctgacaggtggttataatgtgaattagtgctgtggtttaggaattggagagaactcaaaggagaggtatttggtgtaatggtaggctttctggagaaaatgatatttaagccaagaactcttagaagttagctaagagagagatgggaaaatgagacgacattgctggagtagataaaactgcatgttaaaggcaggaagatggggaaaaaaagttcagtaaagctggaatggggaaatgtagtcagggactgaattttaaagggctttatcaacctcagtaaagagtttggaccttatgttgagggtggctgaaaacatattcatagtgtcatgaacaaattttatcttcagtcacttgggctgatatatagagaatggatttagagagatgagaccaggtgcagtccatatgagatgtgaaatagagaagtggaatcgtagggacggggagaaattgacaggtgagggctacttagcaattagaatttttttttttcaattttaatttttttttttgagacggagtcttgctctgtcgcccaggctggagtgcaatggtgcgatctccgctcactgcaggctccgcctcccgggttcacgccattctcccgcctcagcctccctagtagctgggactacaggcacccaccaccacgcctggctaattttttttgtatttttagtagagacagggtttcaccatgttagccaggatggtctcgatctcctgacctcgtgatccacctgccgcggcctcccaaagttctaggattactggcatggtgactcatgcctgtaatcccagcaatttgggagacagaggcggaaggatcacctgagcctaggagttcaagaccagcctgagcaacagcaggagccccaccccccgtgtctacaaacaaatttaaaaattaactgggcatggtggctgaagtgggagaatggaagaatcacttgagcccaagatttgaggctgcantgagctat

SEQ ID NO: 314479 - DNA, 2374 bp, Homo sapiens
catccgtgcgtctgtggaaggctgcgtttccggcctgagaaaccgtcatgtttctggggagtcacctcagctggcagttaccaccgtgttagaaagcagcctcaggaccggccacctccatcactggcgtcaccatgggggctgtgctgggtgtcttctccctcgccagctgggttccatgcctctgcagcggtgcctcatgtttgctgtgtagttgctgtcctaacagtaagaattccacggtgactcgcctcatttatgctttcattctcctcctgagcactgtcgtatcctatatcatgcagagaaaagagatggaaacttacttgaagaagattcctggattttgtgaagggggatttaaaatccatgaggctgatataaatgcagataaagattgtgatgtgctggttggttataaagctgtgtatcggatcagctttgccatggccatctttttctttgtcttttctctgctcatgttcaaagtaaaaacaagtaaagatctccgagcggcagtacacaatgggttttggttcttcaaaattgctgcccttattggaatcatggttggctctttctacatccctgggggctatttcagctcagtctggtttgttgttggcatgataggggccgccctcttcatcctcattcagctggtgctgctggtagattttgctcattcttggaatgaatcatgggtaaatcgaatggaagaaggaaacccaaggttgtggtatgctgctttactgtctttcacaagcgccttttatatcctgtcaatcatctgtgtcgggctgctctatacatattacaccaaaccagatggctgcacagaaaacaagttcttcatcagtattaacctgatcctttgcgttgtggcttctattatatcgatccacccaaaaattcaggaacaccagcctcgctccggcctcttgcagtcctccctcatcaccctctacactatgtacctcacctggtcagccatgtccaatgaacctgatcgttcctgcaatcccaacctgatgagctttattacacgcataactgcaccaaccctggctcctggaaattcaactgctgtggtccctacccctactccaccatcaaagagtgggtctttactggattcagataattttattggactgtttgtctttgttctctgcctcttgtattctagcatccgcacttccactaatagccaagtagacaagctgaccctgtcagggagtgacagcgtcatccttggtgatacaactaccagtggtgccagtgatgaagaagatggacagcctcggcgggctgtggacaacgagaaagagggagtgcagtatagctactccttattccacctcatgctctgcttggcttccttgtacatcatgatgaccctgaccagctggtacagccctgatgcaaagtttcagagcatgaccagcaagtggccagctgtgtgggtcaagatcagctccagctgggtctgcctcctgctttacgtctggacccttgtggctccacttgtcctcaccagtcgggacttcagctgaacctctgagtgccaaggacaccactggaactcacaaaggtctccttcaccgaaaacccatataccttttaagtttgtttcaactaaaatattaagtgaatgctttgcaagtttgactgtatgcaggtttatatcagaaggtgagattgaataatgcttgatgcagaatcgaaacttctcatttatctgtatattatgtttacttctaaggatatagcacaaagggaacattttttgtttaaagtgaactacagctgtgctgtgaagagagttctttataaagcctgtaggttcttttaactttggtttaaaatgtaagataggaaaatgttggatatttgaggccatgcttaatatatttatattgcagtatcctttaaaagcaaaaaaaaaaaaatgcatttatattacagttttcctctatgaaagtccttacttatatgatacaagcactgtgttttgtgcttaaactcttcagcggggtagcatcaaagttcttggggaaggatcgtatatgtgggtcccttccctagaagaatggttgctgatatggctactgcttctacatcttgagttttttaatttactttttttacactgtagcattgagactgcttgattcaagtctggtgctttgccagatgtattaatttccataaatgctttgtgagtttggttaaaatgaagattcacttgggaaaacactgcagctttagtctgtgttactatcttgttatgagtatgtaaaagtaaaatgcatgtgaatttatcatatttgcactatgaaggtatttggttaaaatacaaagacttttaaga

SEQ ID NO: 314480 - DNA, 4185 bp, Homo sapiens
catccgtgcgtctgtggaaggctgcgtttccggcctgagaaaccgtcatgtttctggggagtcacctcagctggcagttaccaccgtgttagaaagcagcctcaggaccggccacctccatcactggcgtcaccatgggggctgtgctgggtgtcttctccctcgccagctgggttccatgcctctgcagcggtgcctcatgtttgctgtgtagttgctgtcctaacagtaagaattccacggtgactcgcctcatttatgctttcattctcctcctgagcactgtcgtatcctatatcatgcagagaaaagagatggaaacttacttgaagaagattcctggattttgtgaagggggatttaaaatccatgaggctgatataaatgcagataaagattgtgatgtgctggttggttataaagctgtgtatcggatcagctttgccatggccatctttttctttgtcttttctctgctcatgttcaaagtaaaaacaagtaaagatctccgagcggcagtacacaatgggttttggttcttcaaaattgctgcccttattggaatcatggttggctctttctacatccctgggggctatttcagctcagtctggtttgttgttggcatgataggggccgccctcttcatcctcattcagctggtgctgctggtagattttgctcattcttggaatgaatcatgggtaaatcgaatggaagaaggaaacccaaggttgtggtatgctgctttactgtctttcacaagcgccttttatatcctgtcaatcatctgtgtcgggctgctctatacatattacaccaaaccagatggctgcacagaaaacaagttcttcatcagtattaacctgatcctttgcgttgtggcttctattatatcgatccacccaaaaattcaggaacaccagcctcgctccggcctcttgcagtcctccctcatcaccctctacactatgtacctcacctggtcagccatgtccaatgaacctgatcgttcctgcaatcccaacctgatgagctttattacacgcataactgcaccaaccctggctcctggaaattcaactgtgtggacaacgagaaagagggagtgcagtatagctactccttattccacctcatgctctgcttggcttccttgtacatcatgatgaccctgaccagctggtacagccctgatgcaaagtttcagagcatgaccagcaagtggccagctgtgtgggtcaagatcagctccagctgggtctgcctcctgctttacgtctggacccttgtggctccacttgtcctcaccagtcgggacttcagctgaacctctgagtgccaaggacaccactggaactcacaaaggtctccttcaccgaaaacccatataccttttaagtttgtttcaactaaaatattaagtgaatgctttgcaagtttgactgtatgcaggtttatatcagaaggtgagattgaataatgcttgatgcagaatcgaaacttctcatttatctgtatattatgtttacttctaaggatatagcacaaagggaacattttttgtttaaagtgaactacagctgtgctgtgaagagagttctttataaagcctgtaggttcttttaactttggtttaaaatgtaagataggaaaatgttggatatttgaggccatgcttaatatatttatattgcagtatcctttaaaagcaaaaaaaaaaaaatgcatttatattacagttttcctctatgaaagtccttacttatatgatacaagcactgtgttttgtgcttaaactcttcagcggggtagcatcaaagttcttggggaaggatcgtatatgtgggtcccttccctagaagaatggttgctgatatggctactgcttctacatcttgagttttttaatttactttttttacactgtagcattgagactgcttgattcaagtctggtgctttgccagatgtattaatttccataaatgctttgtgagtttggttaaaatgaagattcacttgggaaaacactgcagctttagtctgtgttactatcttgttatgagtatgtaaaagtaaaatgcatgtgaatttatcatatttgcactatgaaggtatttggttaaaatacaaagacttttaagattttaaggccctttcttccaacagcttttatagttagcagccattctttattttctggatagccaggttttatcacgcttctagtcaggatgctcctattccttctaaaaattacggtctgactagtgagcaaagtcttgaatttattcaaaagtcctaaataccttctctaggtaagacacttggtagatgagagacggaaggcattgtcaagaaccattttcatgagaggtggtgtgcaaaaaggtagaataaaagagttctttcaacaaagatttactgtctattctgtactagaccctgtaggttttggggtacagtgttaaacatgatagaggctctgccgtcttggactttaatagcttagagaagagagcaaatgagctgacaggtggttataatgtgaattagtgctgtggtttaggaattggagagaactcaaaggagaggtatttggtgtaatggtaggctttctggagaaaatgatatttaagccaagaactcttagaagttagctaagagagagatgggaaaatgagacgacattgctggagtagataaaactgcatgttaaaggcaggaagatggggaaaaaaagttcagtaaagctggaatggggaaatgtagtcagggactgaattttaaagggctttatcaacctcagtaaagagtttggaccttatgttgagggtggctgaaaacatattcatagtgtcatgaacaaattttatcttcagtcacttgggctgatatatagagaatggatttagagagatgagaccaggtgcagtccatatgagatgtgaaatagagaagtggaatcgtagggacggggagaaattgacaggtgagggctacttagcaattagaatttttttttttcaattttaatttttttttttgagacggagtcttgctctgtcgcccaggctggagtgcaatggtgcgatctccgctcactgcaggctccgcctcccgggttcacgccattctcccgcctcagcctccctagtagctgggactacaggcacccaccaccacgcctggctaattttttttgtatttttagtagagacagggtttcaccatgttagccaggatggtctcgatctcctgacctcgtgatccacctgccgcggcctcccaaagttctaggattactggcatgagccaccgtgcctggccagcaattagaattttaacactggcagttatgaataatatgaaggagaggtagatttctgagtgattctggtttaaccagctgggtggatggtggttccacgtattcaggtggcaaacaggaaaaacatgtgttcgaagaagaatggaggtaggtggtctcttaagaatggttaagaggcttgggagtcagactgcttgggtttgcatcccagctttgccgttttctggctatcaaacttgtcagctattatttgttgagtacgtactatttgatttatgaccacaggcagctgagcctcagtgttggtgcctagtgtacaagattgttaaagaataaagttattttgcaaagtgtaacccatttttagcactgacatagcactgacagtagctgctgatctcattatgggctaaaataagacaatattcaaaggtcagagatatctagccagaatctgatggaggctggatttcagattttgttacagaattagacagaggaacacagaggggacaggctcagttagggtggaggtgtggggtagggaagcaggacttgatataaattattggaatcattgtcttttaaaccagtggtttatgtcagggtatagcgtttcaagggatttgagggtcagatggggaaatgtagccccttattttgccagtgtgaagcagataccctgcttttctttacagtagcggagtcagcttaagagctttaaaggtcctaaacttcaaaaacattacagtgccccatcctccgccttaatgtaattcaaaatacaaacaatactaaactgtaaaataaatgtaacaaagtccaataaagtttttatttttttctcatga

SEQ ID NO: 314481 - DNA, 1940 bp, Homo sapiens
catccgtgcgtctgtggaaggctgcgtttccggcctgagaaaccgtcatgtttctggggagtcacctcagctggcagttaccaccgtgttagaaagcagcctcaggaccggccacctccatcactggcgtcaccatgggggctgtgctgggtgtcttctccctcgccagctgggttccatgcctctgcagcggtgcctcatgtttgctgtgtagttgctgtcctaacagtaagaattccacggtgactcgcctcatttatgctttcattctcctcctgagcactgtcgtatcctatatcatgcagagaaaagagatggaaacttacttgaagaagattcctggattttgtgaagggggatttaaaatccatgaggctgatataaatgcagataaagattgtgatgtgctggttggttataaagctgtgtatcggatcagctttgccatggccatctttttctttgtcttttctctgctcatgttcaaagtaaaaacaagtaaagatctccgagcggcagtacacaatgggttttggttcttcaaaattgctgcccttattggaatcatggttggctctttctacatccctgggggctatttcagctcagtctggtttgttgttggcatgataggggccgccctcttcatcctcattcagctggtgctgctggtagattttgctcattcttggaatgaatcatgggtaaatcgaatggaagaaggaaacccaaggttgtggtatgctgctttactgtctttcacaagcgccttttatatcctgtcaatcatctgtgtcgggctgctctatacatattacaccaaaccagatggctgcacagaaaacaagttcttcatcagtattaacctgatcctttgcgttgtggcttctattatatcgatccacccaaaaattcaggaacaccagcctcgctccggcctcttgcagtcctccctcatcaccctctacactatgtacctcacctggtcagccatgtccaatgaacctgatcgttcctgcaatcccaacctgatgagctttattacacgcataactgcaccaaccctggctcctggaaattcaactgctgtggtccctacccctactccaccatcaaagagtgggtctttactggattcagataattttattggactgtttgtctttgttctctgcctcttgtattctagcatccgcacttccactaatagccaagtagacaagctgaccctgtcagggagtgacagcgtcatccttggtgatacaactaccagtggtgccagtgatgaagaagatggacagcctcggcgggctgtggacaacgagaaagagggagtgcagtatagctactccttattccacctcatgctctgcttggcttccttgtacatcatgatgaccctgaccagctggtacagccctgatgcaaagtttcagagcatgaccagcaagtggccagctgtgtgggtcaagatcagctccagctgggtctgcctcctgctttacgtctggacccttgtggctccacttgtcctcaccagtcgggacttcagctgaacctctgagtgccaaggacaccactggaactcacaaaggtctccttcaccgaaaacccatataccttttaagtttgtttcaactaaaatattaagtgaatgctttgcaagtttgactgtatgcaggtttatatcagaaggtgagattgaataatgcttgatgcagaatcgaaacttctcatttatctgtatattatgtttacttctaaggatatagcacaaagggaacattttttgtttaaagtgaactacagctgtgctgtgaagagagttctttataaagcctgtaggttcttttaactttggtttaaaatgtaagataggaaaatgttggatatttgaggccatgcttaatatatttatattgcagtatcctttaaaagca

SEQ ID NO: 314482 - DNA, 4357 bp, Homo sapiens
catccgtgcgtctgtggaaggctgcgtttccggcctgagaaaccgtcatgtttctggggagtcacctcagctggcagttaccaccgtgttagaaagcagcctcaggaccggccacctccatcactggcgtcaccatgggggctgtgctgggtgtcttctccctcgccagctgggttccatgcctctgcagcggtgcctcatgtttgctgtgtagttgctgtcctaacagtaagaattccacggtgactcgcctcatttatgctttcattctcctcctgagcactgtcgtatcctatatcatgcagagaaaagagatggaaacttacttgaagaagattcctggattttgtgaagggggattttataaagctgtgtatcggatcagctttgccatggccatctttttctttgtcttttctctgctcatgttcaaagtaaaaacaagtaaagatctccgagcggcagtacacaatgggttttggttcttcaaaattgctgcccttattggaatcatggttggctctttctacatccctgggggctatttcagctcagtctggtttgttgttggcatgataggggccgccctcttcatcctcattcagctggtgctgctggtagattttgctcattcttggaatgaatcatgggtaaatcgaatggaagaaggaaacccaaggttgtggtatgctgctttactgtctttcacaagcgccttttatatcctgtcaatcatctgtgtcgggctgctctatacatattacaccaaaccagatggctgcacagaaaacaagttcttcatcagtattaacctgatcctttgcgttgtggcttctattatatcgatccacccaaaaattcaggaacaccagcctcgctccggcctcttgcagtcctccctcatcaccctctacactatgtacctcacctggtcagccatgtccaatgaacctgatcgttcctgcaatcccaacctgatgagctttattacacgcataactgcaccaaccctggctcctggaaattcaactgctgtggtccctacccctactccaccatcaaagagtgggtctttactggattcagataattttattggactgtttgtctttgttctctgcctcttgtattctagcatccgcacttccactaatagccaagtagacaagctgaccctgtcagggagtgacagcgtcatccttggtgatacaactaccagtggtgccagtgatgaagaagatggacagcctcggcgggctgtggacaacgagaaagagggagtgcagtatagctactccttattccacctcatgctctgcttggcttccttgtacatcatgatgaccctgaccagctggtacagccctgatgcaaagtttcagagcatgaccagcaagtggccagctgtgtgggtcaagatcagctccagctgggtctgcctcctgctttacgtctggacccttgtggctccacttgtcctcaccagtcgggacttcagctgaacctctgagtgccaaggacaccactggaactcacaaaggtctccttcaccgaaaacccatataccttttaagtttgtttcaactaaaatattaagtgaatgctttgcaagtttgactgtatgcaggtttatatcagaaggtgagattgaataatgcttgatgcagaatcgaaacttctcatttatctgtatattatgtttacttctaaggatatagcacaaagggaacattttttgtttaaagtgaactacagctgtgctgtgaagagagttctttataaagcctgtaggttcttttaactttggtttaaaatgtaagataggaaaatgttggatatttgaggccatgcttaatatatttatattgcagtatcctttaaaagcaaaaaaaaaaaaatgcatttatattacagttttcctctatgaaagtccttacttatatgatacaagcactgtgttttgtgcttaaactcttcagcggggtagcatcaaagttcttggggaaggatcgtatatgtgggtcccttccctagaagaatggttgctgatatggctactgcttctacatcttgagttttttaatttactttttttacactgtagcattgagactgcttgattcaagtctggtgctttgccagatgtattaatttccataaatgctttgtgagtttggttaaaatgaagattcacttgggaaaacactgcagctttagtctgtgttactatcttgttatgagtatgtaaaagtaaaatgcatgtgaatttatcatatttgcactatgaaggtatttggttaaaatacaaagacttttaagattttaaggccctttcttccaacagcttttatagttagcagccattctttattttctggatagccaggttttatcacgcttctagtcaggatgctcctattccttctaaaaattacggtctgactagtgagcaaagtcttgaatttattcaaaagtcctaaataccttctctaggtaagacacttggtagatgagagacggaaggcattgtcaagaaccattttcatgagaggtggtgtgcaaaaaggtagaataaaagagttctttcaacaaagatttactgtctattctgtactagaccctgtaggttttggggtacagtgttaaacatgatagaggctctgccgtcttggactttaatagcttagagaagagagcaaatgagctgacaggtggttataatgtgaattagtgctgtggtttaggaattggagagaactcaaaggagaggtatttggtgtaatggtaggctttctggagaaaatgatatttaagccaagaactcttagaagttagctaagagagagatgggaaaatgagacgacattgctggagtagataaaactgcatgttaaaggcaggaagatggggaaaaaaagttcagtaaagctggaatggggaaatgtagtcagggactgaattttaaagggctttatcaacctcagtaaagagtttggaccttatgttgagggtggctgaaaacatattcatagtgtcatgaacaaattttatcttcagtcacttgggctgatatatagagaatggatttagagagatgagaccaggtgcagtccatatgagatgtgaaatagagaagtggaatcgtagggacggggagaaattgacaggtgagggctacttagcaattagaatttttttttttcaattttaatttttttttttgagacggagtcttgctctgtcgcccaggctggagtgcaatggtgcgatctccgctcactgcaggctccgcctcccgggttcacgccattctcccgcctcagcctccctagtagctgggactacaggcacccaccaccacgcctggctaattttttttgtatttttagtagagacagggtttcaccatgttagccaggatggtctcgatctcctgacctcgtgatccacctgccgcggcctcccaaagttctaggattactggcatgagccaccgtgcctggccagcaattagaattttaacactggcagttatgaataatatgaaggagaggtagatttctgagtgattctggtttaaccagctgggtggatggtggttccacgtattcaggtggcaaacaggaaaaacatgtgttcgaagaagaatggaggtaggtggtctcttaagaatggttaagaggcttgggagtcagactgcttgggtttgcatcccagctttgccgttttctggctatcaaacttgtcagctattatttgttgagtacgtactatttgatttatgaccacaggcagctgagcctcagtgttggtgcctagtgtacaagattgttaaagaataaagttattttgcaaagtgtaacccatttttagcactgacatagcactgacagtagctgctgatctcattatgggctaaaataagacaatattcaaaggtcagagatatctagccagaatctgatggaggctggatttcagattttgttacagaattagacagaggaacacagaggggacaggctcagttagggtggaggtgtggggtagggaagcaggacttgatataaattattggaatcattgtcttttaaaccagtggtttatgtcagggtatagcgtttcaagggatttgagggtcagatggggaaatgtagccccttattttgccagtgtgaagcagataccctgcttttctttacagtagcggagtcagcttaagagctttaaaggtcctaaacttcaaaaacattacagtgccccatcctccgccttaatgtaattcaaaatacaaacaatactaaactgtaaaataaatgtaacaaagtccaataaagtttttatttttttctcatga

SEQ ID NO: 314483 - DNA, 4273 bp, Homo sapiens
catccgtgcgtctgtggaaggctgcgtttccggcctgagaaaccgtcatgtttctggggagtcacctcagctggcagttaccaccgtgttagaaagcagcctcaggaccggccacctccatcactggcgtcaccatgggggctgtgctgggtgtcttctccctcgccagctgggttccatgcctctgcagcggtgcctcatgtttgctgtgtagttgctgtcctaacagtaagaattccacggtgactcgcctcatttatgctttcattctcctcctgagcactgtcgtatcctatatcatgcagagaaaagagatggaaacttacttgaagaagattcctggattttgtgaagggggatttaaaatccatgaggctgatataaatgcagataaagattgtgatgtgctggttggttataaagctgtgtatcggatcagctttgccatggccatctttttctttgtcttttctctgctcatgttcaaagtaaaaacaagtaaagatctccgagcggcagtacacaatgggttttggttcttcaaaattgctgcccttattggaatcatggttggctctttctacatccctgggggctatttcagctcagctttactgtctttcacaagcgccttttatatcctgtcaatcatctgtgtcgggctgctctatacatattacaccaaaccagatggctgcacagaaaacaagttcttcatcagtattaacctgatcctttgcgttgtggcttctattatatcgatccacccaaaaattcaggaacaccagcctcgctccggcctcttgcagtcctccctcatcaccctctacactatgtacctcacctggtcagccatgtccaatgaacctgatcgttcctgcaatcccaacctgatgagctttattacacgcataactgcaccaaccctggctcctggaaattcaactgctgtggtccctacccctactccaccatcaaagagtgggtctttactggattcagataattttattggactgtttgtctttgttctctgcctcttgtattctagcatccgcacttccactaatagccaagtagacaagctgaccctgtcagggagtgacagcgtcatccttggtgatacaactaccagtggtgccagtgatgaagaagatggacagcctcggcgggctgtggacaacgagaaagagggagtgcagtatagctactccttattccacctcatgctctgcttggcttccttgtacatcatgatgaccctgaccagctggtacagccctgatgcaaagtttcagagcatgaccagcaagtggccagctgtgtgggtcaagatcagctccagctgggtctgcctcctgctttacgtctggacccttgtggctccacttgtcctcaccagtcgggacttcagctgaacctctgagtgccaaggacaccactggaactcacaaaggtctccttcaccgaaaacccatataccttttaagtttgtttcaactaaaatattaagtgaatgctttgcaagtttgactgtatgcaggtttatatcagaaggtgagattgaataatgcttgatgcagaatcgaaacttctcatttatctgtatattatgtttacttctaaggatatagcacaaagggaacattttttgtttaaagtgaactacagctgtgctgtgaagagagttctttataaagcctgtaggttcttttaactttggtttaaaatgtaagataggaaaatgttggatatttgaggccatgcttaatatatttatattgcagtatcctttaaaagcaaaaaaaaaaaaatgcatttatattacagttttcctctatgaaagtccttacttatatgatacaagcactgtgttttgtgcttaaactcttcagcggggtagcatcaaagttcttggggaaggatcgtatatgtgggtcccttccctagaagaatggttgctgatatggctactgcttctacatcttgagttttttaatttactttttttacactgtagcattgagactgcttgattcaagtctggtgctttgccagatgtattaatttccataaatgctttgtgagtttggttaaaatgaagattcacttgggaaaacactgcagctttagtctgtgttactatcttgttatgagtatgtaaaagtaaaatgcatgtgaatttatcatatttgcactatgaaggtatttggttaaaatacaaagacttttaagattttaaggccctttcttccaacagcttttatagttagcagccattctttattttctggatagccaggttttatcacgcttctagtcaggatgctcctattccttctaaaaattacggtctgactagtgagcaaagtcttgaatttattcaaaagtcctaaataccttctctaggtaagacacttggtagatgagagacggaaggcattgtcaagaaccattttcatgagaggtggtgtgcaaaaaggtagaataaaagagttctttcaacaaagatttactgtctattctgtactagaccctgtaggttttggggtacagtgttaaacatgatagaggctctgccgtcttggactttaatagcttagagaagagagcaaatgagctgacaggtggttataatgtgaattagtgctgtggtttaggaattggagagaactcaaaggagaggtatttggtgtaatggtaggctttctggagaaaatgatatttaagccaagaactcttagaagttagctaagagagagatgggaaaatgagacgacattgctggagtagataaaactgcatgttaaaggcaggaagatggggaaaaaaagttcagtaaagctggaatggggaaatgtagtcagggactgaattttaaagggctttatcaacctcagtaaagagtttggaccttatgttgagggtggctgaaaacatattcatagtgtcatgaacaaattttatcttcagtcacttgggctgatatatagagaatggatttagagagatgagaccaggtgcagtccatatgagatgtgaaatagagaagtggaatcgtagggacggggagaaattgacaggtgagggctacttagcaattagaatttttttttttcaattttaatttttttttttgagacggagtcttgctctgtcgcccaggctggagtgcaatggtgcgatctccgctcactgcaggctccgcctcccgggttcacgccattctcccgcctcagcctccctagtagctgggactacaggcacccaccaccacgcctggctaattttttttgtatttttagtagagacagggtttcaccatgttagccaggatggtctcgatctcctgacctcgtgatccacctgccgcggcctcccaaagttctaggattactggcatgagccaccgtgcctggccagcaattagaattttaacactggcagttatgaataatatgaaggagaggtagatttctgagtgattctggtttaaccagctgggtggatggtggttccacgtattcaggtggcaaacaggaaaaacatgtgttcgaagaagaatggaggtaggtggtctcttaagaatggttaagaggcttgggagtcagactgcttgggtttgcatcccagctttgccgttttctggctatcaaacttgtcagctattatttgttgagtacgtactatttgatttatgaccacaggcagctgagcctcagtgttggtgcctagtgtacaagattgttaaagaataaagttattttgcaaagtgtaacccatttttagcactgacatagcactgacagtagctgctgatctcattatgggctaaaataagacaatattcaaaggtcagagatatctagccagaatctgatggaggctggatttcagattttgttacagaattagacagaggaacacagaggggacaggctcagttagggtggaggtgtggggtagggaagcaggacttgatataaattattggaatcattgtcttttaaaccagtggtttatgtcagggtatagcgtttcaagggatttgagggtcagatggggaaatgtagccccttattttgccagtgtgaagcagataccctgcttttctttacagtagcggagtcagcttaagagctttaaaggtcctaaacttcaaaaacattacagtgccccatcctccgccttaatgtaattcaaaatacaaacaatactaaactgtaaaataaatgtaacaaagtccaataaagtttttatttttttctcatga

SEQ ID NO: 314484 - DNA, 3525 bp, Homo sapiens
gcacgtggtaccttccaatcatagaagcggcacttgtgaagtcacggaaacagacacagagagcatagtgtgttttatgaaactcctaagcaattaagccatcacatcaagtagtaactgatgacagtgacgtcagtcttatgatgacaggcagcagttcagaactttaagcaggatcttcagaaagctttcagtctccaaagtaggaacagctcagcagtaagtgtcttgtatacaggccagtggcagcagttcattgtcatggcccctttctgatttgtcttccttgggatcactttccagcatccgcacttccactaatagccaagtagacaagctgaccctgtcagggagtgacagcgtcatccttggtgatacaactaccagtggtgccagtgatgaagaagatggacagcctcggcgggctgtggacaacgagaaagagggagtgcagtatagctactccttattccacctcatgctctgcttggcttccttgtacatcatgatgaccctgaccagctggtacagccctgatgcaaagtttcagagcatgaccagcaagtggccagctgtgtgggtcaagatcagctccagctgggtctgcctcctgctttacgtctggacccttgtggctccacttgtcctcaccagtcgggacttcagctgaacctctgagtgccaaggacaccactggaactcacaaaggtctccttcaccgaaaacccatataccttttaagtttgtttcaactaaaatattaagtgaatgctttgcaagtttgactgtatgcaggtttatatcagaaggtgagattgaataatgcttgatgcagaatcgaaacttctcatttatctgtatattatgtttacttctaaggatatagcacaaagggaacattttttgtttaaagtgaactacagctgtgctgtgaagagagttctttataaagcctgtaggttcttttaactttggtttaaaatgtaagataggaaaatgttggatatttgaggccatgcttaatatatttatattgcagtatcctttaaaagcaaaaaaaaaaaaatgcatttatattacagttttcctctatgaaagtccttacttatatgatacaagcactgtgttttgtgcttaaactcttcagcggggtagcatcaaagttcttggggaaggatcgtatatgtgggtcccttccctagaagaatggttgctgatatggctactgcttctacatcttgagttttttaatttactttttttacactgtagcattgagactgcttgattcaagtctggtgctttgccagatgtattaatttccataaatgctttgtgagtttggttaaaatgaagattcacttgggaaaacactgcagctttagtctgtgttactatcttgttatgagtatgtaaaagtaaaatgcatgtgaatttatcatatttgcactatgaaggtatttggttaaaatacaaagacttttaagattttaaggccctttcttccaacagcttttatagttagcagccattctttattttctggatagccaggttttatcacgcttctagtcaggatgctcctattccttctaaaaattacggtctgactagtgagcaaagtcttgaatttattcaaaagtcctaaataccttctctaggtaagacacttggtagatgagagacggaaggcattgtcaagaaccattttcatgagaggtggtgtgcaaaaaggtagaataaaagagttctttcaacaaagatttactgtctattctgtactagaccctgtaggttttggggtacagtgttaaacatgatagaggctctgccgtcttggactttaatagcttagagaagagagcaaatgagctgacaggtggttataatgtgaattagtgctgtggtttaggaattggagagaactcaaaggagaggtatttggtgtaatggtaggctttctggagaaaatgatatttaagccaagaactcttagaagttagctaagagagagatgggaaaatgagacgacattgctggagtagataaaactgcatgttaaaggcaggaagatggggaaaaaaagttcagtaaagctggaatggggaaatgtagtcagggactgaattttaaagggctttatcaacctcagtaaagagtttggaccttatgttgagggtggctgaaaacatattcatagtgtcatgaacaaattttatcttcagtcacttgggctgatatatagagaatggatttagagagatgagaccaggtgcagtccatatgagatgtgaaatagagaagtggaatcgtagggacggggagaaattgacaggtgagggctacttagcaattagaatttttttttttcaattttaatttttttttttgagacggagtcttgctctgtcgcccaggctggagtgcaatggtgcgatctccgctcactgcaggctccgcctcccgggttcacgccattctcccgcctcagcctccctagtagctgggactacaggcacccaccaccacgcctggctaattttttttgtatttttagtagagacagggtttcaccatgttagccaggatggtctcgatctcctgacctcgtgatccacctgccgcggcctcccaaagttctaggattactggcatgagccaccgtgcctggccagcaattagaattttaacactggcagttatgaataatatgaaggagaggtagatttctgagtgattctggtttaaccagctgggtggatggtggttccacgtattcaggtggcaaacaggaaaaacatgtgttcgaagaagaatggaggtaggtggtctcttaagaatggttaagaggcttgggagtcagactgcttgggtttgcatcccagctttgccgttttctggctatcaaacttgtcagctattatttgttgagtacgtactatttgatttatgaccacaggcagctgagcctcagtgttggtgcctagtgtacaagattgttaaagaataaagttattttgcaaagtgtaacccatttttagcactgacatagcactgacagtagctgctgatctcattatgggctaaaataagacaatattcaaaggtcagagatatctagccagaatctgatggaggctggatttcagattttgttacagaattagacagaggaacacagaggggacaggctcagttagggtggaggtgtggggtagggaagcaggacttgatataaattattggaatcattgtcttttaaaccagtggtttatgtcagggtatagcgtttcaagggatttgagggtcagatggggaaatgtagccccttattttgccagtgtgaagcagataccctgcttttctttacagtagcggagtcagcttaagagctttaaaggtcctaaacttcaaaaacattacagtgccccatcctccgccttaatgtaattcaaaatacaaacaatactaaactgtaaaataaatgtaacaaagtccaataaagtttttatttttttctcatga

SEQ ID NO: 314485 - DNA, 1708 bp, Homo sapiens
  misc_feature (1653)..(1653): n is a, c, g, or t
catccgtgcgtctgtggaaggctgcgtttccggcctgagaaaccgtcatgtttctggggagtcacctcagctggcagttaccaccgtgttagaaagcagcctcaggaccggccacctccatcactggcgtcaccatgggggctgtgctgggtgtcttctccctcgccagctgggttccatgcctctgcagcggtgcctcatgtttgctgtgtagttgctgtcctaacagtaagaattccacggtgactcgcctcatttatgctttcattctcctcctgagcactgtcgtatcctatatcatgcagagaaaagagatggaaacttacttgaagaagattcctggattttgtgaagggggatttaaaatccatgaggctgatataaatgcagataaagattgtgatgtgctggttggttataaagctgtgtatcggatcagctttgccatggccatctttttctttgtcttttctctgctcatgttcaaagtaaaaacaagtaaagatctccgagcggcagtacacaatgggttttggttcttcaaaattgctgcccttattggaatcatggttggctctttctacatccctgggggctatttcagctcagtctggtttgttgttggcatgataggggccgccctcttcatcctcattcagctggtgctgctggtagattttgctcattcttggaatgaatcatgggtaaatcgaatggaagaaggaaacccaaggttgtggtatgctgctttactgtctttcacaagcgccttttatatcctgtcaatcatctgtgtcgggctgctctatacatattacaccaaaccagatggctgcacagaaaacaagttcttcatcagtattaacctgatcctttgcgttgtggcttctattatatcgatccacccaaaaattcaggaacaccagcctcgctccggcctcttgcagtcctccctcatcaccctctacactatgtacctcacctggtcagccatgtccaatgaacctgatcgttcctgcaatcccaacctgatgagctttattacacgcataactgcaccaaccctggctcctggaaattcaactgctgtggtccctacccctactccaccatcaaagagtgggtctttactggattcagataattttattggactgtttgtctttgttctctgcctcttgtattctagcatccgcacttccactaatagccaagtagacaagctgaccctgtcagggagtgacagcgtcatccttggtgatacaactaccagtggtgccagtgatgaagaagatggacagcctcggcgggctgtggacaacgagaaagagggagtgcagtatagctactccttattccacctcatgctctgcttggcttccttgtacatcatgatgaccctgaccagctggtacagccctgatgcaaagtttcagagcatgaccagcaagtggccagctgtgtgggtcaagatcagctccagctgggtctgcctcctgctttacgtctggacccttgtggctccacttgtcctcaccagtcgggacttcagctgaacctctgagtgccaaggacaccactggaactcacaaaggtctccttcaccgaaaacccatataccttttaagtttgtttcagagattgataatgctngatgagaatcgaacttctcattatctgatatatgttacttctaggtatagcccaa

SEQ ID NO: 314486 - DNA, 2946 bp, Homo sapiens
  misc_feature (36)..(36): n is a, c, g, or t
  misc_feature (48)..(48): n is a, c, g, or t
  misc_feature (68)..(68): n is a, c, g, or t
  misc_feature (103)..(104): n is a, c, g, or t
ccccccccgcctaaccgtccggacccccctgtgggncccccccactgnccccctcaccccagtcgggnccctccagccgaacccctccgagtgcccccaaggnncccccacggaaccccacaaagggtcgtctccttcaccgaaaacccatataccttttaagtttgtttcaactaaaatattaagtgaatgctttgcaagtttgactgtatgcaggtttatatcagaaggtgagattgaataatgcttgatgcagaatcgaaacttctcatttatctgtatattatgtttacttctaaggatatagcacaaagggaacattttttgtttaaagtgaactacagctgtgctgtgaagagagttctttataaagcctgtaggttcttttaactttggtttaaaatgtaagataggaaaatgttggatatttgaggccatgcttaatatatttatattgcagtatcctttaaaagcaaaaaaaaaaaaatgcatttatattacagttttcctctatgaaagtccttacttatatgatacaagcactgtgttttgtgcttaaactcttcagcggggtagcatcaaagttcttggggaaggatcgtatatgtgggtcccttccctagaagaatggttgctgatatggctactgcttctacatcttgagttttttaatttactttttttacactgtagcattgagactgcttgattcaagtctggtgctttgccagatgtattaatttccataaatgctttgtgagtttggttaaaatgaagattcacttgggaaaacactgcagctttagtctgtgttactatcttgttatgagtatgtaaaagtaaaatgcatgtgaatttatcatatttgcactatgaaggtatttggttaaaatacaaagacttttaagattttaaggccctttcttccaacagcttttatagttagcagccattctttattttctggatagccaggttttatcacgcttctagtcaggatgctcctattccttctaaaaattacggtctgactagtgagcaaagtcttgaatttattcaaaagtcctaaataccttctctaggtaagacacttggtagatgagagacggaaggcattgtcaagaaccattttcatgagaggtggtgtgcaaaaaggtagaataaaagagttctttcaacaaagatttactgtctattctgtactagaccctgtaggttttggggtacagtgttaaacatgatagaggctctgccgtcttggactttaatagcttagagaagagagcaaatgagctgacaggtggttataatgtgaattagtgctgtggtttaggaattggagagaactcaaaggagaggtatttggtgtaatggtaggctttctggagaaaatgatatttaagccaagaactcttagaagttagctaagagagagatgggaaaatgagacgacattgctggagtagataaaactgcatgttaaaggcaggaagatggggaaaaaaagttcagtaaagctggaatggggaaatgtagtcagggactgaattttaaagggctttatcaacctcagtaaagagtttggaccttatgttgagggtggctgaaaacatattcatagtgtcatgaacaaattttatcttcagtcacttgggctgatatatagagaatggatttagagagatgagaccaggtgcagtccatatgagatgtgaaatagagaagtggaatcgtagggacggggagaaattgacaggtgagggctacttagcaattagaatttttttttttcaattttaatttttttttttgagacggagtcttgctctgtcgcccaggctggagtgcaatggtgcgatctccgctcactgcaggctccgcctcccgggttcacgccattctcccgcctcagcctccctagtagctgggactacaggcacccaccaccacgcctggctaattttttttgtatttttagtagagacagggtttcaccatgttagccaggatggtctcgatctcctgacctcgtgatccacctgccgcggcctcccaaagttctaggattactggcatgagccaccgtgcctggccagcaattagaattttaacactggcagttatgaataatatgaaggagaggtagatttctgagtgattctggtttaaccagctgggtggatggtggttccacgtattcaggtggcaaacaggaaaaacatgtgttcgaagaagaatggaggtaggtggtctcttaagaatggttaagaggcttgggagtcagactgcttgggtttgcatcccagctttgccgttttctggctatcaaacttgtcagctattatttgttgagtacgtactatttgatttatgaccacaggcagctgagcctcagtgttggtgcctagtgtacaagattgttaaagaataaagttattttgcaaagtgtaacccatttttagcactgacatagcactgacagtagctgctgatctcattatgggctaaaataagacaatattcaaaggtcagagatatctagccagaatctgatggaggctggatttcagattttgttacagaattagacagaggaacacagaggggacaggctcagttagggtggaggtgtggggtagggaagcaggacttgatataaattattggaatcattgtcttttaaaccagtggtttatgtcagggtatagcgtttcaagggatttgagggtcagatggggaaatgtagccccttattttgccagtgtgaagcagataccctgcttttctttacagtagcggagtcagcttaagagctttaaaggtcctaaacttcaaaaacattacagtgccccatcctccgccttaatgtaattcaaaatacaaacaatactaaactgtaaaataaatgtaacaaagtccaataaagtttttatttttttctcatga

SEQ ID NO: 314487 - DNA, 2876 bp, Homo sapiens
  misc_feature (43)..(43): n is a, c, g, or t
agggtcgacatctagaggagaccccggggtttcccctcttgtntctactaaaaatacaacaaaaattagccaggcgtggaggtgggtgcctgtagtcccagcactaaaatattaagtgaatgctttgcaagtttgactgtatgcaggtttatatcagaaggtgagattgaataatgcttgatgcagaatcgaaacttctcatttatctgtatattatgtttacttctaaggatatagcacaaagggaacattttttgtttaaagtgaactacagctgtgctgtgaagagagttctttataaagcctgtaggttcttttaactttggtttaaaatgtaagataggaaaatgttggatatttgaggccatgcttaatatatttatattgcagtatcctttaaaagcaaaaaaaaaaaaatgcatttatattacagttttcctctatgaaagtccttacttatatgatacaagcactgtgttttgtgcttaaactcttcagcggggtagcatcaaagttcttggggaaggatcgtatatgtgggtcccttccctagaagaatggttgctgatatggctactgcttctacatcttgagttttttaatttactttttttacactgtagcattgagactgcttgattcaagtctggtgctttgccagatgtattaatttccataaatgctttgtgagtttggttaaaatgaagattcacttgggaaaacactgcagctttagtctgtgttactatcttgttatgagtatgtaaaagtaaaatgcatgtgaatttatcatatttgcactatgaaggtatttggttaaaatacaaagacttttaagattttaaggccctttcttccaacagcttttatagttagcagccattctttattttctggatagccaggttttatcacgcttctagtcaggatgctcctattccttctaaaaattacggtctgactagtgagcaaagtcttgaatttattcaaaagtcctaaataccttctctaggtaagacacttggtagatgagagacggaaggcattgtcaagaaccattttcatgagaggtggtgtgcaaaaaggtagaataaaagagttctttcaacaaagatttactgtctattctgtactagaccctgtaggttttggggtacagtgttaaacatgatagaggctctgccgtcttggactttaatagcttagagaagagagcaaatgagctgacaggtggttataatgtgaattagtgctgtggtttaggaattggagagaactcaaaggagaggtatttggtgtaatggtaggctttctggagaaaatgatatttaagccaagaactcttagaagttagctaagagagagatgggaaaatgagacgacattgctggagtagataaaactgcatgttaaaggcaggaagatggggaaaaaaagttcagtaaagctggaatggggaaatgtagtcagggactgaattttaaagggctttatcaacctcagtaaagagtttggaccttatgttgagggtggctgaaaacatattcatagtgtcatgaacaaattttatcttcagtcacttgggctgatatatagagaatggatttagagagatgagaccaggtgcagtccatatgagatgtgaaatagagaagtggaatcgtagggacggggagaaattgacaggtgagggctacttagcaattagaatttttttttttcaattttaatttttttttttgagacggagtcttgctctgtcgcccaggctggagtgcaatggtgcgatctccgctcactgcaggctccgcctcccgggttcacgccattctcccgcctcagcctccctagtagctgggactacaggcacccaccaccacgcctggctaattttttttgtatttttagtagagacagggtttcaccatgttagccaggatggtctcgatctcctgacctcgtgatccacctgccgcggcctcccaaagttctaggattactggcatgagccaccgtgcctggccagcaattagaattttaacactggcagttatgaataatatgaaggagaggtagatttctgagtgattctggtttaaccagctgggtggatggtggttccacgtattcaggtggcaaacaggaaaaacatgtgttcgaagaagaatggaggtaggtggtctcttaagaatggttaagaggcttgggagtcagactgcttgggtttgcatcccagctttgccgttttctggctatcaaacttgtcagctattatttgttgagtacgtactatttgatttatgaccacaggcagctgagcctcagtgttggtgcctagtgtacaagattgttaaagaataaagttattttgcaaagtgtaacccatttttagcactgacatagcactgacagtagctgctgatctcattatgggctaaaataagacaatattcaaaggtcagagatatctagccagaatctgatggaggctggatttcagattttgttacagaattagacagaggaacacagaggggacaggctcagttagggtggaggtgtggggtagggaagcaggacttgatataaattattggaatcattgtcttttaaaccagtggtttatgtcagggtatagcgtttcaagggatttgagggtcagatggggaaatgtagccccttattttgccagtgtgaagcagataccctgcttttctttacagtagcggagtcagcttaagagctttaaaggtcctaaacttcaaaaacattacagtgccccatcctccgccttaatgtaattcaaaatacaaacaatactaaactgtaaaataaatgtaacaaagtccaataaagtttttatttttttctcatga

SEQ ID NO: 314488 - DNA, 1289 bp, Homo sapiens
catccgtgcgtctgtggaaggctgcgtttccggcctgagaaaccgtcatgtttctggggagtcacctcagctggcagttaccaccgtgttagaaagcagcctcaggaccggccacctccatcactggcgtcaccatgggggctgtgctgggtgtcttctccctcgccagctgggttccatgcctctgcagcggtgcctcatgtttgctgtgtagttgctgtcctaacagtaagaattccacggtgactcgcctcatttatgctttcattctcctcctgagcactgtcgtatcctatatcatgcagagaaaagagatggaaacttacttgaagaagattcctggattttgtgaagggggatttaaaatccatgaggctgatataaatgcagataaagattgtgatgtgctggttggttataaagctgtgtatcggatcagctttgccatggccatctttttctttgtcttttctctgctcatgttcaaagtaaaaacaagtaaagatctccgagcggcagtacacaatgggttttggttcttcaaaattgctgcccttattggaatcatggttggctctttctacatccctgggggctatttcagctcagtctggtttgttgttggcatgataggggccgccctcttcatcctcattcagctggtgctgctggtagattttgctcattcttggaatgaatcatgggtaaatcgaatggaagaaggaaacccaaggttgtggtatgctgctttactgtctttcacaagcgccttttatatcctgtcaatcatctgtgtcgggctgctctatacatattacaccaaaccagatggctgcacagaaaacaagttcttcatcagtattaacctgatcctttgcgttgtggcttctattatatcgatccacccaaaaattcaggaacaccagcctcgctccggcctcttgcagtcctccctcatcaccctctacactatgtacctcacctggtcagccatgtccaatgaacctgagcccctcacatgaggttgcagcttttggctcgatccttgtgtatctcgccctcattcccccggtctggccgtcctgacagctgagcggatcgctgcattccccggcgtgagtcagttcggcgcagctgcctatggccacggccaagggaggccactgtagccacatggaagacatccctgacgctgcgctcagaggaccgggaggagcactcaacataggacacagcccccacctgcttggaaagcacagtgccctgatcatgtgtcacagggataagcc

SEQ ID NO: 314489 - DNA, 1255 bp, Homo sapiens
catccgtgcgtctgtggaaggctgcgtttccggcctgagaaaccgtcatgtttctggggagtcacctcagctggcagttaccaccgtgttagaaagcagcctcaggaccggccacctccatcactggcgtcaccatgggggctgtgctgggtgtcttctccctcgccagctgggttccatgcctctgcagcggtgcctcatgtttgctgtgtagttgctgtcctaacagtaagaattccacggtgactcgcctcatttatgctttcattctcctcctgagcactgtcgtatcctatatcatgcagagaaaagagatggaaacttacttgaagaagattcctggattttgtgaagggggatttaaaatccatgaggctgatataaatgcagataaagattgtgatgtgctggttggttataaagctgtgtatcggatcagctttgccatggccatctttttctttgtcttttctctgctcatgttcaaagtaaaaacaagtaaagatctccgagcggcagtacacaatgggttttggttcttcaaaattgctgcccttattggaatcatggttggctctttctacatccctgggggctatttcagctcagtctggtttgttgttggcatgataggggccgccctcttcatcctcattcagctggtgctgctggtagattttgctcattcttggaatgaatcatgggtaaatcgaatggaagaaggaaacccaaggttgtggtatgctgctttactgtctttcacaagcgccttttatatcctgtcaatcatctgtgtcgggctgctctatacatattacaccaaaccagatggctgcacagaaaacaagttcttcatcagtattaacctgatcctttgcgttgtggcttctattatatcgatccacccaaaaattcaggaacaacagcctcctccaactcattttttctcaacaaacttatttttccagcagaagaatcccagtcttcttagagaacccagtgactttttgcaccttaaatctgtgaaatcctcatgttttcttctgccgtatccatagttcaaacaaagatgaggcaaagctagatgcattcctgaaggaacccaagaaattcctctctttatttctctggaatgaaatgaattctctagacgaccagttctaaccttcaaaaaccaaacctgtttgtgagatctccttcaaatactactgtagaccccagtgattattcattaaattttaaaatatttgtttta

SEQ ID NO: 314490 - DNA, 1799 bp, Homo sapiens
tctccgccttaccattacaccaaatacctctcctttgagttctccccaattcctaaaccacagcactaattcacattataaccacctgtcagctcatttgctctgccgtcttggactttaatagcttagagaagagagcaaatgagctgacaggtggttataatgtgaattagtgctgtggtttaggaattggagagaactcaaaggagaggtatttggtgtaatggtaggctttctggagaaaatgatatttaagccaagaactcttagaagttagctaagagagagatgggaaaatgagacgacattgctggagtagataaaactgcatgttaaaggcaggaagatggggaaaaaaagttcagtaaagctggaatggggaaatgtagtcagggactgaattttaaagggctttatcaacctcagtaaagagtttggaccttatgttgagggtggctgaaaacatattcatagtgtcatgaacaaattttatcttcagtcacttgggctgatatatagagaatggatttagagagatgagaccaggtgcagtccatatgagatgtgaaatagagaagtggaatcgtagggacggggagaaattgacaggtgagggctacttagcaattagaatttttttttttcaattttaatttttttttttgagacggagtcttgctctgtcgcccaggctggagtgcaatggtgcgatctccgctcactgcaggctccgcctcccgggttcacgccattctcccgcctcagcctccctagtagctgggactacaggcacccaccaccacgcctggctaattttttttgtatttttagtagagacagggtttcaccatgttagccaggatggtctcgatctcctgacctcgtgatccacctgccgcggcctcccaaagttctaggattactggcatgagccaccgtgcctggccagcaattagaattttaacactggcagttatgaataatatgaaggagaggtagatttctgagtgattctggtttaaccagctgggtggatggtggttccacgtattcaggtggcaaacaggaaaaacatgtgttcgaagaagaatggaggtaggtggtctcttaagaatggttaagaggcttgggagtcagactgcttgggtttgcatcccagctttgccgttttctggctatcaaacttgtcagctattatttgttgagtacgtactatttgatttatgaccacaggcagctgagcctcagtgttggtgcctagtgtacaagattgttaaagaataaagttattttgcaaagtgtaacccatttttagcactgacatagcactgacagtagctgctgatctcattatgggctaaaataagacaatattcaaaggtcagagatatctagccagaatctgatggaggctggatttcagattttgttacagaattagacagaggaacacagaggggacaggctcagttagggtggaggtgtggggtagggaagcaggacttgatataaattattggaatcattgtcttttaaaccagtggtttatgtcagggtatagcgtttcaagggatttgagggtcagatggggaaatgtagccccttattttgccagtgtgaagcagataccctgcttttctttacagtagcggagtcagcttaagagctttaaaggtcctaaacttcaaaaacattacagtgccccatcctccgccttaatgtaattcaaaatacaaacaatactaaactgtaaaataaatgtaacaaagtccaataaagtttttatttttttctcatga

SEQ ID NO: 314491 - DNA, 880 bp, Homo sapiens
  misc_feature (839)..(839): n is a, c, g, or t
  misc_feature (841)..(841): n is a, c, g, or t
catccgtgcgtctgtggaaggctgcgtttccggcctgagaaaccgtcatgtttctggggagtcacctcagctggcagttaccaccgtgttagaaagcagcctcaggaccggccacctccatcactggcgtcaccatgggggctgtgctgggtgtcttctccctcgccagctgggttccatgcctctgcagcggtgcctcatgtttgctgtgtagttgctgtcctaacagtaagaattccacggtgactcgcctcatttatgctttcattctcctcctgagcactgtcgtatcctatatcatgcagagaaaagagatggaaacttacttgaagaagattcctggattttgtgaagggggatttaaaatccatgaggctgatataaatgcagataaagattgtgatgtgctggttggttataaagctgtgtatcggatcagctttgccatggccatctttttctttgtcttttctctgctcatgttcaaagtaaaaacaagtaaagatctccgagcggcagtacacaatgggttttggttcttcaaaattgctgcccttattggaatcatggttggctctttctacatccctgggggctatttcagctcagtctggttagtggtaggatgataggggcagcctcttcatcctcattcagatggtgtgtggtaattagtcatctgggatgctatggtaatcgatgagaagaaccaggtggaatgtgctatgctcaaggcttatacggacacggtggggcaatttaacacgagggaaaagttaaatcgactggggtatcccatgactcgctgtcacaattgtgtggtttttttggcattttcnangccaaaggacacaccaaaacaccggccacacgacggagg

SEQ ID NO: 314492 - DNA, 584 bp, Homo sapiens
catccgtgcgtctgtggaaggctgcgtttccggcctgagaaaccgtcatgtttctggggagtcacctcagctggcagttaccaccgtgttagaaagcagcctcaggaccggccacctccatcactggcgtcaccatgggggctgtgctgggtgtcttctccctcgccagctgggttccatgcctctgcagcggtgcctcatgtttgctgtgtagttgctgtcctaacagtaagaattccacggtgactcgcctcatttatgctttcattctcctcctgagcactgtcgtatcctatatcatgcagagaaaagagatggaaacttacttgaagaagattcctggattttgtgaagggggatttaaaatccatgaggctgatataaatgcagataaagattgtgatgtgctggttggttataaagctgtgtatcggatcagctttgccatggccatctttttctttgtcttttctctgctcatgttcaaagtaaaaacaagtaaagatctccgagcggcagtacacaatgggttttggttttttaatatttaaactcacccggtttggttgtgcgtgggccccccc

SEQ ID NO: 314493 - DNA, 679 bp, Homo sapiens
catccgtgcgtctgtggaaggctgcgtttccggcctgagaaaccgtcatgtttctggggagtcacctcagctggcagttaccaccgtgttagaaagcagcctcaggaccggccacctccatcactggcgtcaccatgggggctgtgctgggtgtcttctccctcgccagctggaaaatcctggtgagttgaaggccaggcatggtggctcacgccaggatggtctcaatctcctgacctcgtgatccgccggcctcccagagtgcttggattacaggttccatgcctctgcagcggtgcctcatgtttgctgtgtagttgctgtcctaacagtaagaattccacggtgactcgcctcatttatgctttcattctcctcctgagcactgtcgtatcctatatcatgcagagaaaagagatggaaacttacttgaagaaggtcgaagcatctaaactggactagttcttcacctttggaaggactcagtcgtagctggaaaatctcacaggaaagtggcacacagcctcttcatcctaaaagggcaaagaagagagaccatatttttttgaaactaagactcactctgttgcccaggctggagtgcagtgacatgatcttggctcactgcaacctccgcctccctggttcaagcaattctcctgcctcagcctcccgagta

SEQ ID NO: 314494 - DNA, 383 bp, Homo sapiens
ctctgtcttaacctacttcctaagcatggcatcaggtgacatctttagatttctactgtgatttaaaagaaaagacttatagtatcatttggaactcaggtcccaggcttcccttggcacaagctaaaacatattttaaaaggtctgaaacccagtagaaagcttttaagaatgccgttgagtttggaatcttgctgtactgctggagacagaatgtctttaccacctctgtcttgttttaattgaaatccgttcagaatgttggatcttctgaaatgttactctatggtagagaataactttgttctcttggttcttgtagtctggtttgttgttggcatgataggggccgccctcttcatcctcattcagctggtgctgct

SEQ ID NO: 314495 - DNA, 899 bp, Homo sapiens
  misc_feature (897)..(899): n is a, c, g, or t
catccgtgcgtctgtggaaggctgcgtttccggcctgagaaaccgtcatgtttctggggagtcacctcagctggcagttaccaccgtgttagaaagcagcctcaggaccggccacctccatcactggcgtcaccatgggggctgtgctgggtgtcttctccctcgccagctgggttccatgcctctgcagcggtgcctcatgtttgctgtgtagttgctgtcctaacagtaagaattccacggtgactcgcctcatttatgctttcattctcctcctgagcactgtcgtatcctatatcatgcagagaaaagagatggaaacttacttgaagaagattcctggattttgtgaagggggatttaaaatccatgaggctgatataaatgcagataaagattgtgatgtgctggttggttataaagctgtgtatcggatcagctttgccatggccatctttttctttgtcttttctctgctcatgttcaaagtaaaaacaagtaaagatctccgagcggcagtacacaatgggttttggttcttcaaaattgctgcccttattggaatcatggttggctctttctacatccctgggggctatttcagctcagtctggtttgttgttggcatgataggggccgccctcttcatcctcattcagctggtgctgctggtagattttgctcattcttggaatgaatcatgggtaaatcgaatggaagaaggaaacccaaggttgtggtatgctgctttacgctgtcacaagcgccttttatcggcacaatgggtgggggcataattacccaccatgggggcgaacagctacaggtacgactgcggggttatgtccaatgactccgtggccatcccttctgctgcctctcttcctgcgtgttttnnn

SEQ ID NO: 314496 - DNA, 4411 bp, Homo sapiens
catccgtgcgtctgtggaaggctgcgtttccggcctgagaaaccgtcatgtttctggggagtcacctcagctggcagttaccaccgtgttagaaagcagcctcaggaccggccacctccatcactggcgtcaccatgggggctgtgctgggtgtcttctccctcgccagctgggttccatgcctctgcagcggtgcctcatgtttgctgtgtagttgctgtcctaacagtaagaattccacggtgactcgcctcatttatgctttcattctcctcctgagcactgtcgtatcctatatcatgcagagaaaagagatggaaacttacttgaagaagattcctggattttgtgaagggggatttaaaatccatgaggctgatataaatgcagataaagattgtgatgtgctggttggttataaagctgtgtatcggatcagctttgccatggccatctttttctttgtcttttctctgctcatgttcaaagtaaaaacaagtaaagatctccgagcggcagtacacaatgggttttggttcttcaaaattgctgcccttattggaatcatggttggctctttctacatccctgggggctatttcagctcagtctggtttgttgttggcatgataggggccgccctcttcatcctcattcagctggtgctgctggtagattttgctcattcttggaatgaatcatgggtaaatcgaatggaagaaggaaacccaaggttgtggtatgctgctttactgtctttcacaagcgccttttatatcctgtcaatcatctgtgtcgggctgctctatacatattacaccaaaccagatggctgcacagaaaacaagttcttcatcagtattaacctgatcctttgcgttgtggcttctattatatcgatccacccaaaaattcaggaacaccagcctcgctccggcctcttgcagtcctccctcatcaccctctacactatgtacctcacctggtcagccatgtccaatgaacctgatcgttcctgcaatcccaacctgatgagctttattacacgcataactgcaccaaccctggctcctggaaattcaactgctgtggtccctacccctactccaccatcaaagagtgggtctttactggattcagataattttattggactgtttgtctttgttctctgcctcttgtattctagcatccgcacttccactaatagccaagtagacaagctgaccctgtcagggagtgacagcgtcatccttggtgatacaactaccagtggtgccagtgatgaagaagatggacagcctcggcgggctgtggacaacgagaaagagggagtgcagtatagctactccttattccacctcatgctctgcttggcttccttgtacatcatgatgaccctgaccagctggtacagccctgatgcaaagtttcagagcatgaccagcaagtggccagctgtgtgggtcaagatcagctccagctgggtctgcctcctgctttacgtctggacccttgtggctccacttgtcctcaccagtcgggacttcagctgaacctctgagtgccaaggacaccactggaactcacaaaggtctccttcaccgaaaacccatataccttttaagtttgtttcaactaaaatattaagtgaatgctttgcaagtttgactgtatgcaggtttatatcagaaggtgagattgaataatgcttgatgcagaatcgaaacttctcatttatctgtatattatgtttacttctaaggatatagcacaaagggaacattttttgtttaaagtgaactacagctgtgctgtgaagagagttctttataaagcctgtaggttcttttaactttggtttaaaatgtaagataggaaaatgttggatatttgaggccatgcttaatatatttatattgcagtatcctttaaaagcaaaaaaaaaaaaatgcatttatattacagttttcctctatgaaagtccttacttatatgatacaagcactgtgttttgtgcttaaactcttcagcggggtagcatcaaagttcttggggaaggatcgtatatgtgggtcccttccctagaagaatggttgctgatatggctactgcttctacatcttgagttttttaatttactttttttacactgtagcattgagactgcttgattcaagtctggtgctttgccagatgtattaatttccataaatgctttgtgagtttggttaaaatgaagattcacttgggaaaacactgcagctttagtctgtgttactatcttgttatgagtatgtaaaagtaaaatgcatgtgaatttatcatatttgcactatgaaggtatttggttaaaatacaaagacttttaagattttaaggccctttcttccaacagcttttatagttagcagccattctttattttctggatagccaggttttatcacgcttctagtcaggatgctcctattccttctaaaaattacggtctgactagtgagcaaagtcttgaatttattcaaaagtcctaaataccttctctaggtaagacacttggtagatgagagacggaaggcattgtcaagaaccattttcatgagaggtggtgtgcaaaaaggtagaataaaagagttctttcaacaaagatttactgtctattctgtactagaccctgtaggttttggggtacagtgttaaacatgatagaggctctgccgtcttggactttaatagcttagagaagagagcaaatgagctgacaggtggttataatgtgaattagtgctgtggtttaggaattggagagaactcaaaggagaggtatttggtgtaatggtaggctttctggagaaaatgatatttaagccaagaactcttagaagttagctaagagagagatgggaaaatgagacgacattgctggagtagataaaactgcatgttaaaggcaggaagatggggaaaaaaagttcagtaaagctggaatggggaaatgtagtcagggactgaattttaaagggctttatcaacctcagtaaagagtttggaccttatgttgagggtggctgaaaacatattcatagtgtcatgaacaaattttatcttcagtcacttgggctgatatatagagaatggatttagagagatgagaccaggtgcagtccatatgagatgtgaaatagagaagtggaatcgtagggacggggagaaattgacaggtgagggctacttagcaattagaatttttttttttcaattttaatttttttttttgagacggagtcttgctctgtcgcccaggctggagtgcaatggtgcgatctccgctcactgcaggctccgcctcccgggttcacgccattctcccgcctcagcctccctagtagctgggactacaggcacccaccaccacgcctggctaattttttttgtatttttagtagagacagggtttcaccatgttagccaggatggtctcgatctcctgacctcgtgatccacctgccgcggcctcccaaagttctaggattactggcatgagccaccgtgcctggccagcaattagaattttaacactggcagttatgaataatatgaaggagaggtagatttctgagtgattctggtttaaccagctgggtggatggtggttccacgtattcaggtggcaaacaggaaaaacatgtgttcgaagaagaatggaggtaggtggtctcttaagaatggttaagaggcttgggagtcagactgcttgggtttgcatcccagctttgccgttttctggctatcaaacttgtcagctattatttgttgagtacgtactatttgatttatgaccacaggcagctgagcctcagtgttggtgcctagtgtacaagattgttaaagaataaagttattttgcaaagtgtaacccatttttagcactgacatagcactgacagtagctgctgatctcattatgggctaaaataagacaatattcaaaggtcagagatatctagccagaatctgatggaggctggatttcagattttgttacagaattagacagaggaacacagaggggacaggctcagttagggtggaggtgtggggtagggaagcaggacttgatataaattattggaatcattgtcttttaaaccagtggtttatgtcagggtatagcgtttcaagggatttgagggtcagatggggaaatgtagccccttattttgccagtgtgaagcagataccctgcttttctttacagtagcggagtcagcttaagagctttaaaggtcctaaacttcaaaaacattacagtgccccatcctccgccttaatgtaattcaaaatacaaacaatactaaactgtaaaataaatgtaacaaagtccaataaagtttttatttttttctcatga

SEQ ID NO: 314497 - DNA, 2645 bp, Homo sapiens
catccgtgcgtctgtggaaggctgcgtttccggcctgagaaaccgtcatgtttctggggagtcacctcagctggcagttaccaccgtgttagaaagcagcctcaggaccggccacctccatcactggcgtcaccatgggggctgtgctgggtgtcttctccctcgccagctgggttccatgcctctgcagcggtgcctcatgtttgctgtgtagttgctgtcctaacagtaagaattccacggtgactcgcctcatttatgctttcattctcctcctgagcactgtcgtatcctatatcatgcagagaaaagagatggaaacttacttgaagaagattcctggattttgtgaagggggatttaaaatccatgaggctgatataaatgcagataaagattgtgatgtgctggttggttataaagctgtgtatcggatcagctttgccatggccatctttttctttgtcttttctctgctcatgttcaaagtaaaaacaagtaaagatctccgagcggcagtacacaatgggttttggttcttcaaaattgctgcccttattggaatcatggttggctctttctacatccctgggggctatttcagctcagtctggtttgttgttggcatgataggggccgccctcttcatcctcattcagctggtgctgctggtagattttgctcattcttggaatgaatcatgggtaaatcgaatggaagaaggaaacccaaggttgtggtatgctgctttactgtctttcacaagcgccttttatatcctgtcaatcatctgtgtcgggctgctctatacatattacaccaaaccagatggctgcacagaaaacaagttcttcatcagtattaacctgatcctttgcgttgtggcttctattatatcgatccacccaaaaattcaggaacaccagcctcgctccggcctcttgcagtcctccctcatcaccctctacactatgtacctcacctggtcagccatgtccaatgaacctgatcgttcctgcaatcccaacctgatgagctttattacacgcataactgcaccaaccctggctcctggaaattcaactgctgtggtccctacccctactccaccatcaaagagtgggtctttactggattcagataattttattggactgtttgtctttgttctctgcctcttgtattctagcatccgcacttccactaatagccaagtagacaagctgaccctgtcagggagtgacagcgtcatccttggtgatacaactaccagtggtgccagtgatgaagaagatggacagcctcggcgggctgtggacaacgagaaagagggagtgcagtatagctactccttattccacctcatgctctgcttggcttccttgtacatcatgatgaccctgaccagctggtacagccctgatgcaaagtttcagagcatgaccagcaagtggccagctgtgtgggtcaagatcagctccagctgggtctgcctcctgctttacgtctggacccttgtggctccacttgtcctcaccagtcgggacttcagctgaacctctgagtgccaaggacaccactggaactcacaaaggtctccttcaccgaaaacccatataccttttaagtttgtttcaactaaaatattaagtgaatgctttgcaagtttgactgtatgcaggtttatatcagaaggtgagattgaataatgcttgatgcagaatcgaaacttctcatttatctgtatattatgtttacttctaaggatatagcacaaagggaacattttttgtttaaagtgaactacagctgtgctgtgaagagagttctttataaagcctgtaggttcttttaactttggtttaaaatgtaagataggaaaatgttggatatttgaggccatgcttaatatatttatattgcagtatcctttaaaagcaaaaaaaaaaaaatgcatttatattacagttttcctctatgaaagtccttacttatatgatacaagcactgtgttttgtgcttaaactcttcagcggggtagcatcaaagttcttggggaaggatcgtatatgtgggtcccttccctagaagaatggttgctgatatggctactgcttctacatcttgagttttttaatttactttttttacactgtagcattgagactgcttgattcaagtctggtgctttgccagatgtattaatttccataaatgctttgtgagtttggttaaaatgaagattcacttgggaaaacactgcagctttagtctgtgttactatcttgttatgagtatgtaaaagtaaaatgcatgtgaatttatcatatttgcactatgaaggtatttggttaaaatacaaagacttttaagattttaaggccctttcttccaacagcttttatagttagcagccattctttattttctggatagccaggttttatcacgcttctagtcaggatgctcctattccttctaaaaattacggtctgactagtgagcaaagtcttgaatttattcaaaagtcctaaataccttctctaggtaagacacttggtagatgagagacggaaggcattgtcaagaaccattttcatgagaggtggtgtgcaaaaaggtagaataaaagagttctttcaaca

SEQ ID NO: 314498 - DNA, 3850 bp, Homo sapiens
catccgtgcgtctgtggaaggctgcgtttccggcctgagaaaccgtcatgtttctggggagtcacctcagctggcagttaccaccgtgttagaaagcagcctcaggaccggccacctccatcactggcgtcaccatgggggctgtgctgggtgtcttctccctcgccagctgggttccatgcctctgcagcggtgcctcatgtttgctgtgtagttgctgtcctaacagtaagaattccacggtgactcgcctcatttatgctttcattctcctcctgagcactgtcgtatcctatatcatgcagagaaaagagatggaaacttacttgaagaagattcctggattttgtgaagggggatttaaaatccatgaggctgatataaatgcagataaagattgtgatgtgctggttggttataaagctgtgtatcggatcagctttgccatggccatctttttctttgtcttttctctgctcatgttcaaagtaaaaacaagtaaagatctccgagcggcagtacacaatgggttttggttcttcaaaattgctgcccttattggaatcatggttggctctttctacatccctgggggctatttcagctcagtctggtttgttgttggcatgataggggccgccctcttcatcctcattcagctggtgctgctggtagattttgctcattcttggaatgaatcatgggtaaatcgaatggaagaaggaaacccaaggttgtggtatgctgctttactgtctttcacaagcgccttttatatcctgtcaatcatctgtgtcgggctgctctatacatattacaccaaaccagatggctgcacagaaaacaagttcttcatcagtattaacctgatcctttgcgttgtggcttctattatatcgatccacccaaaaattcaggaacaccagcctcgctccggcctcttgcagtcctccctcatcaccctctacactatgtacctcacctggtcagccatgtccaatgaacctgatcgttcctgcaatcccaacctgatgagctttattacacgcataactgcaccaaccctggctcctggaaattcaactgctgtggtccctacccctactccaccatcaaagagtgggtctttactggattcagataattttattggactgtttgtctttgttctctgcctcttgtattctagcatccgcacttccactaatagccaagtagacaagctgaccctgtcagggagtgacagcgtcatccttggtgatacaactaccagtggtgccagtgatgaagaagatggacagcctcggcgggctgtggacaacgagaaagagggagtgcagtatagctactccttattccacctcatgctctgcttggcttccttgtacatcatgatgaccctgaccagctggtacagccctgatgcaaagtttcagagcatgaccagcaagtggccagctgtgtgggtcaagatcagctccagctgggtctgcctcctgctttacgtctggacccttgtggctccacttgtcctcaccagtcgggacttcagctgaacctctgagtgccaaggacaccactggaactcacaaaggtctccttcaccgaaaacccatataccttttaagtttgtttcaactaaaatattaagtgaatgctttgcaagtttgactgtatgcaggtttatatcagaaggtgagattgaataatgcttgatgcagaatcgaaacttctcatttatctgtatattatgtttacttctaaggatatagcacaaagggaacattttttgtttaaagtgaactacagctgtgctgtgaagagagttctttataaagcctgtaggttcttttaactttggtttaaaatgtaagataggaaaatgttggatatttgaggccatgcttaatatatttatattgcagtatcctttaaaagcaaaaaaaaaaaaatgcatttatattacagttttcctctatgaaagtccttacttatatgatacaagcactgtgttttgtgcttaaactcttcagcggggtagcatcaaagttcttggggaaggatcgtatatgtgggtcccttccctagaagaatggttgctgatatggctactgcttctacatcttgagttttttaatttactttttttacactgtagcattgagactgcttgattcaagtctggtgctttgccagatgtattaatttccataaatgctttgtgagtttggttaaaatgaagattcacttgggaaaacactgcagctttagtctgtgttactatcttgttatgagtatgtaaaagtaaaatgcatgtgaatttatcatatttgcactatgaaggtatttggttaaaatacaaagacttttaagattttaaggccctttcttccaacagcttttatagttagcagccattctttattttctggatagccaggttttatcacgcttctagtcaggatgctcctattccttctaaaaattacggtctgactagtgagcaaagtcttgaatttattcaaaagtcctaaataccttctctaggtaagacacttggtagatgagagacggaaggcattgtcaagaaccattttcatgagaggtggtgtgcaaaaaggtagaataaaagagttctttcaacaaagatttactgtctattctgtactagaccctgtaggttttggggtacagtgttaaacatgatagaggctctgccgtcttggactttaatagcttagagaagagagcaaatgagctgacaggtggttataatgtgaattagtgctgtggtttaggaattggagagaactcaaaggagaggtatttggtgtaatggtaggctttctggagaaaatgatatttaagccaagaactcttagaagttagctaagagagagatgggaaaatgagacgacattgctggagtagataaaactgcatgttaaaggcaggaagatggggaaaaaaagttcagtaaagctggaatggggaaatgtagtcagggactgaattttaaagggctttatcaacctcagtaaagagtttggaccttatgttgagggtggctgaaaacatattcatagtgtcatgaacaaattttatcttcagtcacttgggctgatatatagagaatggatttagagagatgagaccaggtgcagtccatatgagatgtgaaatagagaagtggaatcgtagggacggggagaaattgacaggtgagggctacttagcaattagaatttttttttttcaattttaatttttttttttgagacggagtcttgctctgtcgcccaggctggagtgcaatggtgcgatctccgctcactgcaggctccgcctcccgggttcacgccattctcccgcctcagcctccctagtagctgggactacaggcacccaccaccacgcctggctaattttttttgtatttttagtagagacagggtttcaccatgttagccaggatggtctcgatctcctgacctcgtgatccacctgccgcggcctcccaaagttctaggattactggcatgagccaccgtgcctggccagcaattagaattttaacactggcagttatgaataatatgaaggagaggtagatttctgagtgattctggtttaaccagctgggtggatggtggttccacgtattcaggtggcagctttttgtgagggtcagtttggccgataaacacgtctgtgcctgcaagacagttatgaagttgagaggataaggaggtgtcggcagggagaggcatggcctcactcactgcttcacgagtgaaagaccgtgtctggattaaggaggggaggtaattcctgagtggctcagagtctg

SEQ ID NO: 314499 - DNA, 2379 bp, Homo sapiens
catccgtgcgtctgtggaaggctgcgtttccggcctgagaaaccgtcatgtttctggggagtcacctcagctggcagttaccaccgtgttagaaagcagcctcaggaccggccacctccatcactggcgtcaccatgggggctgtgctgggtgtcttctccctcgccagctgggttccatgcctctgcagcggtgcctcatgtttgctgtgtagttgctgtcctaacagtaagaattccacggtgactcgcctcatttatgctttcattctcctcctgagcactgtcgtatcctatatcatgcagagaaaagagatggaaacttacttgaagaagattcctggattttgtgaagggggatttaaaatccatgaggctgatataaatgcagataaagattgtgatgtgctggttggttataaagctgtgtatcggatcagctttgccatggccatctttttctttgtcttttctctgctcatgttcaaagtaaaaacaagtaaagatctccgagcggcagtacacaatgggttttggttcttcaaaattgctgcccttattggaatcatggttggctctttctacatccctgggggctatttcagctcagtctggtttgttgttggcatgataggggccgccctcttcatcctcattcagctggtgctgctggtagattttgctcattcttggaatgaatcatgggtaaatcgaatggaagaaggaaacccaaggttgtggtatgctgctttactgtctttcacaagcgccttttatatcctgtcaatcatctgtgtcgggctgctctatacatattacaccaaaccagatggctgcacagaaaacaagttcttcatcagtattaacctgatcctttgcgttgtggcttctattatatcgatccacccaaaaattcaggaacaccagcctcgctccggcctcttgcagtcctccctcatcaccctctacactatgtacctcacctggtcagccatgtccaatgaacctgatcgttcctgcaatcccaacctgatgagctttattacacgcataactgcaccaaccctggctcctggaaattcaactgctgtggtccctacccctactccaccatcaaagagtgggtctttactggattcagataattttattggactgtttgtctttgttctctgcctcttgtattctagcatccgcacttccactaatagccaagtagacaagctgaccctgtcagggagtgacagcgtcatccttggtgatacaactaccagtggtgccagtgatgaagaagatggacagcctcggcgggctgtggacaacgagaaagagggagtgcagtatagctactccttattccacctcatgctctgcttggcttccttgtacatcatgatgaccctgaccagctggtacagccctgatgcaaagtttcagagcatgaccagcaagtggccagctgtgtgggtcaagatcagctccagctgggtctgcctcctgctttacgtctggacccttgtggctccacttgtcctcaccagtcgggacttcagctgaacctctgagtgccaaggacaccactggaactcacaaaggtctccttcaccgaaaacccatataccttttaagtttgtttcaactaaaatattaagtgaatgctttgcaagtttgactgtatgcaggtttatatcagaaggtgagattgaataatgcttgatgcagaatcgaaacttctcatttatctgtatattatgtttacttctaaggatatagcacaaagggaacattttttgtttaaagtgaactacagctgtgctgtgaagagagttctttataaagcctgtaggttcttttaactttggtttaaaatgtaagataggaaaatgttggatatttgaggccatgcttaatatatttatattgcagtatcctttaaaagcaaaaaaaaaaaaatgcatttatattacagttttcctctatgaaagtccttacttatatgatacaagcactgtgttttgtgcttaaactcttcagcggggtagcatcaaagttcttggggaaggatcgtatatgtgggtcccttccctagaagaatggttgctgatatggctactgcttctacatcttgagttttttaatttactttttttacactgtagcattgagactgcttgattcaagtctggtgctttgccagatgtattaatttccataaatgctttgtgagtttggttaaaatgaagattcacttgggaaaacactgcagctttagtctgtgttactatcttgttatgagtatgtaaaagtaaaatgcatcgcatggatcataccagccctgagcatggtaatttcggactggccataccacgacgctttcaga

SEQ ID NO: 314500 - DNA, 4514 bp, Homo sapiens
catccgtgcgtctgtggaaggctgcgtttccggcctgagaaaccgtcatgtttctggggagtcacctcagctggcagttaccaccgtgttagaaagcagcctcaggaccggccacctccatcactggcgtcaccatgggggctgtgctgggtgtcttctccctcgccagctggaaaatcctggtgagttgaaggccaggcatggtggctcacgccaggatggtctcaatctcctgacctcgtgatccgccggcctcccagagtgcttggattacaggttccatgcctctgcagcggtgcctcatgtttgctgtgtagttgctgtcctaacagtaagaattccacggtgactcgcctcatttatgctttcattctcctcctgagcactgtcgtatcctatatcatgcagagaaaagagatggaaacttacttgaagaagattcctggattttgtgaagggggatttaaaatccatgaggctgatataaatgcagataaagattgtgatgtgctggttggttataaagctgtgtatcggatcagctttgccatggccatctttttctttgtcttttctctgctcatgttcaaagtaaaaacaagtaaagatctccgagcggcagtacacaatgggttttggttcttcaaaattgctgcccttattggaatcatggttggctctttctacatccctgggggctatttcagctcagtctggtttgttgttggcatgataggggccgccctcttcatcctcattcagctggtgctgctggtagattttgctcattcttggaatgaatcatgggtaaatcgaatggaagaaggaaacccaaggttgtggtatgctgctttactgtctttcacaagcgccttttatatcctgtcaatcatctgtgtcgggctgctctatacatattacaccaaaccagatggctgcacagaaaacaagttcttcatcagtattaacctgatcctttgcgttgtggcttctattatatcgatccacccaaaaattcaggaacaccagcctcgctccggcctcttgcagtcctccctcatcaccctctacactatgtacctcacctggtcagccatgtccaatgaacctgatcgttcctgcaatcccaacctgatgagctttattacacgcataactgcaccaaccctggctcctggaaattcaactgctgtggtccctacccctactccaccatcaaagagtgggtctttactggattcagataattttattggactgtttgtctttgttctctgcctcttgtattctagcatccgcacttccactaatagccaagtagacaagctgaccctgtcagggagtgacagcgtcatccttggtgatacaactaccagtggtgccagtgatgaagaagatggacagcctcggcgggctgtggacaacgagaaagagggagtgcagtatagctactccttattccacctcatgctctgcttggcttccttgtacatcatgatgaccctgaccagctggtacagccctgatgcaaagtttcagagcatgaccagcaagtggccagctgtgtgggtcaagatcagctccagctgggtctgcctcctgctttacgtctggacccttgtggctccacttgtcctcaccagtcgggacttcagctgaacctctgagtgccaaggacaccactggaactcacaaaggtctccttcaccgaaaacccatataccttttaagtttgtttcaactaaaatattaagtgaatgctttgcaagtttgactgtatgcaggtttatatcagaaggtgagattgaataatgcttgatgcagaatcgaaacttctcatttatctgtatattatgtttacttctaaggatatagcacaaagggaacattttttgtttaaagtgaactacagctgtgctgtgaagagagttctttataaagcctgtaggttcttttaactttggtttaaaatgtaagataggaaaatgttggatatttgaggccatgcttaatatatttatattgcagtatcctttaaaagcaaaaaaaaaaaaatgcatttatattacagttttcctctatgaaagtccttacttatatgatacaagcactgtgttttgtgcttaaactcttcagcggggtagcatcaaagttcttggggaaggatcgtatatgtgggtcccttccctagaagaatggttgctgatatggctactgcttctacatcttgagttttttaatttactttttttacactgtagcattgagactgcttgattcaagtctggtgctttgccagatgtattaatttccataaatgctttgtgagtttggttaaaatgaagattcacttgggaaaacactgcagctttagtctgtgttactatcttgttatgagtatgtaaaagtaaaatgcatgtgaatttatcatatttgcactatgaaggtatttggttaaaatacaaagacttttaagattttaaggccctttcttccaacagcttttatagttagcagccattctttattttctggatagccaggttttatcacgcttctagtcaggatgctcctattccttctaaaaattacggtctgactagtgagcaaagtcttgaatttattcaaaagtcctaaataccttctctaggtaagacacttggtagatgagagacggaaggcattgtcaagaaccattttcatgagaggtggtgtgcaaaaaggtagaataaaagagttctttcaacaaagatttactgtctattctgtactagaccctgtaggttttggggtacagtgttaaacatgatagaggctctgccgtcttggactttaatagcttagagaagagagcaaatgagctgacaggtggttataatgtgaattagtgctgtggtttaggaattggagagaactcaaaggagaggtatttggtgtaatggtaggctttctggagaaaatgatatttaagccaagaactcttagaagttagctaagagagagatgggaaaatgagacgacattgctggagtagataaaactgcatgttaaaggcaggaagatggggaaaaaaagttcagtaaagctggaatggggaaatgtagtcagggactgaattttaaagggctttatcaacctcagtaaagagtttggaccttatgttgagggtggctgaaaacatattcatagtgtcatgaacaaattttatcttcagtcacttgggctgatatatagagaatggatttagagagatgagaccaggtgcagtccatatgagatgtgaaatagagaagtggaatcgtagggacggggagaaattgacaggtgagggctacttagcaattagaatttttttttttcaattttaatttttttttttgagacggagtcttgctctgtcgcccaggctggagtgcaatggtgcgatctccgctcactgcaggctccgcctcccgggttcacgccattctcccgcctcagcctccctagtagctgggactacaggcacccaccaccacgcctggctaattttttttgtatttttagtagagacagggtttcaccatgttagccaggatggtctcgatctcctgacctcgtgatccacctgccgcggcctcccaaagttctaggattactggcatgagccaccgtgcctggccagcaattagaattttaacactggcagttatgaataatatgaaggagaggtagatttctgagtgattctggtttaaccagctgggtggatggtggttccacgtattcaggtggcaaacaggaaaaacatgtgttcgaagaagaatggaggtaggtggtctcttaagaatggttaagaggcttgggagtcagactgcttgggtttgcatcccagctttgccgttttctggctatcaaacttgtcagctattatttgttgagtacgtactatttgatttatgaccacaggcagctgagcctcagtgttggtgcctagtgtacaagattgttaaagaataaagttattttgcaaagtgtaacccatttttagcactgacatagcactgacagtagctgctgatctcattatgggctaaaataagacaatattcaaaggtcagagatatctagccagaatctgatggaggctggatttcagattttgttacagaattagacagaggaacacagaggggacaggctcagttagggtggaggtgtggggtagggaagcaggacttgatataaattattggaatcattgtcttttaaaccagtggtttatgtcagggtatagcgtttcaagggatttgagggtcagatggggaaatgtagccccttattttgccagtgtgaagcagataccctgcttttctttacagtagcggagtcagcttaagagctttaaaggtcctaaacttcaaaaacattacagtgccccatcctccgccttaatgtaattcaaaatacaaacaatactaaactgtaaaataaatgtaacaaagtccaataaagtttttatttttttctcatga

SEQ ID NO: 314501 - DNA, 1958 bp, Homo sapiens
catccgtgcgtctgtggaaggctgcgtttccggcctgagaaaccgtcatgtttctggggagtcacctcagctggcagttaccaccgtgttagaaagcagcctcaggaccggccacctccatcactggcgtcaccatgggggctgtgctgggtgtcttctccctcgccagctgggttccatgcctctgcagcggtgcctcatgtttgctgtgtagttgctgtcctaacagtaagaattccacggtgactcgcctcatttatgctttcattctcctcctgagcactgtcgtatcctatatcatgcagagaaaagagatggaaacttacttgaagaagattcctggattttgtgaagggggatttaaaatccatgaggctgatataaatgcagataaagattgtgatgtgctggttggttataaagctgtgtatcggatcagctttgccatggccatctttttctttgtcttttctctgctcatgttcaaagtaaaaacaagtaaagatctccgagcggcagtacacaatgggttttggttcttcaaaattgctgcccttattggaatcatggttggctctttctacatccctgggggctatttcagctcagtctggtttgttgttggcatgataggggccgccctcttcatcctcattcagctggtgctgctggtagattttgctcattcttggaatgaatcatgggtaaatcgaatggaagaaggaaacccaaggttgtggtatgctgctttactgtctttcacaagcgccttttatatcctgtcaatcatctgtgtcgggctgctctatacatattacaccaaaccagatggctgcacagaaaacaagttcttcatcagtattaacctgatcctttgcgttgtggcttctattatatcgatccacccaaaaattcaggaacaccagcctcgctccggcctcttgcagtcctccctcatcaccctctacactatgtacctcacctggtcagccatgtccaatgaacctgatcgttcctgcaatcccaacctgatgagctttattacacgcataactgcaccaaccctggctcctggaaattcaactgctgtggtccctacccctactccaccatcaaagagtgggtctttactggattcagataattttattggactgtttgtctttgttctctgcctcttgtattctagcatccgcacttccactaatagccaagtagacaagctgaccctgtcagggagtgacagcgtcatccttggtgatacaactaccagtggtgccagtgatgaagaagatggacagcctcggcgggctgtggacaacgagaaagagggagtgcagtatagctactccttattccacctcatgctctgcttggcttccttgtacatcatgatgaccctgaccagctggtacagccctgatgcaaagtttcagagcatgaccagcaagtggccagctgtgtgggtcaagatcagctccagctgggtctgcctcctgctttacgtctggacccttgtggctccacttgtcctcaccagtcgggacttcagctgaacctctgagtgccaaggacaccactggaactcacaaaggtctccttcaccgaaaacccatataccttttaagtttgtttcaactaaaatattaagtgaatgctttgcaagtttgactgtatgcaggtttatatcagaaggtgagattgaataatgcttgatgcagaatcgaaacttctcatttatctgtatattatgtttacttctaaggatatagcacaaagggaacattttttgtttaaagtgaactacagctgtgctgtgaagagagttctttataaagcctgtaggttcttttaactttggtttaaaatgtaagataggaaaatgttggatataaacaatactaaactgtaaaataaatgtaacaaagtccaataaagtttttatttttttctcatga

SEQ ID NO: 314502 - DNA, 3734 bp, Homo sapiens
ctggcattaacagggatgccttatctcacaggattctactcaaaagaccttattattgaagcagcaaacactttactgtctttcacaagcgccttttatatcctgtcaatcatctgtgtcgggctgctctatacatattacaccaaaccagatggctgcacagaaaacaagttcttcatcagtattaacctgatcctttgcgttgtggcttctattatatcgatccacccaaaaattcaggaacaccagcctcgctccggcctcttgcagtcctccctcatcaccctctacactatgtacctcacctggtcagccatgtccaatgaacctgatcgttcctgcaatcccaacctgatgagctttattacacgcataactgcaccaaccctggctcctggaaattcaactgctgtggtccctacccctactccaccatcaaagagtgggtctttactggattcagataattttattggactgtttgtctttgttctctgcctcttgtattctagcatccgcacttccactaatagccaagtagacaagctgaccctgtcagggagtgacagcgtcatccttggtgatacaactaccagtggtgccagtgatgaagaagatggacagcctcggcgggctgtggacaacgagaaagagggagtgcagtatagctactccttattccacctcatgctctgcttggcttccttgtacatcatgatgaccctgaccagctggtacagccctgatgcaaagtttcagagcatgaccagcaagtggccagctgtgtgggtcaagatcagctccagctgggtctgcctcctgctttacgtctggacccttgtggctccacttgtcctcaccagtcgggacttcagctgaacctctgagtgccaaggacaccactggaactcacaaaggtctccttcaccgaaaacccatataccttttaagtttgtttcaactaaaatattaagtgaatgctttgcaagtttgactgtatgcaggtttatatcagaaggtgagattgaataatgcttgatgcagaatcgaaacttctcatttatctgtatattatgtttacttctaaggatatagcacaaagggaacattttttgtttaaagtgaactacagctgtgctgtgaagagagttctttataaagcctgtaggttcttttaactttggtttaaaatgtaagataggaaaatgttggatatttgaggccatgcttaatatatttatattgcagtatcctttaaaagcaaaaaaaaaaaaatgcatttatattacagttttcctctatgaaagtccttacttatatgatacaagcactgtgttttgtgcttaaactcttcagcggggtagcatcaaagttcttggggaaggatcgtatatgtgggtcccttccctagaagaatggttgctgatatggctactgcttctacatcttgagttttttaatttactttttttacactgtagcattgagactgcttgattcaagtctggtgctttgccagatgtattaatttccataaatgctttgtgagtttggttaaaatgaagattcacttgggaaaacactgcagctttagtctgtgttactatcttgttatgagtatgtaaaagtaaaatgcatgtgaatttatcatatttgcactatgaaggtatttggttaaaatacaaagacttttaagattttaaggccctttcttccaacagcttttatagttagcagccattctttattttctggatagccaggttttatcacgcttctagtcaggatgctcctattccttctaaaaattacggtctgactagtgagcaaagtcttgaatttattcaaaagtcctaaataccttctctaggtaagacacttggtagatgagagacggaaggcattgtcaagaaccattttcatgagaggtggtgtgcaaaaaggtagaataaaagagttctttcaacaaagatttactgtctattctgtactagaccctgtaggttttggggtacagtgttaaacatgatagaggctctgccgtcttggactttaatagcttagagaagagagcaaatgagctgacaggtggttataatgtgaattagtgctgtggtttaggaattggagagaactcaaaggagaggtatttggtgtaatggtaggctttctggagaaaatgatatttaagccaagaactcttagaagttagctaagagagagatgggaaaatgagacgacattgctggagtagataaaactgcatgttaaaggcaggaagatggggaaaaaaagttcagtaaagctggaatggggaaatgtagtcagggactgaattttaaagggctttatcaacctcagtaaagagtttggaccttatgttgagggtggctgaaaacatattcatagtgtcatgaacaaattttatcttcagtcacttgggctgatatatagagaatggatttagagagatgagaccaggtgcagtccatatgagatgtgaaatagagaagtggaatcgtagggacggggagaaattgacaggtgagggctacttagcaattagaatttttttttttcaattttaatttttttttttgagacggagtcttgctctgtcgcccaggctggagtgcaatggtgcgatctccgctcactgcaggctccgcctcccgggttcacgccattctcccgcctcagcctccctagtagctgggactacaggcacccaccaccacgcctggctaattttttttgtatttttagtagagacagggtttcaccatgttagccaggatggtctcgatctcctgacctcgtgatccacctgccgcggcctcccaaagttctaggattactggcatgagccaccgtgcctggccagcaattagaattttaacactggcagttatgaataatatgaaggagaggtagatttctgagtgattctggtttaaccagctgggtggatggtggttccacgtattcaggtggcaaacaggaaaaacatgtgttcgaagaagaatggaggtaggtggtctcttaagaatggttaagaggcttgggagtcagactgcttgggtttgcatcccagctttgccgttttctggctatcaaacttgtcagctattatttgttgagtacgtactatttgatttatgaccacaggcagctgagcctcagtgttggtgcctagtgtacaagattgttaaagaataaagttattttgcaaagtgtaacccatttttagcactgacatagcactgacagtagctgctgatctcattatgggctaaaataagacaatattcaaaggtcagagatatctagccagaatctgatggaggctggatttcagattttgttacagaattagacagaggaacacagaggggacaggctcagttagggtggaggtgtggggtagggaagcaggacttgatataaattattggaatcattgtcttttaaaccagtggtttatgtcagggtatagcgtttcaagggatttgagggtcagatggggaaatgtagccccttattttgccagtgtgaagcagataccctgcttttctttacagtagcggagtcagcttaagagctttaaaggtcctaaacttcaaaaacattacagtgccccatcctccgccttaatgtaattcaaaatacaaacaatactaaactgtaaaataaatgtaacaaagtccaataaagtttttatttttttctcatga

SEQ ID NO: 314503 - DNA, 1739 bp, Homo sapiens
catccgtgcgtctgtggaaggctgcgtttccggcctgagaaaccgtcatgtttctggggagtcacctcagctggcagttaccaccgtgttagaaagcagcctcaggaccggccacctccatcactggcgtcaccatgggggctgtgctgggtgtcttctccctcgccagctgggttccatgcctctgcagcggtgcctcatgtttgctgtgtagttgctgtcctaacagtaagaattccacggtgactcgcctcatttatgctttcattctcctcctgagcactgtcgtatcctatatcatgcagagaaaagagatggaaacttacttgaagaagattcctggattttgtgaagggggatttaaaatccatgaggctgatataaatgcagataaagattgtgatgtgctggttggttataaagctgtgtatcggatcagctttgccatggccatctttttctttgtcttttctctgctcatgttcaaagtaaaaacaagtaaagatctccgagcggcagtacacaatgggttttggttcttcaaaattgctgcccttattggaatcatggttggctctttctacatccctgggggctatttcagctcagtctggtttgttgttggcatgataggggccgccctcttcatcctcattcagctggtgctgctggtagattttgctcattcttggaatgaatcatgggtaaatcgaatggaagaaggaaacccaaggttgtggtatgctgctttactgtctttcacaagcgccttttatatcctgtcaatcatctgtgtcgggctgctctatacatattacaccaaaccagatggctgcacagaaaacaagttcttcatcagtattaacctgatcctttgcgttgtggcttctattatatcgatccacccaaaaattcaggaacaccagcctcgctccggcctcttgcagtcctccctcatcaccctctacactatgtacctcacctggtcagccatgtccaatgaacctgatcgttcctgcaatcccaacctgatgagctttattacacgcataactgcaccaaccctggctcctggaaattcaactgctgtggtccctacccctactccaccatcaaagagtgggtctttactggattcagataattttattggactgtttgtctttgttctctgcctcttgtattctagcatccgcacttccactaatagccaagtagacaagctgaccctgtcagggagtgacagcgtcatccttggtgatacaactaccagtggtgccagtgatgaagaagatggacagcctcggcgggctgtggacaacgagaaagagggagtgcagtatagctactccttattccacctcatgctctgcttggcttccttgtacatcatgatgaccctgaccagctggtacagccctgatgcaaagtttcagagcatgaccagcaagtggccagctgtgtgggtcaagatcagctccagctgggtctgcctcctgctttacgtctggacccttgtggctccacttgtcctcaccagtcgggacttcagctgaacctctgagtgccaaggacaccactggaactcacaaaggcacccaactcagtgatgtcctaattactgctggatgactcaagccacaccatgcctatgttctcaggtgaagaagaataatagaaaccacatagatgggtaggtgtaccaagcattaaacagacagtatccacaaaaaagtaag

SEQ ID NO: 314504 - DNA, 885 bp, Homo sapiens
catccgtgcgtctgtggaaggctgcgtttccggcctgagaaaccgtcatgtttctggggagtcacctcagctggcagttaccaccgtgttagaaagcagcctcaggaccggccacctccatcactggcgtcaccatgggggctgtgctgggtgtcttctccctcgccagctgggttccatgcctctgcagcggtgcctcatgtttgctgtgtagttgctgtcctaacagtaagaattccacggtgactcgcctcatttatgctttcattctcctcctgagcactgtcgtatcctatatcatgcagagaaaagagatggaaacttacttgaagaagattcctggattttgtgaagggggatttaaaatccatgaggctgatataaatgcagataaagattgtgatgtgctggttggttataaagctgtgtatcggatcagctttgccatggccatctttttctttgtcttttctctgctcatgttcaaagtaaaaacaagtaaagatctccgagcggcagtacacaatgggttttggttcttcaaaattgctgcccttattggaatcatggttggctctttctacatccctgggggctatttcagctcagtctggtttgttgttggcatgataggggccgccctcttcatcctcattcagctggtgctgctggtagattttgctcattcttggaatgaatcatgggtaaatcgaatggaagaaggccaggtgtggatgctgttactgtcttccagcgcttatatctgctggtcggctgctttcattaacacagatgtgcgaacaagttccaataacgactggggggttattgcctgacagccgctgagctcacatatcgcttattgcctttatctgcacgatcttt

SEQ ID NO: 314505 - DNA, 719 bp, Homo sapiens
catccgtgcgtctgtggaaggctgcgtttccggcctgagaaaccgtcatgtttctggggagtcacctcagctggcagttaccaccgtgttagaaagcagcctcaggaccggccacctccatcactggcgtcaccatgggggctgtgctgggtgtcttctccctcgccagctgggttccatgcctctgcagcggtgcctcatgtttgctgtgtagttgctgtcctaacagtaagaattccacggtgactcgcctcatttatgctttcattctcctcctgagcactgtcgtatcctatatcatgcagagaaaagagatggaaacttacttgaagaagattcctggattttgtgaagggggatttaaaatccatgaggctgatataaatgcagataaagattgtgatgtgctggttggttataaagctgtgtatcggatcagctttgccatggccatctttttctttgtcttttctctgctcatgttcaaagtaaaaacaagtaaagatctccgagcggcagtacacaatgggttttggttcttcaaaattgctgcccttattggaatcatggttggctctttctacatccctgggggctatttcagctcagggccattcaacgcgaggcgttgaatggccattcaacgcctccgggccattcaacgcctccgggccattcaagcgcctccgggccattcaagcgcctccgggcacatacaa

SEQ ID NO: 314506 - DNA, 584 bp, Homo sapiens
  misc_feature (584)..(584): n is a, c, g, or t
catccgtgcgtctgtggaaggctgcgtttccggcctgagaaaccgtcatgtttctggggagtcacctcagctggcagttaccaccgtgttagaaagcagcctcaggaccggccacctccatcactggcgtcaccatgggggctgtgctgggtgtcttctccctcgccagctgggttccatgcctctgcagcggtgcctcatgtttgctgtgtagttgctgtcctaacagtaagaattccacggtgactcgcctcatttatgctttcattctcctcctgagcactgtcgtatcctatatcatgcagagaaaagagatggaaacttacttgaagaagattcctggattttgtgaagggggatttaaaatccatgaggctgatataaatgcagataaagattgtgatgtgctggttggttataaagctgtgtatcggatcagctttgccatggccatctttttctttgtcttttctctgctcatgttcaaagtaaaaacaagtaaagatctccgagcggcagtacacaatgggtttgggtcttttttagctctctggtttggtggtcgcatgataggcgccgccttn

SEQ ID NO: 314507 - DNA, 1737 bp, Homo sapiens
tagatgacgggcacgaggacttggggccccacagcttgtagtagagcagctagggttcaaaaccaatcgtgctggctccaaaacccatggtgtttctacagcagccctttgccctccactgtcccctgcttctcccagcctcactctacacaagaccagaaggactggtctgtctctgactgatgcatgtcaccctcctttaacttcaggtggggcacaggagtctgtcaaataaaagaatatcggagaactgatattccacgtgcatcttcgtcctgagggctgcaccttgaaggaggggctacagggctgataaatgtccagatccagtcaggaaataaacccatgtctcaagaaggccgtagaacaggggtaggcggctggggagaaggactgaagcagtggagctagatagctgcagctttgggggacactgcatactctgcagctcactgcttctgggactgagaccagacgcgtgtgtccccaggctgcacgttcttcatgtggtgcaggtgaaaggagatgctggtgtatgtgaagcatgcgtgaagggacagtgagcacacaagggccaggccatcggttggggccggggggcaggggcacactacatactgctttctgacaccccaggcccaaaggtgctgctggtttaatggtaattaagcagattagccaccttctgttttatttaccacagttaccagctcagcaggtggtcacagaggaggtgctggcattgaggacagggtttaacttcagtcagccacggctcgttgaagctgctgggtgtgtttgcccgggtctgtttagcctcacgcagatgcctgctcccatctgtcactctttaaaatgctcttagtgaaagcctaaaatgtaaacagaggctgtgaaagcatatcacattcctatctttctctccagcctttgtagacctgcctgatttaatgcagcatcttgacaacaactttaaatactggaaaggactggacgaaatgaagctgcggaacctccgaccacctcctgaatagtgggagacaccacccagagccctgaagctttgttccttcggtcatttggaattcctgagggcagccagagctccttggtcctttcagtactaggcagaacagcccccgatctgcatagcctgtgaaagcccacggggacatcagtaaccttctgcagccaccatccaatgccattactgtcaagtgagacttggccactgtagcctgggcctgctgcaggagctcttcagaaaggcacatgaggaccacggtttgcctcagtttctggtaaaacacaaggtctggagtgcccctgcaaagggtattgatggacttcctgccagtgacagagcatgtctattgcaaacaattctctcagttacgttcagcacttaagaacggctaatggcaataggatctttagcaactttttcacatcatagaaggtgcaatcgctcacttgggaacactactgagagtgacttctcttttaaaattgagtagcagatgaaaaattaaaatttgaacttgattattaatatcaattaaaatgttttatttattttattaaaagctcaatattttctatgaattcaaaaatacttcagagccaaagccaacttcaaataccgtgaccaaatttacatgattcatattcattatgcattacttggtatacagacttattttcataatgcaaattaataaaatgacacttttactg

SEQ ID NO: 314508 - DNA, 1582 bp, Homo sapiens
gaagccttcacacatcccagaagggcctcaagccatttagttcacctcagaagccggtagtggccacataatggtcccttctggcccccagtctggctattcttcccctcccaaacacaggggcagaggctaagccccctcttccacttcagcaggtgggagttatgagaggaggaagtaagggggagtgccctttatttgggggtccaggacccctcttgtctgcagatggccactgaaaatatatgaccacttagactatggtgacctgacttttgtcagcaactcagaaggaggtggactttggaagttaagaaagaattgtcctattacctgaaatcagtttggggttgggatcattttttatcttaattgctttagcaatgtaagtgaatcagaactgaagtggaaaatgttcttgggtttatgttttcaacacaaagtatgacgatgcttacattccatttataggagtggcaaggaatttactatgccaaaaagaaaaacggagataatatacaacaaaatgtgaagataatacctgtcattggacagggagggtaagtggaaaaaacaagtacatcaatcaacatacagtgttttgggttattgcagaatttgctttgaatatttaagttaaggactgctgacagaagtgtcaaggtcaggtgtcatcacagaatggccttccagcatagtgttttcttggtgacttcctcatggctacagtctgaccctctacttgcagcccagagccaacatactctgggcagtcttgtttaagctgcgtggatacacaagaaactgaagtatttgtttaagtcagaatgtcactttagtaagttgtgtgataatactgactggtagactccctatattgaaaagattttttatctaatttgataggctatgtattatttctgcagagacctatcaaattagataaaaatattttaaatactaacagttatggacattcctatataaaacagatgtgactgtagattggaaaccagtatatatcaggagcctaaaactttcagacagtttatctcagaaacctatcttaaagaaataatatggtaagatgaaaattatgaatatgaattatagaacacctaaaatattgcagccattagaaatgatgatcatattcacaggttctaagatgagggccaaaaaaagtagaaatgatgatcatagaaaattaaattacctcatgcctgtaatcccagcactttgggaggccaaggtgggaaaatcccttgagcccaggagtttgggatccgcctgagcaatatagtgagacccccatccctacaaaaaatgtaaaaattagctaggtgtggtgacacacacctatcagttacttcagggggccgatgtgggagaatcgcttgatcttgggaggtcgaggctgcagtgagctatgatcatgccactgtactccagcctgggcaacaaagtaagacactgtctcaaaaggaaaaaaaaaaataaaatatgagaaaggttatgatacaatgttaaatgcaaaaagtaaaatgtaaaatgatagctagtgtttaatctcaatcatgta

SEQ ID NO: 314509 - DNA, 1097 bp, Homo sapiens
  misc_feature (237)..(237): n is a, c, g, or t
gatggagggaagagtcgggatcgataagaaagggattggggacatgtggtcactagcgcttgatgagaattccatgttcgatgttacaggatggccgtttacgagccgaagggatgaggtagccatgtatggtgatgcgtattccctcatagacctggcaagcactgaatccacaacgtatttgcctagaacttaccatatggattgctcgaggagctgtcctcagactctccctgnacagtgctcgcatgacaggttacatagttttctggtgtggtggatgcccagcaatatttcggaagaatatttttctcaggtaagttgctgcctcttttaagtttctagagagagagagagttaaaacccataaaatcatacgagataatggacttaacactaggaaatagggttctaaaaaaattctgtccttgtttgcaaggtaacaaatggtaactggtaacaaattttttttttcttaagaatattttattttccctttattcttgcaggatattttgttagatatagcatcctgggttgatgatttttttcctgaaagtacttttaaggagtcatctggtcttcatattctttctgagtagaaaaaacttctcttggggcagaaaaaaatattaggaaatatactggctaagatttttccagatttggtggagggcatatgcacatgcatatgcatacagattcaagaagcccagtgaaccttagcccatgtcagatgtgtcatagtcaagcagctaacaggctaaagataaatcttgcaatcagccagaggaaaagcgacacattacttataagaaaacagtgattctcatgtcctctgacttcccatcaaaaactatgaaggccagaagacacgggaacatctttaaagtgctgttagctttgggaggatcacttgagcccaggagtcttaagagcagcctgggcaacatggtgagaccttgtctctacaaaaaaattaaaagttagccgggcatagtgatgcactcctgtagtcccaagctacttgggaggctgaggcaggaggatcgcttgaagcccaggaggttgaggctgcagtgagccatgatcatgtc

SEQ ID NO: 314510 - DNA, 346 bp, Homo sapiens
gcgtggtggctcatacctgtaatcccagcactttgggaggtcgaggtaggaggaccccttgggcccaggagttcaagaccagcctgggcaacataaggagaacctgcctcaatcgtacttaaaaaaaaaattactgtccttgttttacagtttggtttaactttataatctgctaatctaatctataatagttcatagtctctcaaaactatgcctgctaaggtcatctaaacataataaaatctcctttaatggcattttcactaaaaattataccacaggatgtattgttatgatgctgacatgtatacatgcaactttttaagctagttcaaggattctggaa

SEQ ID NO: 314511 - DNA, 3865 bp, Homo sapiens
acgcgagatccgcgctcgccgccgcccgcccaggcggcgatgacacggcgcccgcggcggcccggaggcgccgggtgggccgtttgctgaccggatcgcggctacccgccagcgtgtccgcggcgccgccgccagcatgggctgtgccccgagcatccacatttccgagcgcctggtggccgaggacgcgcctagccccgcggcaccgccgctgtcgtccggcgggccgcgcctcccgcagggccagaagacggccgccttgccccggacccgcggcgccggcctcttggagtcggagcttcgcgacggcagcggcaagaaggtagcagtagctgatgtgcagtttggccccatgagatttcatcaagatcaacttcaggtacttttagtgtttaccaaagaagataaccaatgtaatggattctgcagggcatgtgaaaaagcagggtttaagtgtacagttaccaaggaggctcaggctgtccttgcctgtttcctggacaaacatcatgacattatcatcatagaccacagaaatcctcgacagctggatgcagaggcactgtgcaggtctatcagatcatcaaaactctcagaaaacacagttattgttggtgtagtacgcagggtggatagagaagagttgtccgtaatgcctttcatttctgctggatttacaaggaggtatgtagaaaaccccaacatcatggcctgctacaatgaactgctccagctggagtttggagaggtgcgatcacaactgaaactcagggcttgtaactcagtattcactgcattagaaaacagtgaagatgcaattgaaattacaagcgaagaccgttttatacagtatgcaaatcctgcatttgaaacaacaatgggctatcagtcaggtgaattaatagggaaggagttaggagaagtgcctataaatgaaaaaaaggctgacttgctcgatactataaattcatgcatcaggataggcaaggagtggcaaggaatttactatgccaaaaagaaaaacggagataatatacaacaaaatgtgaagataatacctgtcattggacagggaggaaaaattagacactatgtgtccattatcagagtgtgcaatggcaacaataaggctgagaaaatatccgaatgtgttcagtctgacactcatacagataatcagacaggcaaacataaagacaggagaaaaggctcactagacgtcaaagctgttgcctcccgtgcaactgaagtttccagccagagacgacactcttccatggcccggatacattccatgacaattgaggcgcccatcaccaaggtaatcaatattatcaatgctgcccaggaaagtagtcccatgcctgtgacagaagccctagaccgtgtgctggaaattctaagaaccactgagttatattcaccacagtttggtgctaaagatgatgatccccatgccaatgaccttgttgggggcttaatgtctgatggtttgcgaagactatcagggaatgaatatgttctttcaacaaaaaacactcaaatggtttcaagcaatataatcactcccatctcccttgatgatgtcccaccacggatagctcgggccatggaaaatgaggaatactgggactttgatatttttgaactggaggctgccacccacaataggcctttgatttatcttggtctcaaaatgtttgctcgctttggaatctgtgaattcttacactgctccgagtcaacgctaagatcatggttacaaattatcgaagccaattatcattcctccaatccctaccacaattctacacattctgctgatgtgcttcatgccactgcctattttctctccaaggagaggataaaggaaactttagatccaattgatgaggtcgctgcactcatcgcagccaccattcatgatgtggatcaccctgggagaaccaactccttcctgtgtaatgctggaagtgagctggccattttgtacaatgacactgctgtgctggagagccaccatgcggccttggccttccagctgaccactggagatgataaatgcaatatatttaaaaacatggagaggaatgattatcggacactgcgccaggggattatcgacatggtcttagccacagaaatgacaaagcactttgagcatgtcaacaaatttgtcaacagcatcaacaaacccttggcaacactagaagaaaatggggaaactgataaaaaccaggaagtgataaacactatgcttaggactccagagaaccggaccctaatcaaacgaatgctgattaaatgtgctgatgtgtccaatccctgccgacccctgcagtactgcatcgagtgggctgcacgcatttcggaagaatatttttctcagactgatgaagagaagcagcagggcttacctgtggtgatgccagtgtttgacagaaatacctgcagcatccccaaatcccaaatctctttcattgattacttcatcacagacatgtttgatgcttgggatgcctttgtagacctgcctgatttaatgcagcatcttgacaacaactttaaatactggaaaggactggacgaaatgaagctgcggaacctccgaccacctcctgaatagtgggagacaccacccagagccctgaagctttgttccttcggtcatttggaattcctgagggcagccagagctccttggtcctttcagtactaggcagaacagcccccgatctgcatagcctgtgaaagcccacggggacatcagtaaccttctgcagccaccatccaatgccattactgtcaagtgagacttggccactgtagcctgggcctgctgcaggagctcttcagaaaggcacatgaggaccacggtttgcctcagtttctggtaaaacacaaggtctggagtgcccctgcaaagggtattgatggacttcctgccagtgacagagcatgtctattgcaaacaattctctcagttacgttcagcacttaagaacggctaatggcaataggatctttagcaactttttcacatcatagaaggtgcaatcgctcacttgggaacactactgagagtgacttctcttttaaaattgagtagcagatgaaaaattaaaatttgaacttgattattaatatcaattaaaatgttttatttattttattaaaagctcaatattttctatgaattcaaaaatacttcagagccaaagccaacttcaaataccgtgaccaaatttacatgattcatattcattatgcattacttggtatacagacttattttcataatgcaaattaataaaatgacacttttactgcactatagaaatattcatgtatgttaaacttttctgattgaggctaactggaaaaagctggggtcgtattctaagtgctaaagaaggctgcttctactgtatagaacccagggctctgaaacagctctagccgcctaatgcacttcacaggtaactccccaaggtaaaactagactctcttgttggttcgcaaagaaaagttaggacttaacacttttttctaaaattttataattcaatttccaaaagtctactctattttatactgtttctacaaaatattccttataaaaacaaagaacaaaaattgaatatttaatgaattgacattttataaccaacctgtttttatctacggtgggaatctttgatgccagaaatttataaagaggttctgtatcttcacaccttgaataagcataataccataaaaaatgacacttgacatgtcaatgtatttgtcatttcattttaaactcgtatttgtggtttttttcccagataaaaatgaaattaaaccatttctttttaagaaa

SEQ ID NO: 314512 - DNA, 3348 bp, Homo sapiens
gaagccttcacacatcccagaagggcctcaagccatttagttcacctcagaagccggtagtggccacataatggtcccttctggcccccagtctggctattcttcccctcccaaacacaggggcagaggctaagccccctcttccacttcagcaggtgggagttatgagaggaggaagtaagggggagtgccctttatttgggggtccaggacccctcttgtctgcagatggccactgaaaatatatgaccacttagactatggtgacctgacttttgtcagcaactcagaaggaggtggactttggaagttaagaaagaattgtcctattacctgaaatcagtttggggttgggatcattttttatcttaattgctttagcaatgtaagtgaatcagaactgaagtggaaaatgttcttgggtttatgttttcaacacaaagtatgacgatgcttacattccatttataggagtggcaaggaatttactatgccaaaaagaaaaacggagataatatacaacaaaatgtgaagataatacctgtcattggacagggaggaaaaattagacactatgtgtccattatcagagtgtgcaatggcaacaataaggctgagaaaatatccgaatgtgttcagtctgacactcatacagataatcagacaggcaaacataaagacaggagaaaaggctcactagacgtcaaagctgttgcctcccgtgcaactgaagtttccagccagagacgacactcttccatggcccggatacattccatgacaattgaggcgcccatcaccaaggtaatcaatattatcaatgctgcccaggaaagtagtcccatgcctgtgacagaagccctagaccgtgtgctggaaattctaagaaccactgagttatattcaccacagtttggtgctaaagatgatgatccccatgccaatgaccttgttgggggcttaatgtctgatggtttgcgaagactatcagggaatgaatatgttctttcaacaaaaaacactcaaatggtttcaagcaatataatcactcccatctcccttgatgatgtcccaccacggatagctcgggccatggaaaatgaggaatactgggactttgatatttttgaactggaggctgccacccacaataggcctttgatttatcttggtctcaaaatgtttgctcgctttggaatctgtgaattcttacactgctccgagtcaacgctaagatcatggttacaaattatcgaagccaattatcattcctccaatccctaccacaattctacacattctgctgatgtgcttcatgccactgcctattttctctccaaggagaggataaaggaaactttagatccaattgatgaggtcgctgcactcatcgcagccaccattcatgatgtggatcaccctgggagaaccaactccttcctgtgtaatgctggaagtgagctggccattttgtacaatgacactgctgtgctggagagccaccatgcggccttggccttccagctgaccactggagatgataaatgcaatatatttaaaaacatggagaggaatgattatcggacactgcgccaggggattatcgacatggtcttagccacagaaatgacaaagcactttgagcatgtcaacaaatttgtcaacagcatcaacaaacccttggcaacactagaagaaaatggggaaactgataaaaaccaggaagtgataaacactatgcttaggactccagagaaccggaccctaatcaaacgaatgctgattaaatgtgctgatgtgtccaatccctgccgacccctgcagtactgcatcgagtgggctgcacgcatttcggaagaatatttttctcagactgatgaagagaagcagcagggcttacctgtggtgatgccagtgtttgacagaaatacctgcagcatccccaaatcccaaatctctttcattgattacttcatcacagacatgtttgatgcttgggatgcctttgtagacctgcctgatttaatgcagcatcttgacaacaactttaaatactggaaaggactggacgaaatgaagctgcggaacctccgaccacctcctgaatagtgggagacaccacccagagccctgaagctttgttccttcggtcatttggaattcctgagggcagccagagctccttggtcctttcagtactaggcagaacagcccccgatctgcatagcctgtgaaagcccacggggacatcagtaaccttctgcagccaccatccaatgccattactgtcaagtgagacttggccactgtagcctgggcctgctgcaggagctcttcagaaaggcacatgaggaccacggtttgcctcagtttctggtaaaacacaaggtctggagtgcccctgcaaagggtattgatggacttcctgccagtgacagagcatgtctattgcaaacaattctctcagttacgttcagcacttaagaacggctaatggcaataggatctttagcaactttttcacatcatagaaggtgcaatcgctcacttgggaacactactgagagtgacttctcttttaaaattgagtagcagatgaaaaattaaaatttgaacttgattattaatatcaattaaaatgttttatttattttattaaaagctcaatattttctatgaattcaaaaatacttcagagccaaagccaacttcaaataccgtgaccaaatttacatgattcatattcattatgcattacttggtatacagacttattttcataatgcaaattaataaaatgacacttttactgcactatagaaatattcatgtatgttaaacttttctgattgaggctaactggaaaaagctggggtcgtattctaagtgctaaagaaggctgcttctactgtatagaacccagggctctgaaacagctctagccgcctaatgcacttcacaggtaactccccaaggtaaaactagactctcttgttggttcgcaaagaaaagttaggacttaacacttttttctaaaattttataattcaatttccaaaagtctactctattttatactgtttctacaaaatattccttataaaaacaaagaacaaaaattgaatatttaatgaattgacattttataaccaacctgtttttatctacggtgggaatctttgatgccagaaatttataaagaggttctgtatcttcacaccttgaataagcataataccataaaaaatgacacttgacatgtcaatgtatttgtcatttcattttaaactcgtatttgtggtttttttcccagataaaaatgaaattaaaccatttctttttaagaaa

SEQ ID NO: 314513 - DNA, 2180 bp, Homo sapiens
aagggttgttgatgctgttgacaaatttgttgacatgctcaaagtgcttgtcatttctgtggctaagatcatggttacaaattatcgaagccaattatcattcctccaatccctaccacaattctacacattctgctgatgtgcttcatgccactgcctattttctctccaaggagaggataaaggaaactttagatccaattgatgaggtcgctgcactcatcgcagccaccattcatgatgtggatcaccctgggagaaccaactccttcctgtgtaatgctggaagtgagctggccattttgtacaatgacactgctgtgctggagagccaccatgcggccttggccttccagctgaccactggagatgataaatgcaatatatttaaaaacatggagaggaatgattatcggacactgcgccaggggattatcgacatggtcttagccacagaaatgacaaagcactttgagcatgtcaacaaatttgtcaacagcatcaacaaacccttggcaacactagaagaaaatggggaaactgataaaaaccaggaagtgataaacactatgcttaggactccagagaaccggaccctaatcaaacgaatgctgattaaatgtgctgatgtgtccaatccctgccgacccctgcagtactgcatcgagtgggctgcacgcatttcggaagaatatttttctcagactgatgaagagaagcagcagggcttacctgtggtgatgccagtgtttgacagaaatacctgcagcatccccaaatcccaaatctctttcattgattacttcatcacagacatgtttgatgcttgggatgcctttgtagacctgcctgatttaatgcagcatcttgacaacaactttaaatactggaaaggactggacgaaatgaagctgcggaacctccgaccacctcctgaatagtgggagacaccacccagagccctgaagctttgttccttcggtcatttggaattcctgagggcagccagagctccttggtcctttcagtactaggcagaacagcccccgatctgcatagcctgtgaaagcccacggggacatcagtaaccttctgcagccaccatccaatgccattactgtcaagtgagacttggccactgtagcctgggcctgctgcaggagctcttcagaaaggcacatgaggaccacggtttgcctcagtttctggtaaaacacaaggtctggagtgcccctgcaaagggtattgatggacttcctgccagtgacagagcatgtctattgcaaacaattctctcagttacgttcagcacttaagaacggctaatggcaataggatctttagcaactttttcacatcatagaaggtgcaatcgctcacttgggaacactactgagagtgacttctcttttaaaattgagtagcagatgaaaaattaaaatttgaacttgattattaatatcaattaaaatgttttatttattttattaaaagctcaatattttctatgaattcaaaaatacttcagagccaaagccaacttcaaataccgtgaccaaatttacatgattcatattcattatgcattacttggtatacagacttattttcataatgcaaattaataaaatgacacttttactgcactatagaaatattcatgtatgttaaacttttctgattgaggctaactggaaaaagctggggtcgtattctaagtgctaaagaaggctgcttctactgtatagaacccagggctctgaaacagctctagccgcctaatgcacttcacaggtaactccccaaggtaaaactagactctcttgttggttcgcaaagaaaagttaggacttaacacttttttctaaaattttataattcaatttccaaaagtctactctattttatactgtttctacaaaatattccttataaaaacaaagaacaaaaattgaatatttaatgaattgacattttataaccaacctgtttttatctacggtgggaatctttgatgccagaaatttataaagaggttctgtatcttcacaccttgaataagcataataccataaaaaatgacacttgacatgtcaatgtatttgtcatttcattttaaactcgtatttgtggtttttttcccagataaaaatgaaattaaaccatttctttttaagaaa

SEQ ID NO: 314514 - DNA, 1806 bp, Homo sapiens
cactgggtaatctgtttgttttgtttgtatcgtttgttttttgagacaggtcccgttactgtcgacatggtcttagccacagaaatgacaaagcactttgagcatgtcaacaaatttgtcaacagcatcaacaaacccttggcaacactagaagaaaatggggaaactgataaaaaccaggaagtgataaacactatgcttaggactccagagaaccggaccctaatcaaacgaatgctgattaaatgtgctgatgtgtccaatccctgccgacccctgcagtactgcatcgagtgggctgcacgcatttcggaagaatatttttctcagactgatgaagagaagcagcagggcttacctgtggtgatgccagtgtttgacagaaatacctgcagcatccccaaatcccaaatctctttcattgattacttcatcacagacatgtttgatgcttgggatgcctttgtagacctgcctgatttaatgcagcatcttgacaacaactttaaatactggaaaggactggacgaaatgaagctgcggaacctccgaccacctcctgaatagtgggagacaccacccagagccctgaagctttgttccttcggtcatttggaattcctgagggcagccagagctccttggtcctttcagtactaggcagaacagcccccgatctgcatagcctgtgaaagcccacggggacatcagtaaccttctgcagccaccatccaatgccattactgtcaagtgagacttggccactgtagcctgggcctgctgcaggagctcttcagaaaggcacatgaggaccacggtttgcctcagtttctggtaaaacacaaggtctggagtgcccctgcaaagggtattgatggacttcctgccagtgacagagcatgtctattgcaaacaattctctcagttacgttcagcacttaagaacggctaatggcaataggatctttagcaactttttcacatcatagaaggtgcaatcgctcacttgggaacactactgagagtgacttctcttttaaaattgagtagcagatgaaaaattaaaatttgaacttgattattaatatcaattaaaatgttttatttattttattaaaagctcaatattttctatgaattcaaaaatacttcagagccaaagccaacttcaaataccgtgaccaaatttacatgattcatattcattatgcattacttggtatacagacttattttcataatgcaaattaataaaatgacacttttactgcactatagaaatattcatgtatgttaaacttttctgattgaggctaactggaaaaagctggggtcgtattctaagtgctaaagaaggctgcttctactgtatagaacccagggctctgaaacagctctagccgcctaatgcacttcacaggtaactccccaaggtaaaactagactctcttgttggttcgcaaagaaaagttaggacttaacacttttttctaaaattttataattcaatttccaaaagtctactctattttatactgtttctacaaaatattccttataaaaacaaagaacaaaaattgaatatttaatgaattgacattttataaccaacctgtttttatctacggtgggaatctttgatgccagaaatttataaagaggttctgtatcttcacaccttgaataagcataataccataaaaaatgacacttgacatgtcaatgtatttgtcatttcattttaaactcgtatttgtggtttttttcccagataaaaatgaaattaaaccatttctttttaagaaa

SEQ ID NO: 314515 - DNA, 1808 bp, Homo sapiens
tttctttaggtcaatacgaacaacagagcggtggctgactacacataatgtttgggatcttacctgaagagcttctgcaaggaggcttccagatgtttaaagtttggcttgagttggggtgtcctcagaccccactgacatggagtagtcctcattctgagaacttggtatctgttatgagacatggtttggctgcgtgaggtggtgattggcttctcaccatgacaagccaccttaggctgccaggagaagctcttcctgggggaggggctgcccctaggtggagtggaaccagatgttggggtctcctgatcacattttctgctttacagactgatgaagagaagcagcagggcttacctgtggtgatgccagtgtttgacagaaatacctgcagcatccccaaatcccaaatctctttcattgattacttcatcacagacatgtttgatgcttgggatgcctttgtagacctgcctgatttaatgcagcatcttgacaacaactttaaatactggaaaggactggacgaaatgaagctgcggaacctccgaccacctcctgaatagtgggagacaccacccagagccctgaagctttgttccttcggtcatttggaattcctgagggcagccagagctccttggtcctttcagtactaggcagaacagcccccgatctgcatagcctgtgaaagcccacggggacatcagtaaccttctgcagccaccatccaatgccattactgtcaagtgagacttggccactgtagcctgggcctgctgcaggagctcttcagaaaggcacatgaggaccacggtttgcctcagtttctggtaaaacacaaggtctggagtgcccctgcaaagggtattgatggacttcctgccagtgacagagcatgtctattgcaaacaattctctcagttacgttcagcacttaagaacggctaatggcaataggatctttagcaactttttcacatcatagaaggtgcaatcgctcacttgggaacactactgagagtgacttctcttttaaaattgagtagcagatgaaaaattaaaatttgaacttgattattaatatcaattaaaatgttttatttattttattaaaagctcaatattttctatgaattcaaaaatacttcagagccaaagccaacttcaaataccgtgaccaaatttacatgattcatattcattatgcattacttggtatacagacttattttcataatgcaaattaataaaatgacacttttactgcactatagaaatattcatgtatgttaaacttttctgattgaggctaactggaaaaagctggggtcgtattctaagtgctaaagaaggctgcttctactgtatagaacccagggctctgaaacagctctagccgcctaatgcacttcacaggtaactccccaaggtaaaactagactctcttgttggttcgcaaagaaaagttaggacttaacacttttttctaaaattttataattcaatttccaaaagtctactctattttatactgtttctacaaaatattccttataaaaacaaagaacaaaaattgaatatttaatgaattgacattttataaccaacctgtttttatctacggtgggaatctttgatgccagaaatttataaagaggttctgtatcttcacaccttgaataagcataataccataaaaaatgacacttgacatgtcaatgtatttgtcatttcattttaaactcgtatttgtggtttttttcccagataaaaatgaaattaaaccatttctttttaagaaa

SEQ ID NO: 314516 - DNA, 2273 bp, Homo sapiens
tagatgacgggcacgaggacttggggccccacagcttgtagtagagcagctagggttcaaaaccaatcgtgctggctccaaaacccatggtgtttctacagcagccctttgccctccactgtcccctgcttctcccagcctcactctacacaagaccagaaggactggtctgtctctgactgatgcatgtcaccctcctttaacttcaggtggggcacaggagtctgtcaaataaaagaatatcggagaactgatattccacgtgcatcttcgtcctgagggctgcaccttgaaggaggggctacagggctgataaatgtccagatccagtcaggaaataaacccatgtctcaagaaggccgtagaacaggggtaggcggctggggagaaggactgaagcagtggagctagatagctgcagctttgggggacactgcatactctgcagctcactgcttctgggactgagaccagacgcgtgtgtccccaggctgcacgttcttcatgtggtgcaggtgaaaggagatgctggtgtatgtgaagcatgcgtgaagggacagtgagcacacaagggccaggccatcggttggggccggggggcaggggcacactacatactgctttctgacaccccaggcccaaaggtgctgctggtttaatggtaattaagcagattagccaccttctgttttatttaccacagttaccagctcagcaggtggtcacagaggaggtgctggcattgaggacagggtttaacttcagtcagccacggctcgttgaagctgctgggtgtgtttgcccgggtctgtttagcctcacgcagatgcctgctcccatctgtcactctttaaaatgctcttagtgaaagcctaaaatgtaaacagaggctgtgaaagcatatcacattcctatctttctctccagcctttgtagacctgcctgatttaatgcagcatcttgacaacaactttaaatactggaaaggactggacgaaatgaagctgcggaacctccgaccacctcctgaatagtgggagacaccacccagagccctgaagctttgttccttcggtcatttggaattcctgagggcagccagagctccttggtcctttcagtactaggcagaacagcccccgatctgcatagcctgtgaaagcccacggggacatcagtaaccttctgcagccaccatccaatgccattactgtcaagtgagacttggccactgtagcctgggcctgctgcaggagctcttcagaaaggcacatgaggaccacggtttgcctcagtttctggtaaaacacaaggtctggagtgcccctgcaaagggtattgatggacttcctgccagtgacagagcatgtctattgcaaacaattctctcagttacgttcagcacttaagaacggctaatggcaataggatctttagcaactttttcacatcatagaaggtgcaatcgctcacttgggaacactactgagagtgacttctcttttaaaattgagtagcagatgaaaaattaaaatttgaacttgattattaatatcaattaaaatgttttatttattttattaaaagctcaatattttctatgaattcaaaaatacttcagagccaaagccaacttcaaataccgtgaccaaatttacatgattcatattcattatgcattacttggtatacagacttattttcataatgcaaattaataaaatgacacttttactgcactatagaaatattcatgtatgttaaacttttctgattgaggctaactggaaaaagctggggtcgtattctaagtgctaaagaaggctgcttctactgtatagaacccagggctctgaaacagctctagccgcctaatgcacttcacaggtaactccccaaggtaaaactagactctcttgttggttcgcaaagaaaagttaggacttaacacttttttctaaaattttataattcaatttccaaaagtctactctattttatactgtttctacaaaatattccttataaaaacaaagaacaaaaattgaatatttaatgaattgacattttataaccaacctgtttttatctacggtgggaatctttgatgccagaaatttataaagaggttctgtatcttcacaccttgaataagcataataccataaaaaatgacacttgacatgtcaatgtatttgtcatttcattttaaactcgtatttgtggtttttttcccagataaaaatgaaattaaaccatttctttttaagaaa

SEQ ID NO: 314517 - DNA, 3329 bp, Homo sapiens
acgcgagatccgcgctcgccgccgcccgcccaggcggcgatgacacggcgcccgcggcggcccggaggcgccgggtgggccgtttgctgaccggatcgcggctacccgccagcgtgtccgcggcgccgccgccagcatgggctgtgccccgagcatccacatttccgagcgcctggtggccgaggacgcgcctagccccgcggcaccgccgctgtcgtccggcgggccgcgcctcccgcagggccagaagacggccgccttgccccggacccgcggcgccggcctcttggagtcggagcttcgcgacggcagcggcaagaaggtagcagtagctgatgtgcagtttggccccatgagatttcatcaagatcaacttcaggtacttttagtgtttaccaaagaagataaccaatgtaatggattctgcagggcatgtgaaaaagcagggtttaagtgtacagttaccaaggaggctcaggctgtccttgcctgtttcctggacaaacatcatgacattatcatcatagaccacagaaatcctcgacagctggatgcagaggcactgtgcaggtctatcagatcatcaaaactctcagaaaacacagttattgttggtgtagtacgcagggtggatagagaagagttgtccgtaatgcctttcatttctgctggatttacaaggaggtatgtagaaaaccccaacatcatggcctgctacaatgaactgctccagctggagtttggagaggtgcgatcacaactgaaactcagggcttgtaactcagtattcactgcattagaaaacagtgaagatgcaattgaaattacaagcgaagaccgttttatacagtatgcaaatcctgcatttgaaacaacaatgggctatcagtcaggtgaattaatagggaaggagttaggagaagtgcctataaatgaaaaaaaggctgacttgctcgatactataaattcatgcatcaggataggcaaggagtggcaaggaatttactatgccaaaaagaaaaacggagataatatacaacaaaatgtgaagataatacctgtcattggacagggaggaaaaattagacactatgtgtccattatcagagtgtgcaatggcaacaataaggctgagaaaatatccgaatgtgttcagtctgacactcatacagataatcagacaggcaaacataaagacaggagaaaaggctcactagacgtcaaagctgttgcctcccgtgcaactgaagtttccagccagagacgacactcttccatggcccggatacattccatgacaattgaggcgcccatcaccaaggtaatcaatattatcaatgctgcccaggaaagtagtcccatgcctgtgacagaagccctagaccgtgtgctggaaattctaagaaccactgagttatattcaccacagtttggtgctaaagatgatgatccccatgccaatgaccttgttgggggcttaatgtctgatggtttgcgaagactatcagggaatgaatatgttctttcaacaaaaaacactcaaatggtttcaagcaatataatcactcccatctcccttgatgatgtcccaccacggatagctcgggccatggaaaatgaggaatactgggactttgatatttttgaactggaggctgccacccacaataggcctttgatttatcttggtctcaaaatgtttgctcgctttggaatctgtgaattcttacactgctccgagtcaacgctaagatcatggttacaaattatcgaagccaattatcattcctccaatccctaccacaattctacacattctgctgatgtgcttcatgccactgcctattttctctccaaggagaggataaaggaaactttagatccaattgatgaggtcgctgcactcatcgcagccaccattcatgatgtggatcaccctgggagaaccaactccttcctgtgtaatgctggaagtgagctggccattttgtacaatgacactgctgtgctggagagccaccatgcggccttggccttccagctgaccactggagatgataaatgcaatatatttaaaaacatggagaggaatgattatcggacactgcgccaggggattatcgacatggtcttagccacagaaatgacaaagcactttgagcatgtcaacaaatttgtcaacagcatcaacaaacccttggcaacactagaagaaaatggggaaactgataaaaaccaggaagtgataaacactatgcttaggactccagagaaccggaccctaatcaaacgaatgctgattaaatgtgctgatgtgtccaatccctgccgacccctgcagtactgcatcgagtgggctgcacgcatttcggaagaatatttttctcagactgatgaagagaagcagcagggcttacctgtggtgatgccagtgtttgacagaaatacctgcagcatccccaaatcccaaatctctttcattgattacttcatcacagacatgtttgatgcttgggatgcctttgtagacctgcctgatttaatgcagcatcttgacaacaactttaaatactggaaaggactggacgaaatgaagctgcggaacctccgaccacctcctgaatagtgggagacaccacccagagccctgaagctttgttccttcggtcatttggaattcctgagggcagccagagctccttggtcctttcagtactaggcagaacagcccccgatctgcatagcctgtgaaagcccacggggacatcagtaaccttctgcagccaccatccaatgccattactgtcaagtgagacttggccactgtagcctgggcctgctgcaggagctcttcagaaaggcacatgaggaccacggtttgcctcagtttctggtaaaacacaaggtctggagtgcccctgcaaagggtattgatggacttcctgccagtgacagagcatgtctattgcaaacaattctctcagttacgttcagcacttaagaacggctaatggcaataggatctttagcaactttttcacatcatagaaggtgcaatcgctcacttgggaacactactgagagtgacttctcttttaaaattgagtagcagatgaaaaattaaaatttgaacttgattattaatatcaattaaaatgttttatttattttattaaaagctcaatattttctatgaattcaaaaatacttcagagccaaagccaacttcaaataccgtgaccaaatttacatgattcatattcattatgcattacttggtatacagacttattttcataatgcaaattaataaaatgacacttttactg

SEQ ID NO: 314518 - DNA, 2408 bp, Homo sapiens
acgcgagatccgcgctcgccgccgcccgcccaggcggcgatgacacggcgcccgcggcggcccggaggcgccgggtgggccgtttgctgaccggatcgcggctacccgccagcgtgtccgcggcgccgccgccagcatgggctgtgccccgagcatccacatttccgagcgcctggtggccgaggacgcgcctagccccgcggcaccgccgctgtcgtccggcgggccgcgcctcccgcagggccagaagacggccgccttgccccggacccgcggcgccggcctcttggagtcggagcttcgcgacggcagcggcaagaaggtagcagtagctgatgtgcagtttggccccatgagatttcatcaagatcaacttcaggtacttttagtgtttaccaaagaagataaccaatgtaatggattctgcagggcatgtgaaaaagcagggtttaagtgtacagttaccaaggaggctcaggctgtccttgcctgtttcctggacaaacatcatgacattatcatcatagaccacagaaatcctcgacagctggatgcagaggcactgtgcaggtctatcagatcatcaaaactctcagaaaacacagttattgttggtgtagtacgcagggtggatagagaagagttgtccgtaatgcctttcatttctgctggatttacaaggaggtatgtagaaaaccccaacatcatggcctgctacaatgaactgctccagctggagtttggagaggtgcgatcacaactgaaactcagggcttgtaactcagtattcactgcattagaaaacagtgaagatgcaattgaaattacaagcgaagaccgttttatacagtatgcaaatcctgcatttgaaacaacaatgggctatcagtcaggtgaattaatagggaaggagttaggagaagtgcctataaatgaaaaaaaggctgacttgctcgatactataaattcatgcatcaggataggcaaggagtggcaaggaatttactatgccaaaaagaaaaacggagataatatacaacaaaatgtgaagataatacctgtcattggacagggaggaaaaattagacactatgtgtccattatcagagtgtgcaatggcaacaataaggctgagaaaatatccgaatgtgttcagtctgacactcatacagataatcagacaggcaaacataaagacaggagaaaaggctcactagacgtcaaagctgttgcctcccgtgcaactgaagtttccagccagagacgacactcttccatggcccggatacattccatgacaattgaggcgcccatcaccaaggtaatcaatattatcaatgctgcccaggaaagtagtcccatgcctgtgacagaagccctagaccgtgtgctggaaattctaagaaccactgagttatattcaccacagtttggtgctaaagatgatgatccccatgccaatgaccttgttgggggcttaatgtctgatggtttgcgaagactatcagggaatgaatatgttctttcaacaaaaaacactcaaatggtttcaagcaatataatcactcccatctcccttgatgatgtcccaccacggatagctcgggccatggaaaatgaggaatactgggactttgatatttttgaactggaggctgccacccacaataggcctttgatttatcttggtctcaaaatgtttgctcgctttggaatctgtgaattcttacactgctccgagtcaacgctaagatcatggttacaaattatcgaagccaattatcattcctccaatccctaccacaattctacacattctgctgatgtgcttcatgccactgcctattttctctccaaggagaggataaaggtgagctgttgtttacctgccacatttaatgggcaggagcagtggggagagtctagtgcttctgcctccactaagatacatagcatgactgctcacgtgtgcagcctggcacaggaagggcaaggtcatacgaggaatcaggcaggaggccacattagctttgggaaattgatgtgttaattcatgacataatcccagctattccatgagggtacaagaggcagaatttggtcccggaggagaaacctaacaaggacaggatagggctattcttctgggggtctcactccaagcctgtacactagtagagccaagtaactgttggatatccccactttagggcctccatctgtacatgaaagtctgcagggctctaaggtcaggttcatcatctctgttcccagcactgctcccacccagggttatctacctaatccagggttccattatccaaccggatacccagattagaaaccgagagtcatccttggttctttccactcctcaaccccccacatctggttgatcatctgacctt

SEQ ID NO: 314519 - DNA, 1923 bp, Homo sapiens
acgcgagatccgcgctcgccgccgcccgcccaggcggcgatgacacggcgcccgcggcggcccggaggcgccgggtgggccgtttgctgaccggatcgcggctacccgccagcgtgtccgcggcgccgccgccagcatgggctgtgccccgagcatccacatttccgagcgcctggtggccgaggacgcgcctagccccgcggcaccgccgctgtcgtccggcgggccgcgcctcccgcagggccagaagacggccgccttgccccggacccgcggcgccggcctcttggagtcggagcttcgcgacggcagcggcaagaaggtagcagtagctgatgtgcagtttggccccatgagatttcatcaagatcaacttcaggtacttttagtgtttaccaaagaagataaccaatgtaatggattctgcagggcatgtgaaaaagcagggtttaagtgtacagttaccaaggaggctcaggctgtccttgcctgtttcctggacaaacatcatgacattatcatcatagaccacagaaatcctcgacagctggatgcagaggcactgtgcaggtctatcagatcatcaaaactctcagaaaacacagttattgttggtgtagtacgcagggtggatagagaagagttgtccgtaatgcctttcatttctgctggatttacaaggaggtatgtagaaaaccccaacatcatggcctgctacaatgaactgctccagctggagtttggagaggtgcgatcacaactgaaactcagggcttgtaactcagtattcactgcattagaaaacagtgaagatgcaattgaaattacaagcgaagaccgttttatacagtatgcaaatcctgcatttgaaacaacaatgggctatcagtcaggtgaattaatagggaaggagttaggagaagtgcctataaatgaaaaaaaggctgacttgctcgatactataaattcatgcatcaggataggcaaggagtggcaaggaatttactatgccaaaaagaaaaacggagataatatacaacaaaatgtgaagataatacctgtcattggacagggaggaaaaattagacactatgtgtccattatcagagtgtgcaatggcaacaataaggctgagaaaatatccgaatgtgttcagtctgacactcatacagataatcagacaggcaaacataaagacaggagaaaaggctcactagacgtcaaagctgttgcctcccgtgcaactgaagtttccagccagagacgacactcttccatggcccggatacattccatgacaattgaggcgcccatcaccaaggtaatcaatattatcaatgctgcccaggaaagtagtcccatgcctgtgacagaagccctagaccgtgtgctggaaattctaagaaccactgagttatattcaccacagtttggtgctaaagatgatgatccccatgccaatgaccttgttgggggcttaatgtctgatggtttgcgaagactatcagggaatgaatatgttctttcaacaaaaaacactcaaatggtttcaagcaatataatcactcccatctcccttgatgatgtcccaccacggatagctcgggccatggaaaatgaggaatactgggactttgatatttttgaactggaggctgccacccacaataggcctttgatttatcttggtctcaaaatgtttgctcgctttggaatctgtgaattcttacactgctccgagtcaacgctaagatcatggttacaaattatcgaagccaattatcattcctccaatccctaccacaattctacacattctgctgatgtgcttcatgccactgcctattttctctccaaggagaggataaaggaaactttagatccaattgatgtggctcgctgctacgggatcctctaagtcac

SEQ ID NO: 314520 - DNA, 1307 bp, Homo sapiens
acgcgagatccgcgctcgccgccgcccgcccaggcggcgatgacacggcgcccgcggcggcccggaggcgccgggtgggccgtttgctgaccggatcgcggctacccgccagcgtgtccgcggcgccgccgccagcatgggctgtgccccgagcatccacatttccgagcgcctggtggccgaggacgcgcctagccccgcggcaccgccgctgtcgtccggcgggccgcgcctcccgcagggccagaagacggccgccttgccccggacccgcggcgccggcctcttggagtcggagcttcgcgacggcagcggcaagaaggtagcagtagctgatgtgcagtttggccccatgagatttcatcaagatcaacttcaggtacttttagtgtttaccaaagaagataaccaatgtaatggattctgcagggcatgtgaaaaagcagggtttaagtgtacagttaccaaggaggctcaggctgtccttgcctgtttcctggacaaacatcatgacattatcatcatagaccacagaaatcctcgacagctggatgcagaggcactgtgcaggtctatcagatcatcaaaactctcagaaaacacagttattgttggtgtagtacgcagggtggatagagaagagttgtccgtaatgcctttcatttctgctggatttacaaggaggtatgtagaaaaccccaacatcatggcctgctacaatgaactgctccagctggagtttggagaggtgcgatcacaactgaaactcagggcttgtaactcagtattcactgcattagaaaacagtgaagatgcaattgaaattacaagcgaagaccgttttatacagtatgcaaatcctgcatttgaaacaacaatgggctatcagtcaggtgaattaatagggaaggagttaggagaagtgcctataaatgaaaaaaaggctgacttgctcgatactataaattcatgcatcaggataggcaaggagtggcaaggaatttactatgccaaaaagaaaaacggagataatatacaacaaaatgtgaagataatacctgtcattggacagggaggaaaaattagacactatgtgtccattatcagagtgtgcaatggcaacaataaggctgagaaaatatccgaatgtgttcagtctgacactcatacagataatcagacaggcaaacataaagacaggagaaaaggctcactagacgtcaaagctgttgcctcccgtgcaactgaagtttccagccagaggcgacacttttccatggcccgagctatccgtggtgggtcatcat

SEQ ID NO: 314521 - DNA, 431 bp, Homo sapiens
atctgattcatctaaaagtactcattacataacgaagtattatttaaattagtagagtaaaagaggtgagatgtaattgataaaaactatgtctatgttctttactgtgttattttgaagggtggatagagaagagttgtccgtaatgcctttcatttctgctggatttacaagggtatgtactcacttatttgttatacaagtataattcaatttgagaaattattttatctcagttcagtacccagcaaaagctttgtattaatttgaagaaaaaaaattgtctggccaggcgtggtggctcatacctgtaatcccagcactttgggaggtcgaggtaggaggaccccttgggcccaggagttcaagaccagcctgggcaacataaggagaacctgcctcaatcgtacttaaaaaaaaaattactgtcc

SEQ ID NO: 314522 - DNA, 400 bp, Homo sapiens
acgcgagatccgcgctcgccgccgcccgcccaggcggcgatgacacggcgcccgcggcggcccggaggcgccgggtgggccgtttgctgaccggatcgcggctacccgccagcgtgtccgcggcgccgccgccagcatgggctgtgccccgagcatccacatttccgagcgcctggtggccgaggacgcgcctagccccgcggcaccgccgctgtcgtccggcgggccgcgcctcccgcagggccagaagacggccgccttgccccggacccgcggcgccggcctcttggagtcggagcttcgcgacggcagcggcaagaaggtaaggggcgccgggcactctggggccgccgcgaaactcgggcccggccagtaagcaactttcccgcgagccgggcgg

SEQ ID NO: 314523 - DNA, 3549 bp, Homo sapiens
gcgacccttaagctatccggtcaataaacagtgaggtttaatattttgtttatttcacatgcatggaaagcaacttaaaagacagtgagtctatatttaatctattgctaggcggcatgtgaaaaagcagggtttaagtgtacagttaccaaggaggctcaggctgtccttgcctgtttcctggacaaacatcatgacattatcatcatagaccacagaaatcctcgacagctggatgcagaggcactgtgcaggtctatcagatcatcaaaactctcagaaaacacagttattgttggtgtagtacgcagggtggatagagaagagttgtccgtaatgcctttcatttctgctggatttacaaggaggtatgtagaaaaccccaacatcatggcctgctacaatgaactgctccagctggagtttggagaggtgcgatcacaactgaaactcagggcttgtaactcagtattcactgcattagaaaacagtgaagatgcaattgaaattacaagcgaagaccgttttatacagtatgcaaatcctgcatttgaaacaacaatgggctatcagtcaggtgaattaatagggaaggagttaggagaagtgcctataaatgaaaaaaaggctgacttgctcgatactataaattcatgcatcaggataggcaaggagtggcaaggaatttactatgccaaaaagaaaaacggagataatatacaacaaaatgtgaagataatacctgtcattggacagggaggaaaaattagacactatgtgtccattatcagagtgtgcaatggcaacaataaggctgagaaaatatccgaatgtgttcagtctgacactcatacagataatcagacaggcaaacataaagacaggagaaaaggctcactagacgtcaaagctgttgcctcccgtgcaactgaagtttccagccagagacgacactcttccatggcccggatacattccatgacaattgaggcgcccatcaccaaggtaatcaatattatcaatgctgcccaggaaagtagtcccatgcctgtgacagaagccctagaccgtgtgctggaaattctaagaaccactgagttatattcaccacagtttggtgctaaagatgatgatccccatgccaatgaccttgttgggggcttaatgtctgatggtttgcgaagactatcagggaatgaatatgttctttcaacaaaaaacactcaaatggtttcaagcaatataatcactcccatctcccttgatgatgtcccaccacggatagctcgggccatggaaaatgaggaatactgggactttgatatttttgaactggaggctgccacccacaataggcctttgatttatcttggtctcaaaatgtttgctcgctttggaatctgtgaattcttacactgctccgagtcaacgctaagatcatggttacaaattatcgaagccaattatcattcctccaatccctaccacaattctacacattctgctgatgtgcttcatgccactgcctattttctctccaaggagaggataaaggaaactttagatccaattgatgaggtcgctgcactcatcgcagccaccattcatgatgtggatcaccctgggagaaccaactccttcctgtgtaatgctggaagtgagctggccattttgtacaatgacactgctgtgctggagagccaccatgcggccttggccttccagctgaccactggagatgataaatgcaatatatttaaaaacatggagaggaatgattatcggacactgcgccaggggattatcgacatggtcttagccacagaaatgacaaagcactttgagcatgtcaacaaatttgtcaacagcatcaacaaacccttggcaacactagaagaaaatggggaaactgataaaaaccaggaagtgataaacactatgcttaggactccagagaaccggaccctaatcaaacgaatgctgattaaatgtgctgatgtgtccaatccctgccgacccctgcagtactgcatcgagtgggctgcacgcatttcggaagaatatttttctcagactgatgaagagaagcagcagggcttacctgtggtgatgccagtgtttgacagaaatacctgcagcatccccaaatcccaaatctctttcattgattacttcatcacagacatgtttgatgcttgggatgcctttgtagacctgcctgatttaatgcagcatcttgacaacaactttaaatactggaaaggactggacgaaatgaagctgcggaacctccgaccacctcctgaatagtgggagacaccacccagagccctgaagctttgttccttcggtcatttggaattcctgagggcagccagagctccttggtcctttcagtactaggcagaacagcccccgatctgcatagcctgtgaaagcccacggggacatcagtaaccttctgcagccaccatccaatgccattactgtcaagtgagacttggccactgtagcctgggcctgctgcaggagctcttcagaaaggcacatgaggaccacggtttgcctcagtttctggtaaaacacaaggtctggagtgcccctgcaaagggtattgatggacttcctgccagtgacagagcatgtctattgcaaacaattctctcagttacgttcagcacttaagaacggctaatggcaataggatctttagcaactttttcacatcatagaaggtgcaatcgctcacttgggaacactactgagagtgacttctcttttaaaattgagtagcagatgaaaaattaaaatttgaacttgattattaatatcaattaaaatgttttatttattttattaaaagctcaatattttctatgaattcaaaaatacttcagagccaaagccaacttcaaataccgtgaccaaatttacatgattcatattcattatgcattacttggtatacagacttattttcataatgcaaattaataaaatgacacttttactgcactatagaaatattcatgtatgttaaacttttctgattgaggctaactggaaaaagctggggtcgtattctaagtgctaaagaaggctgcttctactgtatagaacccagggctctgaaacagctctagccgcctaatgcacttcacaggtaactccccaaggtaaaactagactctcttgttggttcgcaaagaaaagttaggacttaacacttttttctaaaattttataattcaatttccaaaagtctactctattttatactgtttctacaaaatattccttataaaaacaaagaacaaaaattgaatatttaatgaattgacattttataaccaacctgtttttatctacggtgggaatctttgatgccagaaatttataaagaggttctgtatcttcacaccttgaataagcataataccataaaaaatgacacttgacatgtcaatgtatttgtcatttcattttaaactcgtatttgtggtttttttcccagataaaaatgaaattaaaccatttctttttaagaaa

SEQ ID NO: 314524 - DNA, 2557 bp, Homo sapiens
gatggacaggtgaattctttagccctttaaggaatttttccatgttacataaaacttttcagagtcttgaaaaagatggaaaacttccagatcattttgtcaaactcacaaaactctgacatcaacctgacaaagatagcactaaaagggggaagaaaactaaatcaattcccagttaatgtaagtggtgcctattttaaattttatttaaaattgtttctctcctttattaatattagtttatgctggtctaagtcaatatctcagactaaggacttttttggtgatgggtctagagaaagactggctgaggaggtgactcctatctgttgagaacacctgtattttggtaagtccttaacttgtgtgagactaacaaatatgcagaaatataactgtttcagggtggagataggaaaactagatttgctcacgtagtatgcttttcttagaaatctgaaatattcttacctgaaagtaataggggagaaagaaaactatacagaaggcttccttgccttcagtgtcataccccagtttttaaaagctctcttgttttcaggaaactttagatccaattgatgaggtcgctgcactcatcgcagccaccattcatgatgtggatcaccctgggagaaccaactccttcctgtgtaatgctggaagtgagctggccattttgtacaatgacactgctgtgctggagagccaccatgcggccttggccttccagctgaccactggagatgataaatgcaatatatttaaaaacatggagaggaatgattatcggacactgcgccaggggattatcgacatggtcttagccacagaaatgacaaagcactttgagcatgtcaacaaatttgtcaacagcatcaacaaacccttggcaacactagaagaaaatggggaaactgataaaaaccaggaagtgataaacactatgcttaggactccagagaaccggaccctaatcaaacgaatgctgattaaatgtgctgatgtgtccaatccctgccgacccctgcagtactgcatcgagtgggctgcacgcatttcggaagaatatttttctcagactgatgaagagaagcagcagggcttacctgtggtgatgccagtgtttgacagaaatacctgcagcatccccaaatcccaaatctctttcattgattacttcatcacagacatgtttgatgcttgggatgcctttgtagacctgcctgatttaatgcagcatcttgacaacaactttaaatactggaaaggactggacgaaatgaagctgcggaacctccgaccacctcctgaatagtgggagacaccacccagagccctgaagctttgttccttcggtcatttggaattcctgagggcagccagagctccttggtcctttcagtactaggcagaacagcccccgatctgcatagcctgtgaaagcccacggggacatcagtaaccttctgcagccaccatccaatgccattactgtcaagtgagacttggccactgtagcctgggcctgctgcaggagctcttcagaaaggcacatgaggaccacggtttgcctcagtttctggtaaaacacaaggtctggagtgcccctgcaaagggtattgatggacttcctgccagtgacagagcatgtctattgcaaacaattctctcagttacgttcagcacttaagaacggctaatggcaataggatctttagcaactttttcacatcatagaaggtgcaatcgctcacttgggaacactactgagagtgacttctcttttaaaattgagtagcagatgaaaaattaaaatttgaacttgattattaatatcaattaaaatgttttatttattttattaaaagctcaatattttctatgaattcaaaaatacttcagagccaaagccaacttcaaataccgtgaccaaatttacatgattcatattcattatgcattacttggtatacagacttattttcataatgcaaattaataaaatgacacttttactgcactatagaaatattcatgtatgttaaacttttctgattgaggctaactggaaaaagctggggtcgtattctaagtgctaaagaaggctgcttctactgtatagaacccagggctctgaaacagctctagccgcctaatgcacttcacaggtaactccccaaggtaaaactagactctcttgttggttcgcaaagaaaagttaggacttaacacttttttctaaaattttataattcaatttccaaaagtctactctattttatactgtttctacaaaatattccttataaaaacaaagaacaaaaattgaatatttaatgaattgacattttataaccaacctgtttttatctacggtgggaatctttgatgccagaaatttataaagaggttctgtatcttcacaccttgaataagcataataccataaaaaatgacacttgacatgtcaatgtatttgtcatttcattttaaactcgtatttgtggtttttttcccagataaaaatgaaattaaaccatttctttttaagaaa

SEQ ID NO: 314525 - DNA, 1705 bp, Homo sapiens
  misc_feature (55)..(55): n is a, c, g, or t
gtcggttccagaggatccccgtcgtcagcatcacaaccctggaacactagaaganaatggggaaactgataaaaaccaggaagtgataaacactatgcttaggactccagagaaccggaccctaatcaaacgaatgctgattaaatgtgctgatgtgtccaatccctgccgacccctgcagtactgcatcgagtgggctgcacgcatttcggaagaatatttttctcagactgatgaagagaagcagcagggcttacctgtggtgatgccagtgtttgacagaaatacctgcagcatccccaaatcccaaatctctttcattgattacttcatcacagacatgtttgatgcttgggatgcctttgtagacctgcctgatttaatgcagcatcttgacaacaactttaaatactggaaaggactggacgaaatgaagctgcggaacctccgaccacctcctgaatagtgggagacaccacccagagccctgaagctttgttccttcggtcatttggaattcctgagggcagccagagctccttggtcctttcagtactaggcagaacagcccccgatctgcatagcctgtgaaagcccacggggacatcagtaaccttctgcagccaccatccaatgccattactgtcaagtgagacttggccactgtagcctgggcctgctgcaggagctcttcagaaaggcacatgaggaccacggtttgcctcagtttctggtaaaacacaaggtctggagtgcccctgcaaagggtattgatggacttcctgccagtgacagagcatgtctattgcaaacaattctctcagttacgttcagcacttaagaacggctaatggcaataggatctttagcaactttttcacatcatagaaggtgcaatcgctcacttgggaacactactgagagtgacttctcttttaaaattgagtagcagatgaaaaattaaaatttgaacttgattattaatatcaattaaaatgttttatttattttattaaaagctcaatattttctatgaattcaaaaatacttcagagccaaagccaacttcaaataccgtgaccaaatttacatgattcatattcattatgcattacttggtatacagacttattttcataatgcaaattaataaaatgacacttttactgcactatagaaatattcatgtatgttaaacttttctgattgaggctaactggaaaaagctggggtcgtattctaagtgctaaagaaggctgcttctactgtatagaacccagggctctgaaacagctctagccgcctaatgcacttcacaggtaactccccaaggtaaaactagactctcttgttggttcgcaaagaaaagttaggacttaacacttttttctaaaattttataattcaatttccaaaagtctactctattttatactgtttctacaaaatattccttataaaaacaaagaacaaaaattgaatatttaatgaattgacattttataaccaacctgtttttatctacggtgggaatctttgatgccagaaatttataaagaggttctgtatcttcacaccttgaataagcataataccataaaaaatgacacttgacatgtcaatgtatttgtcatttcattttaaactcgtatttgtggtttttttcccagataaaaatgaaattaaaccatttctttttaagaaa

SEQ ID NO: 314526 - DNA, 1613 bp, Homo sapiens
gtaaccttctgcagccaccatccaatgccattactgtcaagtgagacttggccactgtagcctgggcctgctgcaggagctcttcagaaaggcacatgaggaccacggtttgcctcagtttctggtaaaacacaaggtctggagtgcccctgcaaagggtattgatggacttcctgccagtgtttgacagaaatacctgcagcatccccaaatcccaaatctctttcattgattacttcatcacagacatgtttgatgcttgggatgcctttgtagacctgcctgatttaatgcagcatcttgacaacaactttaaatactggaaaggactggacgaaatgaagctgcggaacctccgaccacctcctgaatagtgggagacaccacccagagccctgaagctttgttccttcggtcatttggaattcctgagggcagccagagctccttggtcctttcagtactaggcagaacagcccccgatctgcatagcctgtgaaagcccacggggacatcagtaaccttctgcagccaccatccaatgccattactgtcaagtgagacttggccactgtagcctgggcctgctgcaggagctcttcagaaaggcacatgaggaccacggtttgcctcagtttctggtaaaacacaaggtctggagtgcccctgcaaagggtattgatggacttcctgccagtgacagagcatgtctattgcaaacaattctctcagttacgttcagcacttaagaacggctaatggcaataggatctttagcaactttttcacatcatagaaggtgcaatcgctcacttgggaacactactgagagtgacttctcttttaaaattgagtagcagatgaaaaattaaaatttgaacttgattattaatatcaattaaaatgttttatttattttattaaaagctcaatattttctatgaattcaaaaatacttcagagccaaagccaacttcaaataccgtgaccaaatttacatgattcatattcattatgcattacttggtatacagacttattttcataatgcaaattaataaaatgacacttttactgcactatagaaatattcatgtatgttaaacttttctgattgaggctaactggaaaaagctggggtcgtattctaagtgctaaagaaggctgcttctactgtatagaacccagggctctgaaacagctctagccgcctaatgcacttcacaggtaactccccaaggtaaaactagactctcttgttggttcgcaaagaaaagttaggacttaacacttttttctaaaattttataattcaatttccaaaagtctactctattttatactgtttctacaaaatattccttataaaaacaaagaacaaaaattgaatatttaatgaattgacattttataaccaacctgtttttatctacggtgggaatctttgatgccagaaatttataaagaggttctgtatcttcacaccttgaataagcataataccataaaaaatgacacttgacatgtcaatgtatttgtcatttcattttaaactcgtatttgtggtttttttcccagataaaaatgaaattaaaccatttctttttaagaaa

SEQ ID NO: 314527 - DNA, 3170 bp, Homo sapiens
acgcgagatccgcgctcgccgccgcccgcccaggcggcgatgacacggcgcccgcggcggcccggaggcgccgggtgggccgtttgctgaccggatcgcggctacccgccagcgtgtccgcggcgccgccgccagcatgggctgtgccccgagcatccacatttccgagcgcctggtggccgaggacgcgcctagccccgcggcaccgccgctgtcgtccggcgggccgcgcctcccgcagggccagaagacggccgccttgccccggacccgcggcgccggcctcttggagtcggagcttcgcgacggcagcggcaagaaggtagcagtagctgatgtgcagtttggccccatgagatttcatcaagatcaacttcaggtacttttagtgtttaccaaagaagataaccaatgtaatggattctgcagggcatgtgaaaaagcagggtttaagtgtacagttaccaaggaggctcaggctgtccttgcctgtttcctggacaaacatcatgacattatcatcatagaccacagaaatcctcgacagctggatgcagaggcactgtgcaggtctatcagatcatcaaaactctcagaaaacacagttattgttggtgtagtacgcagggtggatagagaagagttgtccgtaatgcctttcatttctgctggatttacaaggaggtatgtagaaaaccccaacatcatggcctgctacaatgaactgctccagctggagtttggagaggtgcgatcacaactgaaactcagggcttgtaactcagtattcactgcattagaaaacagtgaagatgcaattgaaattacaagcgaagaccgttttatacagtatgcaaatcctgcatttgaaacaacaatgggctatcagtcaggtgaattaatagggaaggagttaggagaagtgcctataaatgaaaaaaaggctgacttgctcgatactataaattcatgcatcaggataggcaaggagtggcaaggaatttactatgccaaaaagaaaaacggagataatatacaacaaaatgtgaagataatacctgtcattggacagggaggaaaaattagacactatgtgtccattatcagagtgtgcaatggcaacaataaggctgagaaaatatccgaatgtgttcagtctgacactcatacagataatcagacaggcaaacataaagacaggagaaaaggctcactagacgtcaaagctgttgcctcccgtgcaactgaagtttccagccagagacgacactcttccatggcccggatacattccatgacaattgaggcgcccatcaccaaggtaatcaatattatcaatgctgcccaggaaagtagtcccatgcctgtgacagaagccctagaccgtgtgctggaaattctaagaaccactgagttatattcaccacagtttggtgctaaagatgatgatccccatgccaatgaccttgttgggggcttaatgtctgatggtttgcgaagactatcagggaatgaatatgttctttcaacaaaaaacactcaaatggtttcaagcaatataatcactcccatctcccttgatgatgtcccaccacggatagctcgggccatggaaaatgaggaatactgggactttgatatttttgaactggaggctgccacccacaataggcctttgatttatcttggtctcaaaatgtttgctcgctttggaatctgtgaattcttacactgctccgagtcaacgctaagatcatggttacaaattatcgaagccaattatcattcctccaatccctaccacaattctacacattctgctgatgtgcttcatgccactgcctattttctctccaaggagaggataaaggaaactttagatccaattgatgaggtcgctgcactcatcgcagccaccattcatgatgtggatcaccctgggagaaccaactccttcctgtgtaatgctggaagtgagctggccattttgtacaatgacactgctgtgctggagagccaccatgcggccttggccttccagctgaccactggagatgataaatgcaatatatttaaaaacatggagaggaatgattatcggacactgcgccaggggattatcgacatggtcttagccacagaaatgacaaagcactttgagcatgtcaacaaatttgtcaacagcatcaacaaacccttggcaacactagaagaaaatggggaaactgataaaaaccaggaagtgataaacactatgcttaggactccagagaaccggaccctaatcaaacgaatgctgattaaatgtgctgatgtgtccaatccctgccgacccctgcagtactgcatcgagtgggctgcacgcatttcggaagaatatttttctcaggtaagttgctgcctcttttaagtttctagagagagagagagttaaaacccataaaatcatacgagataatggacttaacactaggaaatagggttctaaaaaaattctgtccttgtttgcaaggtaacaaatggtaactggtaacaaattttttttttcttaagaatattttattttccctttattcttgcaggatattttgttagatatagcatcctgggttgatgatttttttcctgaaagtacttttaaggagtcatctggtcttcatattctttctgagtagaaaaaacttctcttggggcagaaaaaaatattaggaaatatactggctaagatttttccagatttggtggagggcatatgcacatgcatatgcatacagattcaagaagcccagtgaaccttagcccatgtcagatgtgtcatagtcaagcagctaacaggctaaagataaatcttgcaatcagccagaggaaaagcgacacattacttataagaaaacagtgattctcatgtcctctgacttcccatcaaaaactatgaaggccagaagacacgggaacatctttaaagtgctgttagctttgggaggatcacttgagcccaggagtcttaagagcagcctgggcaacatggtgagaccttgtctctacaaaaaaattaaaagttagccgggcatagtgatgcactcctgtagtcccaagctacttgggaggctgaggcaggaggatcgcttgaagcccaggaggttgaggctgcagtgagccatgatcatgtc

SEQ ID NO: 314528 - DNA, 2099 bp, Homo sapiens
acgcgagatccgcgctcgccgccgcccgcccaggcggcgatgacacggcgcccgcggcggcccggaggcgccgggtgggccgtttgctgaccggatcgcggctacccgccagcgtgtccgcggcgccgccgccagcatgggctgtgccccgagcatccacatttccgagcgcctggtggccgaggacgcgcctagccccgcggcaccgccgctgtcgtccggcgggccgcgcctcccgcagggccagaagacggccgccttgccccggacccgcggcgccggcctcttggagtcggagcttcgcgacggcagcggcaagaaggtagcagtagctgatgtgcagtttggccccatgagatttcatcaagatcaacttcaggtacttttagtgtttaccaaagaagataaccaatgtaatggattctgcagggcatgtgaaaaagcagggtttaagtgtacagttaccaaggaggctcaggctgtccttgcctgtttcctggacaaacatcatgacattatcatcatagaccacagaaatcctcgacagctggatgcagaggcactgtgcaggtctatcagatcatcaaaactctcagaaaacacagttattgttggtgtagtacgcagggtggatagagaagagttgtccgtaatgcctttcatttctgctggatttacaaggaggtatgtagaaaaccccaacatcatggcctgctacaatgaactgctccagctggagtttggagaggtgcgatcacaactgaaactcagggcttgtaactcagtattcactgcattagaaaacagtgaagatgcaattgaaattacaagcgaagaccgttttatacagtatgcaaatcctgcatttgaaacaacaatgggctatcagtcaggtgaattaatagggaaggagttaggagaagtgcctataaatgaaaaaaaggctgacttgctcgatactataaattcatgcatcaggataggcaaggagtggcaaggaatttactatgccaaaaagaaaaacggagataatatacaacaaaatgtgaagataatacctgtcattggacagggagggtaagtggaaaaaacaagtacatcaatcaacatacagtgttttgggttattgcagaatttgctttgaatatttaagttaaggactgctgacagaagtgtcaaggtcaggtgtcatcacagaatggccttccagcatagtgttttcttggtgacttcctcatggctacagtctgaccctctacttgcagcccagagccaacatactctgggcagtcttgtttaagctgcgtggatacacaagaaactgaagtatttgtttaagtcagaatgtcactttagtaagttgtgtgataatactgactggtagactccctatattgaaaagattttttatctaatttgataggctatgtattatttctgcagagacctatcaaattagataaaaatattttaaatactaacagttatggacattcctatataaaacagatgtgactgtagattggaaaccagtatatatcaggagcctaaaactttcagacagtttatctcagaaacctatcttaaagaaataatatggtaagatgaaaattatgaatatgaattatagaacacctaaaatattgcagccattagaaatgatgatcatattcacaggttctaagatgagggccaaaaaaagtagaaatgatgatcatagaaaattaaattacctcatgcctgtaatcccagcactttgggaggccaaggtgggaaaatcccttgagcccaggagtttgggatccgcctgagcaatatagtgagacccccatccctacaaaaaatgtaaaaattagctaggtgtggtgacacacacctatcagttacttcagggggccgatgtgggagaatcgcttgatcttgggaggtcgaggctgcagtgagctatgatcatgccactgtactccagcctgggcaacaaagtaagacactgtctcaaaaggaaaaaaaaaaataaaatatgagaaaggttatgatacaatgttaaatgcaaaaagtaaaatgtaaaatgatagctagtgtttaatctcaatcatgta

SEQ ID NO: 314529 - DNA, 2625 bp, Homo sapiens
taaaaatcgaggcggggccgagaggctgcggcggctgactaggttttcggaccgcggcgcggcggggaagagagactgcggcgggagggccaggccgtgggagagacgcgggaaagtgcgggtcgcagaggcacttgaccaccccgccctaggccgacccggcggacgcggcgtctggtgtgcgggcgctggggcgggtcccaggtctccccgctgcgctgcttgaggctcggccatggcccagcagagagccctgccccagagcaaggagacgctgctgcagtcctacaacaagcggctgaaggacgacattaagtccatcatggacaacttcaccgagatcatcaagaccgccaagattgaggacgagacgcaggtgtcacgggccactcagggtgaacaggacaattacgagatgcatgtgcgagccgccaacatcgtccgagccggcgagtccctgatgaagctggtgtccgacctcaagcagttcctgatcctcaatgacttcccctccgtgaacgaggccattgaccagcgcaaccagcagctgcgcacactgcaggaggagtgcgaccggaagctcatcacgctgcgagacgagatctccattgacctctacgagctggaggaggagtattactcgtccaggtataaatagcgctggactccccatgcagagcgggagcctgcctacctgggcctggccagcaggcagggctgccttctgctttttcaaattcttgctggtcttagcagtggagccatgcctgggtttcagagcagagctcctggccagagcgtttgaccgacagacaattcacatccatatgccagggccctgggcctttcccacagtgcaatgtgatgaaaaccacaggactcacgccagtcggataggccgagtctggagaagggaggcgcctggctgtatcccccgcaggccctcttccgagagccttcctcctcgggcagtgcgttctggggctgtgctgctcctgttaccttctgaatccatatgtagagatttcagccaaggctgggccagccttttttgggcagtcaggtccacacctatgtccagggcaccagggatgcaattccatgtggatgtcaccaaaccccagtgtggaggcagggacagtcatgggaatgtgggggatgaagcccaggcagggaatggccttgaaagccattggagctccaattcgtgacccactcagccttatccacggagctggagccaacctacgtgccaggccccgtgctgggtcccagggatgcagaagggtcaaaacccatcatcctgacccttgtggggctccgtaagaagctgaaaccttcgaccgtttgagctggaggggccctgagaaatcagagtctacgtatcatttacttagggggaaacttaggctggagacagggaggccttccactctgccccattagcttagaaaatcaagattcagtccagcagatgcagagtccatgtccatcttgtgccttctcctggacaaacctttccttcctggtggtggatttaaaatactcctttctgcccattggccatgctgggagccacagatatccagagccagcatgacctggggcttggtttccctgccctgggctcagtggcactgctgagctgcagcagtcctagagttttccaggggttctgagggaatctttggtccccagtactcattaactcagcagacatgaggcagcatttcctccacactagggtggctgagaggggtcctagggtgtttcagacccttctgggcatctccttccacagctgttcagttgtcggtctctttgaggcagccaccgtccctgagggcccctgcacagagcagctgtgggcctgtaattcagcctgcctgccttgccttggggcagggagagagggaacctgctcacggccctgcagcagagcagggcgcaaacccaggacatctgtgccaggcttcccatgccctcccccaacagtccctcagcttcacccagcggggcttccaggccagcctgtgtcccctcccgcaggcctcctgtccacaccagcgccccctggggggcctcacacagcccctgtggcagaagcagttgccctcctctgtacattgcctttaagcgaccaggtcctggccgagtttcctctgccccttcttgctggtcccccaaagggcgctccgctccctgccctgccctgccctgttccgcatgagctgcgcctctgtgctcgcctgccccctctctgcttgttagttgctctttctggctctgcctctcctttgctttcctcgggatgccactctgtgcccaggacggttctgagactgaacactgagggcaggagcaagggaggaagccaggggcgaggcaggccgcgggaaagccagggcccctgcctgcaggttagaaagaggcgagcgtggattgtcacagctgcgggcatgggaagggctagctgagctcttcacctgcatcctggctgccgtgaggattccccgtgttagaggtggggacgcctgctggaggccgcctggctgatgtagggctatcgggaagtgccagggcctgtgttcccaactgtcgcccccttcaggctaagtctcaggc

SEQ ID NO: 314530 - DNA, 2589 bp, Homo sapiens
taaaaatcgaggcggggccgagaggctgcggcggctgactaggttttcggaccgcggcgcggcggggaagagagactgcggcgggagggccaggccgtgggagagacgcgggaaagtgcgggtcgcagaggcacttgaccaccccgccctaggccgacccggcggacgcggcgtctggtgtcccaggtctccccgctgcgctgcttgaggctcggccatggcccagcagagagccctgccccagagcaaggagacgctgctgcagtcctacaacaagcggctgaaggacgacattaagtccatcatggacaacttcaccgagatcatcaagaccgccaagattgaggacgagacgcaggtgtcacgggccactcagggtgaacaggacaattacgagatgcatgtccgagccggcgagtccctgatgaagctggtgtccgacctcaagcagttcctgatcctcaatgacttcccctccgtgaacgaggccattgaccagcgcaaccagcagctgcgcacactgcaggaggagtgcgaccggaagctcatcacgctgcgagacgagatctccattgacctctacgagctggaggaggagtattactcgtccaggtataaatagcgctggactccccatgcagagcgggagcctgcctacctgggcctggccagcaggcagggctgccttctgctttttcaaattcttgctggtcttagcagtggagccatgcctgggtttcagagcagagctcctggccagagcgtttgaccgacagacaattcacatccatatgccagggccctgggcctttcccacagtgcaatgtgatgaaaaccacaggactcacgccagtcggataggccgagtctggagaagggaggcgcctggctgtatcccccgcaggccctcttccgagagccttcctcctcgggcagtgcgttctggggctgtgctgctcctgttaccttctgaatccatatgtagagatttcagccaaggctgggccagccttttttgggcagtcaggtccacacctatgtccagggcaccagggatgcaattccatgtggatgtcaccaaaccccagtgtggaggcagggacagtcatgggaatgtgggggatgaagcccaggcagggaatggccttgaaagccattggagctccaattcgtgacccactcagccttatccacggagctggagccaacctacgtgccaggccccgtgctgggtcccagggatgcagaagggtcaaaacccatcatcctgacccttgtggggctccgtaagaagctgaaaccttcgaccgtttgagctggaggggccctgagaaatcagagtctacgtatcatttacttagggggaaacttaggctggagacagggaggccttccactctgccccattagcttagaaaatcaagattcagtccagcagatgcagagtccatgtccatcttgtgccttctcctggacaaacctttccttcctggtggtggatttaaaatactcctttctgcccattggccatgctgggagccacagatatccagagccagcatgacctggggcttggtttccctgccctgggctcagtggcactgctgagctgcagcagtcctagagttttccaggggttctgagggaatctttggtccccagtactcattaactcagcagacatgaggcagcatttcctccacactagggtggctgagaggggtcctagggtgtttcagacccttctgggcatctccttccacagctgttcagttgtcggtctctttgaggcagccaccgtccctgagggcccctgcacagagcagctgtgggcctgtaattcagcctgcctgccttgccttggggcagggagagagggaacctgctcacggccctgcagcagagcagggcgcaaacccaggacatctgtgccaggcttcccatgccctcccccaacagtccctcagcttcacccagcggggcttccaggccagcctgtgtcccctcccgcaggcctcctgtccacaccagcgccccctggggggcctcacacagcccctgtggcagaagcagttgccctcctctgtacattgcctttaagcgaccaggtcctggccgagtttcctctgccccttcttgctggtcccccaaagggcgctccgctccctgccctgccctgccctgttccgcatgagctgcgcctctgtgctcgcctgccccctctctgcttgttagttgctctttctggctctgcctctcctttgctttcctcgggatgccactctgtgcccaggacggttctgagactgaacactgagggcaggagcaagggaggaagccaggggcgaggcaggccgcgggaaagccagggcccctgcctgcaggttagaaagaggcgagcgtggattgtcacagctgcgggcatgggaagggctagctgagctcttcacctgcatcctggctgccgtgaggattccccgtgttagaggtggggacgcctgctggaggccgcctggctgatgtagggctatcgggaagtgccagggcctgtgttcccaactgtcgcccccttcaggctaagtctcaggc

SEQ ID NO: 314531 - DNA, 2299 bp, Homo sapiens
taaaaatcgaggcggggccgagaggctgcggcggctgactaggttttcggaccgcggcgcggcggggaagagagactgcggcgggagggccaggccgtgggagagacgcgggaaagtgcgggtcgcagaggcacttgaccaccccgccctaggccgacccggcggacgcggcgtctggtgtgcgggcgctggggcgggtcccaggtctccccgctgcgctgcttgaggctcggccatggcccagcagagagccctgccccagagcaaggagacgctgctgcagtcctacaacaagcggctgaaggacgacattaagtccatcatggacaacttcaccgagatcatcaagaccgccaagattgaggacgagacgcaggtgtcacgggccactcagggtgaacaggacaattacgagatgcatgtgcgagccgccaacatcgtccgagccggcgagtccctgatgaagctggtgtccgacctcaagcagttcctgatcctcaatgacttcccctccgtgaacgaggccattgaccagcgcaaccagcagctgcgcacactgcaggaggagtgcgaccggaagctcatcacgctgcgagacgagatctccattgacctctacgagctggaggaggagtattactcgtccaggtataaatagcgctggactccccatgcagagcgggagcctgcctacctgggcctggccagcaggcagggctgccttctgctttttcaaattcttgctggtcttagcagtggagccatgcctgggtttcagagcagagctcctggccagagcgtttgaccgacagacaattcacatccatatgccagggccctgggcctttcccacagtgcaatgtgatgaaaaccacaggactcacgccagtcggataggccgagtctggagaagggaggcgcctggctgtatcccccgcaggccctcttccgagagccttcctcctcgggcagtgcgttctggggctgtgctgctcctgttacctttgaaaccttcgaccgtttgagctggaggggccctgagaaatcagagtctacgtatcatttacttagggggaaacttaggctggagacagggaggccttccactctgccccattagcttagaaaatcaagattcagtccagcagatgcagagtccatgtccatcttgtgccttctcctggacaaacctttccttcctggtggtggatttaaaatactcctttctgcccattggccatgctgggagccacagatatccagagccagcatgacctggggcttggtttccctgccctgggctcagtggcactgctgagctgcagcagtcctagagttttccaggggttctgagggaatctttggtccccagtactcattaactcagcagacatgaggcagcatttcctccacactagggtggctgagaggggtcctagggtgtttcagacccttctgggcatctccttccacagctgttcagttgtcggtctctttgaggcagccaccgtccctgagggcccctgcacagagcagctgtgggcctgtaattcagcctgcctgccttgccttggggcagggagagagggaacctgctcacggccctgcagcagagcagggcgcaaacccaggacatctgtgccaggcttcccatgccctcccccaacagtccctcagcttcacccagcggggcttccaggccagcctgtgtcccctcccgcaggcctcctgtccacaccagcgccccctggggggcctcacacagcccctgtggcagaagcagttgccctcctctgtacattgcctttaagcgaccaggtcctggccgagtttcctctgccccttcttgctggtcccccaaagggcgctccgctccctgccctgccctgccctgttccgcatgagctgcgcctctgtgctcgcctgccccctctctgcttgttagttgctctttctggctctgcctctcctttgctttcctcgggatgccactctgtgcccaggacggttctgagactgaacactgagggcaggagcaagggaggaagccaggggcgaggcaggccgcgggaaagccagggcccctgcctgcaggttagaaagaggcgagcgtggattgtcacagctgcgggcatgggaagggctagctgagctcttcacctgcatcctggctgccgtgaggattccccgtgttagaggtggggacgcctgctggaggccgcctggctgatgtagggctatcgggaagtgccagggcctgtgttcccaactgtcgcccccttcaggctaagtctcaggc

SEQ ID NO: 314532 - DNA, 1447 bp, Homo sapiens
taaaaatcgaggcggggccgagaggctgcggcggctgactaggttttcggaccgcggcgcggcggggaagagagactgcggcgggagggccaggccgtgggagagacgcgggaaagtgcgggtcgcagaggcacttgaccaccccgccctaggccgacccggcggacgcggcgtctggtgtgcgggcgctggggcgggtcccaggtctccccgctgcgctgcttgaggctcggccatggcccagcagagagccctgccccagagcaaggagacgctgctgcagtcctacaacaagcggctgaaggacgacattaagtccatcatggacaacttcaccgagatcatcaagaccgccaagattgaggacgagacgcaggtgtcacgggccactcagggtgaacaggacaattacgagatgcatgtgcgagccgccaacatcgtccgagccggcgagtccctgatgaagctggtgtccgacctcaagcagttcctgatcctcaatgacttcccctccgtgaacgaggccattgaccagcgcaaccagcagctgcgcacactgcaggaggagtgcgaccggaagctcatcacgctgcgagacgagatctccattgacctctacgagctggaggaggagtattactcgtccagctcaagcctttgcgaagctaatgacctgcctctgtgcgaagcttacgggaggctggacctcgacacagactctgctgatggcctctcggcccctctgctggcgtccccggagcccagtgctggccccctacaggtggcagcccctgcccactcccatgctggtggccctggccccactgagcacgcctgagcctccggggccacgcttcgttctcaggaacaaaacctgaggcagccctttggatgccctcacagccttgcttctctcagcctaggttcccatttggggacttcaggaccccagagccactaggacttccttgggaagcccgttagcccagggtgggtcccgccaggacagtagggaaacagttgtttccctagccatttccgaatagcccatcattccgagtcatcatctctgtttgctgccttcctggccagccaggtggaagaaagtttccaagctaggtctggcccgttggggatctcagcagtggggcaggagggtgcctgatttcgggggagtcctgacccgagcctgttgtcagagttgggaggggctctgagcagtgttgggcaggccgggtctcccatcccgaggccagcgttcctgtgcagaggcccatccactggttcttgccctgagccacatatgtctgtgccatgggctgagtgccacgacaggcccgtgtgacagctgctgcccacgcatgtggaagctaggtgggactcattcctaattctgccgttgtaatgagacttgattaaaacaccgccacttttttgcattgctgct

SEQ ID NO: 314533 - DNA, 1221 bp, Homo sapiens
taaaaatcgaggcggggccgagaggctgcggcggctgactaggttttcggaccgcggcgcggcggggaagagagactgcggcgggagggccaggccgtgggagagacgcgggaaagtgcgggtcgcagaggcacttgaccaccccgccctaggccgacccggcggacgcggcgtctggtgtgcgggcgctggggcgggtcccaggtctccccgctgcgctgcttgaggctcggccatggcccagcagagagccctgccccagagcaaggagacgctgctgcagtcctacaacaagcggctgaaggacgacattaagtccatcatggacaacttcaccgagatcatcaagaccgccaagattgaggacgagacgcaggtgtcacgggccactcagggtgaacaggacaattacgagatgcatgtgcgagccgccaacatcgtccgagccggcgagtccctgatgaagctggtgtccgacctcaagcagttcctgatcctcaatgacttcccctccgtgaacgaggccattgaccagcgcaaccagcagctgcgcacactgcaggaggagtgcgaccggaagctcatcacgctgcgagacgagatctccattgacctctacgagctggaggaggagtattactcgtccagctcaagcctttgcgaagctaatgacctgcctctgtgcgaagcttacgggaggctggacctcgacacagactctgctgatggcctctcggcccctctgctggcgtccccggagcccagtgctggccccctacaggtggcagcccctgcccactcccatgctggtggccctggccccactgagcacgcctgagcctccggggccacgcttcgttctcaggaacaaaacctgaggcagccctttggatgccctcacagccttgcttctctcagcctaggttcccatttggggacttcaggaccccagagccactaggacttccttgggaagcccgttagcccagggtgggtcccgccaggacagtagggaaacagttgtttccctagccatttccgaatagcccatccactggttcttgccctgagccacatatgtctgtgccatgggctgagtgccacgacaggcccgtgtgacagctgctgcccacgcatgtggaagctaggtgggactcattcctaattctgccgttgtaatgagacttgattaaaacaccgccacttttttgcattgctgct

SEQ ID NO: 314534 - DNA, 685 bp, Homo sapiens
taaaaatcgaggcggggccgagaggctgcggcggctgactaggttttcggaccgcggcgcggcggggaagagagactgcggcgggagggccaggccgtgggagagacgcgggaaagtgcgggtcgcagaggcacttgaccaccccgccctaggccgacccggcggacgcggcgtctggtgtgcgggcgctggggcgggtcccaggtctccccgctgcgctgcttgaggctcggccatggcccagcagagagccctgccccagagcaaggagacgctgctgcagtcctacaacaagcggctgaaggacgacattaagtccatcatggacaacttcaccgagatcatcaagaccgccaagattgaggacgagacgcaggtgtcacgggccactcagggtgaacaggacaattacgagatgcatgtgcgagccgccaacatcgtccgagccggcgagtccctgatgaagctggtgtccgacctcaagcagttcctgatcctcaatgacttcccctccgtgaacgaggccattgaccagcgcaaccagcagctgcgcacactgcaggaggagtgcgaccggaagctcatcacgctgcgagacgagatctccattgacctctacgagctggaggaggagtattactcgtccagctggcaaaactcaaggctcagaaactgcagggccccc

SEQ ID NO: 314535 - DNA, 1229 bp, Homo sapiens
acagtctgccctcagagagctctttgcagtgtagtgacactggggtttctgcagtcagggaggagggagggtggccaggctgacagctttttgcaagaggagggggaccagcaccagctgggaggcataggctaggacaggcccacgtggaggctgggcaggaagggcctgctgaggtcacacagctgttggtggttgggccagggcggcttcctcctttcagaatgctagggtggctctcaccactggccgcctctccttgccaggcctgccaactcaggggacagatggagcaggagtggagaaagggaaaggcaggtctggggtgtggtcgtgttttcttaactctgcttctgtcttgctctcccctcccctggctttcctctctgcctgctcctgtctctccctggggtttctggtggtggaaaagctcaagcctttgcgaagctaatgacctgcctctgtgcgaagcttacgggaggctggacctcgacacagactctgctgatggcctctcggcccctctgctggcgtccccggagcccagtgctggccccctacaggtggcagcccctgcccactcccatgctggtggccctggccccactgagcacgcctgagcctccggggccacgcttcgttctcaggaacaaaacctgaggcagccctttggatgccctcacagccttgcttctctcagcctaggttcccatttggggacttcaggaccccagagccactaggacttccttgggaagcccgttagcccagggtgggtcccgccaggacagtagggaaacagttgtttccctagccatttccgaatagcccatcattccgagtcatcatctctgtttgctgccttcctggccagccaggtggaagaaagtttccaagctaggtctggcccgttggggatctcagcagtggggcaggagggtgcctgatttcgggggagtcctgacccgagcctgttgtcagagttgggaggggctctgagcagtgttgggcaggccgggtctcccatcccgaggccagcgttcctgtgcagaggcccatccactggttcttgccctgagccacatatgtctgtgccatgggctgagtgccacgacaggcccgtgtgacagctgctgcccacgcatgtggaagctaggtgggactcattcctaattctgccgttgtaatgagacttgattaaaacaccgccacttttttgcattgctgct

SEQ ID NO: 314536 - DNA, 1016 bp, Homo sapiens
gagtagattgctccagtgtactgtccgcaggggagcgctttgctttctctgattatagttctgaggccctagctactcactttgcaaactccaggctccggtcgcgcacgggacgaactgcggggagtgagccgcgcgggccgccgtagtcagctgctaagagcaggaagagtccgagcggcgggcggagtctgcaggatggcaccggacccctggttctccacatacgattctacttgtcaaattgcccaagaaattgctgagaaaattcaacaacgaaatcaatatgaacgaaaaggtgaaaaggcaccaaagcttaccgtgacaatcagagctttgttgcagaacctgaaggaaaagatcgcccttttgaaggacttattgctaagagctgtgtcaacacatcagataacacagcttgaaggggaccgaagacagaacctcttggatgatcttgtaactcgagagagactacttctggcatcctttaagaatgagggtgccgaaccagatctaatcaggtccagcctgatgagtgaagaggctaagcgaggagcacccaacccttggctctttgaggagccagaggagaccagaggcttgggttttgatgaaatccggcaacagcagcagaaaattatccaagaacaggatgcaggccttgatgccctttcctctatcataagtcgccaaaaacaaatggggcaggaaattgggaatgaattggatgaacaaaatgagataattgacgaccttgccaacctagtggagaacacagatgaaaaacttcgcaatgaaaccaggcgggtaaacatggtggacagaaagtcagcctcttgtgggatgatcatggtgattttactgctgcttgtggctatcgtggttgttgcagtctggccgaccaactgatggcagtaaagagaccaccagcagtgacacctggcaatgacagatgcaagcccaacacccttttggtacgcaaaacctgctctcaataaattcccccaaagctctga

SEQ ID NO: 314537 - DNA, 804 bp, Homo sapiens
gagtagattgctccagtgtactgtccgcaggggagcgctttgctttctctgattatagttctgaggccctagctactcactttgcaaactccaggctccggtcgcgcacgggacgaactgcggggagtgagccgcgcgggccgccgtagtcagctgctaagagcaggaagagtccgagcggcgggcggagtctgcaggatggcaccggacccctggttctccacatacgattctacttgtcaaattgcccaagaaattgctgagaaaattcaacaacgaaatcaatatgaacgaaaaggtgaaaaggcaccaaagcttaccgtgacaatcagagctttgttgcagaacctgaaggaaaagatcgcccttttgaaggacttattgctaagagctgtgtcaacacatcagataacacagcttgaaggggaccgaagacagaacctcttggatgatcttgtaactcgagagagactacttctggcatcctttaagaatgagggtgccgaaccagatctaatcaggtccagcctgatgagtgaagaggctaagcgaggagcacccaacccttggctctttgaggagccagaggagaccagaggcttgggttttgatgaaatccggcaacagcagcagaaaattatccaagaacaggatgcaggccttgatgccctttcctctatcataagtcgccaaaaacaaatggggcaggaaattgggaatgaattggatgaacaaaatgagataattgacgacctttgccacctagtggagaacacagatgatcttgtggaattgatcatgtga

SEQ ID NO: 314538 - DNA, 372 bp, Homo sapiens
ttaggaagaactttctaatgattgaaattcatcatggaatcactgcaatggccgcaaacagaggcgtctaagagactgggaaagtggccggcctgagataattgacgaccttgccaacctagtggagaacacagatgaaaaacttcgcaatgaaaccaggcgggtaaacatggtggacagaaagtcagcctcttgtgggatgatcatggtgattttactgctgcttgtggctatcgtggttgttgcagtctggccgaccaactgatggcagtaaagagaccaccagcagtgacacctggcaatgacagatgcaagcccaacacccttttggtacgcaaaacctgctctcaataaattcccccaaagctctga

SEQ ID NO: 314539 - DNA, 1150 bp, Homo sapiens
gagtagattgctccagtgtactgtccgcaggggagcgctttgctttctctgattatagttctgaggccctagctactcactttgcaaactccaggctccggtcgcgcacgggacgaactgcggggagtgagccgcgcgggccgccgtagtcagctgctaagagcaggaagagtccgagcggcgggcggagtctgcaggatggcaccggacccctggttctccacatacgattctacttgtcaaattgcccaagaaattgctgagaaaattcaacaacgaaatcaatatgaacgaaaaggtgaaaaggcaccaaagcttaccgtgacaatcagagctttgttgcagaacctgaaggaaaagatcgcccttttgaaggacttattgctaagagctgtgtcaacacatcagataacacagcttgaaggggaccgaagacagaacctcttggatgatcttgtaactcgagagagactacttctggcatcctttaagaatgagggtgccgaaccagatctaatcaggtccagcctgatgagtgaagaggctaagcgaggagcacccaacccttggctctttgaggagccagaggagaccagaggcttgggttttgatgaaatccggcaacagcagcagaaaattatccaagaacaggatgcaggccttgatgccctttcctctatcataagtcgccaaaaacaaatggggcaggaaattgggaatgaattggatgaacaaaatgagataattgacgaccttgccaacctagtggagaacacagatgaaaaacttcgcaatgaaaccaggcgggtaaacatggtggacagaaagtcagcctcttgtgggatgatcatggtgattttactgctgcttgtggctatcgtggttgttgcagtctggccgaccaactgatggcagtaaagagaccaccagcagtgacacctggcaatgacagatgcaagcccaacacccttttggtacgcaaaacctgctctcaataaattcccccaaagctctgagtctggaaaaaaacaacaacaaacaaaaccgcggggctttgcggggggacaaaggtataagggacgggtatagtggttctgcaccctttgtaaaggggatgcgggcccaagggggataatgaaaacgtactaac

SEQ ID NO: 314540 - DNA, 994 bp, Homo sapiens
gagtagattgctccagtgtactgtccgcaggggagcgctttgctttctctgattatagttctgaggccctagctactcactttgcaaactccaggctccggtcgcgcacgggacgaactgcggggagtgagccgcgcgggccgccgtagtcagctgctaagagcaggaagagtccgagcggcgggcggagtctgcaggatggcaccggacccctggttctccacatacgattctacttgtcaaattgcccaagaaattgctgagaaaattcaacaacgaaatcaatatgaacgaaaaggtgaaaaggcaccaaagcttaccgtgacaatcagagctttgttgcagaacctgaaggaaaagatcgcccttttgaaggacttattgctaagagctgtgtcaacacatcagataacacagcttgaaggggaccgaagacagaacctcttggatgatcttgtaactcgagagagactacttctggcatcctttaagaatgagggtgccgaaccagatctaatcaggtccagcctgatgagtgaagaggctaagcgaggagcacccaacccttggctctttgaggagccagaggagaccagaggcttgggttttgatgaaatccggcaacagcagcagaaaattatccaagaacaggatgcaggccttgatgccctttcctctatcataagtcgccaaaaacaaatggggcaggaaattgggaatgaattggatgaacaaaatgagataattgacgaccttgccaacctagtggagaacacagatgaaaaacttcgcaatgaaaccaggcgggtaaacatggtggacagaaagtcagcctcttgtgggatgatcatggtgattttactgctgcttgtggctatcgtggttgttgcagtctggccgaccaacagcagtgacacctggcaatgacagatgcaagcccaacacccttttggtacgcaaaacctgctctcaataaattcccccaaagctctga

SEQ ID NO: 314541 - DNA, 1255 bp, Homo sapiens
gagtagattgctccagtgtactgtccgcaggggagcgctttgctttctctgattatagttctgaggccctagctactcactttgcaaactccaggctccggtcgcgcacgggacgaactgcggggagtgagccgcgcgggccgccgtagtcagctgctaagagcaggaagagtccgagcggcgggcggagtctgcaggatggcaccggacccctgatggagtctcacagtgtcgccgggctggagtgcaatggtgtgatctcagctcactgcaaccttcgcctcctgggttcaagcgattctcctgcctcagcctcccaagtagctgggattacaggcacccgccaccatgcctggctaattttttgtatttttagttgagacggggtttcactatgttggccaggctggtctcgaacttctgacctcatgatctgcccgcctcggcctcccaaagtgctgggattacaagcgtgagccaccgcatccggtctgcttaagtattttctatatgatagaaagtaaaaatgctctgagagaagcaaaacataaggggctattgggagttcaccgtgaacccttcaaagcctccaacgctgctgaatgacaactagaagcttattaaatgttttgagagaattctggcaagctcagatgtcaggttctccacatacgattctacttgtcaaattgcccaagaaattgctgagaaaattcaacaacgaaatcaatatgaacgaaaaggtgaaaaggcaccaaaggtccagcctgatgagtgaagaggctaagcgaggagcacccaacccttggctctttgaggagccagaggagaccagaggcttgggttttgatgaaatccggcaacagcagcagaaaattatccaagaacaggatgcaggccttgatgccctttcctctatcataagtcgccaaaaacaaatggggcaggaaattgggaatgaattggatgaacaaaatgagataattgacgaccttgccaacctagtggagaacacagatgaaaaacttcgcaatgaaaccaggcgggtaaacatggtggacagaaagtcagcctcttgtgggatgatcatggtgattttactgctgcttgtggctatcgtggttgttgcagtctggccgaccaactgatggcagtaaagagaccaccagcagtgacacctggcaatgacagatgcaagcccaacacccttttggtacgcaaaacctgctctcaataaattcccccaaagctctga

SEQ ID NO: 314542 - DNA, 782 bp, Homo sapiens
gagtagattgctccagtgtactgtccgcaggggagcgctttgctttctctgattatagttctgaggccctagctactcactttgcaaactccaggctccggtcgcgcacgggacgaactgcggggagtgagccgcgcgggccgccgtagtcagctgctaagagcaggaagagtccgagcggcgggcggagtctgcaggatggcaccggacccctggttctccacatacgattctacttgtcaaattgcccaagaaattgctgagaaaattcaacaacgaaatcaatatgaacgaaaaggtgaaaaggcaccaaagcttaccgtgacaatcagagctttgttgcagaacctgaaggaaaagatcgcccttttgaaggacttattgctaagagctgtgtcaacacatcagataacacagcttgaaggggaccgaagacagaacctcttggatgatcttgtaactcgagagagactacttctggcatcctttaagaatgagggtgccgaaccagatctaatcaggtccagcctgatgagtgaagaggctaagcgaggagcacccaacccttggctctttgaggagccagaggagaccagaggcttgggttttgatgaaatccggcaacagcagcagaaaattatccaagaacaggatgcaggccttgatgccctttcctctatcataagtcgccaaaaacaaatggggcaggaaattgggaatgaattggatgaacaaaatggtaagaataagtctgggattgaccagatttgccgttgacataa

SEQ ID NO: 314543 - DNA, 685 bp, Homo sapiens
gagtagattgctccagtgtactgtccgcaggggagcgctttgctttctctgattatagttctgaggccctagctactcactttgcaaactccaggctccggtcgcgcacgggacgaactgcggggagtgagccgcgcgggccgccgtagtcagctgctaagagcaggaagagtccgagcggcgggcggagtctgcaggatggcaccggacccctggttctccacatacgattctacttgtcaaattgcccaagaaattgctgagaaaattcaacaacgaaatcaatatgaacgaaaaggtgaaaaggcaccaaagaacaggatgcaggccttgatgccctttcctctatcataagtcgccaaaaacaaatggggcaggaaattgggaatgaattggatgaacaaaatgagataattgacgaccttgccaacctagtggagaacacagatgaaaaacttcgcaatgaaaccaggcgggtaaacatggtggacagaaagtcagcctcttgtgggatgatcatggtgattttactgctgcttgtggctatcgtggttgttgcagtctggccgaccaactgatggcagtaaagagaccaccagcagtgacacctggcaatgacagatgcaagcccaacacccttttggtacgcaaaacctgctctcaataaattcccccaaagctctga

SEQ ID NO: 314544 - DNA, 626 bp, Homo sapiens
gagtagattgctccagtgtactgtccgcaggggagcgctttgctttctctgattatagttctgaggccctagctactcactttgcaaactccaggctccggtcgcgcacgggacgaactgcggggagtgagccgcgcgggccgccgtagtcagctgctaagagcaggaagagtccgagcggcgggcggagtctgcaggatggcaccggacccctggttctccacatacgattctacttgtcaaattgcccaagaaattgctgagaaaattcaacaacgaaatcaatatgaacgaaaaggtgaaaaggcaccaaagcttaccgtgacaatcagagctttgttgcagaacctgaaggaaaagatcgcccttttgaaggacttattgctaagagctgtgtcaacacatcagataacacagcttgaaggggaccgaagacagaacctcttggatgatcttgtaactcgagagagactacttctggcatcctttaagaatgagggtgccgaaccagatctaatcaggaccagaagtctaggatggttcagaataaggttctagaagaattctgtttaaaaataatgtaagtactgtcaaggagaaatgactcctgtggagtgatttggaga

SEQ ID NO: 314545 - DNA, 391 bp, Homo sapiens
gcttccaggctcacccccatcttagttaaacctgcagaggggatgttaattagcaaagactggcgctcagggagttgggggagctcttagccctctcccttccaagaaagatgaccttttggacccaaaaaggagaattgggctccagttgctctcgttcgaggcactcggagtgcttcccacgtatctcatttatcctcatgacaccccagagagggatgatcatggtgattttactgctgcttgtggctatcgtggttgttgcagtctggccgaccaactgatggcagtaaagagaccaccagcagtgacacctggcaatgacagatgcaagcccaacacccttttggtacgcaaaacctgctctcaataaattcccccaaagctctga

SEQ ID NO: 314546 - DNA, 247 bp, Homo sapiens
aacaaccacagctgtgatactgtgatgtgaaccggggtatttcaggaatagtaatcatgtatgtttcctttctagagataattgacgaccttgccaacctagtggagaacacagatgaaaaacttcgcaatgaaaccaggcgggtaaacatggtggacagaaagtcagcctcttgtggtaagagatagctacgttatggctctgtttctgtcatagcttgtggatttactctgctctgagtttcctg

SEQ ID NO: 314547 - DNA, 453 bp, Homo sapiens
caccttacctcttgataccttgtatgtaaaatggggattcatatgccaagataagaatcgcttggagggccttgcttaaaatactgatcctgaggccctcccctggggattctgattgagtagatctagggtggagttccaagaatgttccattatttaacaagtgtaccaagcagttctgctgcaggtgcttgttctgcagaaattctgatgcagacttttgtgaggtttaaattgtgtattgccggtgcacagtgccttgcccaaaggtacgtgatgataaatgatgggaatagcagtagtaatcacagtaattgtttttgggtgcttcgtctcacaagggtgcaccaagattataaagctgacatatttatgaaaactagaatcacaggccacctgcagtggctcaggagtttgagaccagcctgggcaacatagcaagacctctctgtc

SEQ ID NO: 314548 - DNA, 1058 bp, Homo sapiens
gagtagattgctccagtgtactgtccgcaggggagcgctttgctttctctgattatagttctgaggccctagctactcactttgcaaactccaggctccggtcgcgcacgggacgaactgcggggagtgagccgcgcgggccgccgtagtcagctgctaagagcaggaagagtccgagcggcgggcggagtctgcaggatggcaccggacccctggttctccacatacgattctacttgtcaaattgcccaagaaattgctgagaaaattcaacaacgaaatcaatatgaacgaaaaggtgaaaaggcaccaaagcttaccgtgacaatcagagctttgttgcagaacctgaaggaaaagatcgcccttttgaaggacttattgctaagagctgtgtcaacacatcagataacacagcttgaaggggaccgaagacagaacctcttggatgatcttgtaactcgagagagactacttctggcatcctttaagaatgagggtgccgaaccagatctaatcaggtccagcctgatgagtgaagaggctaagcgaggagcacccaacccttggctctttgaggagccagaggagaccagaggcttgggttttgatgaaatccggcaacagcagcagaaaattatccaagaacaggatgcaggccttgatgccctttcctctatcataagtcgccaaaaacaaatggggcaggaaattgggaatgaattggatgaacaaaatgagataattgacgaccttgccaacctagtggagaacacagatgaaaaacttcgcaatgaaaccaggcgggtaaacatggtggacagaaagtcagcctcttgtgggatgatcatggtgattttactgctgcttgtggctatcgtggttgttgcagtctggccgaccaactgatggcagtaaagagaccaccagcagtgacacctggcaatgacagatgcaagcccaacacccttttggtacgcaaaacctgctctcaataaattcccccaaagctctgaaaaaaaaaagtcgacgcggccgcgaatttagtagtagtagta

SEQ ID NO: 314549 - DNA, 1507 bp, Homo sapiens
gagtagattgctccagtgtactgtccgcaggggagcgctttgctttctctgattatagttctgaggccctagctactcactttgcaaactccaggctccggtcgcgcacgggacgaactgcggggagtgagccgcgcgggccgccgtagtcagctgctaagagcaggaagagtccgagcggcgggcggagtctgcaggatggcaccggacccctggttctccacatacgattctacttgtcaaattgcccaagaaattgctgagaaaattcaacaacgaaatcaatatgaacgaaaaggtgaaaaggcaccaaagcttaccgtgacaatcagagctttgttgcagaacctgaaggaaaagatcgcccttttgaaggacttattgctaagagctgtgtcaacacatcagataacacagcttgaaggggaccgaagacagaacctcttggatgatcttgtaactcgagagagactacttctggcatcctttaagaatgagggtgccgaaccagatctaatcaggtccagcctgatgagtgaagaggctaagcgaggagcacccaacccttggctctttgaggagccagaggagaccagaggcttgggttttgatgaaatccggcaacagcagcagaaaattatccaagaacaggatgcaggccttgatgccctttcctctatcataagtcgccaaaaacaaatggggcaggaaattgggaatgaattggatgaacaaaatgagataattgacgaccttgccaacctagtggagaacacagatgaaaaacttcgcaatgaaaccaggcgggtaaacatggtggacagaaagtcagcctcttgtggtaagagatagctacgttatggctctgtttctgtcatagcttgtggatttactctgctctgagtttcctgtttgtctaattactgtggggatttggttgctcttctgatacaggcagttccatttgatgaagcactgaaattgctaaacaatggttaaatctggtcaaaatgaaatggagttcaaagggcatatcattcattgtttttttgttgttgtttttgtttttaatttaaaagtcctttctgtgtgtttacagagattaatggtttgggaaattgtataacattatactggttggcgggttttaaaggggatctcacttgcttttgtgccgtcttaaaataaccacaagcttaattgagttcaaatcctatgtttagtgatggtatctttgtcaagtcaccttacctcttgataccttgtatgtaaaatggggattcatatgccaagataagaatcgcttggagggccttgcttaaaatactgatcctgaggccctcccctggggattctgattgagtagatctagggtggagttccaagaatgttccattatttaacaagtgtaccaagcagttctgctgcaggtgcttgttctgcagaaattctgatgcagacttttgtgaggtttaaattgtgtattgccggtgcacagtgccttgcc

SEQ ID NO: 314550 - DNA, 1298 bp, Homo sapiens
gagtagattgctccagtgtactgtccgcaggggagcgctttgctttctctgattatagttctgaggccctagctactcactttgcaaactccaggctccggtcgcgcacgggacgaactgcggggagtgagccgcgcgggccgccgtagtcagctgctaagagcaggaagagtccgagcggcgggcggagtctgcaggatggcaccggacccctggttctccacatacgattctacttgtcaaattgcccaagaaattgctgagaaaattcaacaacgaaatcaatatgaacgaaaaggtgaaaaggcaccaaagcttaccgtgacaatcagagctttgttgcagaacctgaaggaaaagatcgcccttttgaaggacttattgctaagagctgtgtcaacacatcagataacacagcttgaaggggaccgaagacagaacctcttggatgatcttgtaactcgagagagactacttctggcatcctttaagaatgagggtgccgaaccagatctaatcaggtccagcctgatgagtgaagaggctaagcgaggagcacccaacccttggctctttgaggagccagaggagaccagaggcttgggttttgatgaaatccggcaacagcagcagaaaattatccaagaacaggatgcaggccttgatgccctttcctctatcataagtcgccaaaaacaaatggggcaggaaattgggaatgaattggatgaacaaaatgagataattgacgaccttgccaacctagtggagaacacagatgaaaaacttcgcaatgaaaccaggcgggtaaacatggtggacagaaagtcagcctcttgtgggatgatcatggtgattttactgctgcttgtggctatcgtggttgttgcagtctggccgaccaactgatggcagtaaagagaccaccagcagtgacacctggcaatgacagatgcaagcccaacacccttttggtacgcaaaacctgctctcaataaattcccccaaagctctgaaaaaaaaaacaaaaaagggcgcgcacaaataccccaggggcaacacaggtaccccattcggtaacaggggccccacaggagcgaaacacacgacgcgccgcagaaaagcacggaaggaaaggacacgacacagagaacaccaccctgggggaaaaagcgcaccaacaaaagcagaaaacgacgacagagaacacactggcgaagtgttaacacaaagaagcaacacacaccgacgaagacaagaagcagacagcagagcatcacaccagcaacatcaaacag

SEQ ID NO: 314551 - DNA, 1824 bp, Homo sapiens
  misc_feature (862)..(862): n is a, c, g, or t
  misc_feature (884)..(884): n is a, c, g, or t
gagtagattgctccagtgtactgtccgcaggggagcgctttgctttctctgattatagttctgaggccctagctactcactttgcaaactccaggctccggtcgcgcacgggacgaactgcggggagtgagccgcgcgggccgccgtagtcagctgctaagagcaggaagagtccgagcggcgggcggagtctgcaggatggcaccggacccctgatggagtctcacagtgtcgccgggctggagtgcaatggtgtgatctcagctcactgcaaccttcgcctcctgggttcaagcgattctcctgcctcagcctcccaagtagctgggattacaggcacccgccaccatgcctggctaattttttgtatttttagttgagacggggtttcactatgttggccaggctggtctcgaacttctgacctcatgatctgcccgcctcggcctcccaaagtgctgggattacaagcgtgagccaccgcatccggtctgcttaagtattttctatatgatagaaagtaaaaatgctctgagagaagcaaaacataaggggctattgggagttcaccgtgaacccttcaaagcctccaacgctgctgaatgacaactagaagcttattaaatgttttgagagaattctggcaagctcagatgtcaggttctccacatacgattctacttgtcaaattgcccaagaaattgctgagaaaattcaacaacgaaatcaatatgaacgaaaaggtgaaaaggcaccaaagcataggcgagccgaagagcttacacgtgacagagtcatggagccttgtgtctgctaagacaccgtcgaaggcgacaaaggatgcgcacctgttgtgatacgngaatcattacttcgccctacangagtcgtcgtagtctagacgagcagtcagactaaacacaagtcgttggaacgaacacagcttgaaggggaccgaagacagaacctcttggatgatcttgtaactcgagagagactacttctggcatcctttaagaatgagggtgccgaaccagatctaatcaggtccagcctgatgagtgaagaggctaagcgaggagcacccaacccttggctctttgaggagccagaggagaccagaggcttgggttttgatgaaatccggcaacagcagcagaaaattatccaagaacaggatgcaggccttgatgccctttcctctatcataagtcgccaaaaacaaatggggcaggaaattgggaatgaattggatgaacaaaatgagataattgacgaccttgccaacctagtggagaacacagatgaaaaacttcgcaatgaaaccaggcgggtaaacatggtggacagaaagtcagcctcttgtgggatgatcatggtgattttactgctgcttgtggctatcgtggttgttgcagtctggccgaccaactgatggcagtaaagagaccaccagcagtgacacctggcaatgacagatgcaagcccaacacccttttggtacgcaaaacctgctctcaataaattcccccaaagctctgaaaaaaaaaacaaaaaagggcgcgcacaaataccccaggggcaacacaggtaccccattcggtaacaggggccccacaggagcgaaacacacgacgcgccgcagaaaagcacggaaggaaaggacacgacacagagaacaccaccctgggggaaaaagcgcaccaacaaaagcagaaaacgacgacagagaacacactggcgaagtgttaacacaaagaagcaacacacaccgacgaagacaagaagcagacagcagagcatcacaccagcaacatcaaacag

SEQ ID NO: 314552 - DNA, 1198 bp, Homo sapiens
gagtagattgctccagtgtactgtccgcaggggagcgctttgctttctctgattatagttctgaggccctagctactcactttgcaaactccaggctccggtcgcgcacgggacgaactgcggggagtgagccgcgcgggccgccgtagtcagctgctaagagcaggaagagtccgagcggcgggcggagtctgcaggatggcaccggacccctgcttaccgtgacaatcagagctttgttgcagaacctgaaggaaaagatcgcccttttgaaggacttattgctaagagctgtgtcaacacatcagataacacagcttgaaggggaccgaagacagaacctcttggatgatcttgtaactcgagagagactacttctggcatcctttaagaatgagggtgccgaaccagatctaatcaggtccagcctgatgagtgaagaggctaagcgaggagcacccaacccttggctctttgaggagccagaggagaccagaggcttgggttttgatgaaatccggcaacagcagcagaaaattatccaagaacaggatgcaggccttgatgccctttcctctatcataagtcgccaaaaacaaatggggcaggaaattgggaatgaattggatgaacaaaatgagataattgacgaccttgccaacctagtggagaacacagatgaaaaacttcgcaatgaaaccaggcgggtaaacatggtggacagaaagtcagcctcttgtgggatgatcatggtgattttactgctgcttgtggctatcgtggttgttgcagtctggccgaccaactgatggcagtaaagagaccaccagcagtgacacctggcaatgacagatgcaagcccaacacccttttggtacgcaaaacctgctctcaataaattcccccaaagctctgaaaaaaaaaacaaaaaagggcgcgcacaaataccccaggggcaacacaggtaccccattcggtaacaggggccccacaggagcgaaacacacgacgcgccgcagaaaagcacggaaggaaaggacacgacacagagaacaccaccctgggggaaaaagcgcaccaacaaaagcagaaaacgacgacagagaacacactggcgaagtgttaacacaaagaagcaacacacaccgacgaagacaagaagcagacagcagagcatcacaccagcaacatcaaacag

SEQ ID NO: 314553 - DNA, 961 bp, Homo sapiens
gagtagattgctccagtgtactgtccgcaggggagcgctttgctttctctgattatagttctgaggccctagctactcactttgcaaactccaggctccggtcgcgcacgggacgaactgcggggagtgagccgcgcgggccgccgtagtcagctgctaagagcaggaagagtccgagcggcgggcggagtctgcaggatggcaccggacccctggttctccacatacgattctacttgtcaaattgcccaagaaattgctgagaaaattcaacaacgaaatcaatatgaacgaaaaggtgaaaaggcaccaaagcttaccgtgacaatcagagctttgttgcagaacctgaaggaaaagatcgcccttttgaaggacttattgctaagagctgtgtcaacacatcagataacacagcttgaaggggaccgaagacagaacctcttggatgatcttgtaactcgagagagactacttctggcatcctttaagaatgagggtgccgaaccagatctaatcaggtccagcctgatgagtgaagaggctaagcgaggagcacccaacccttggctctttgaggagccagaggagaccagaggcttgggttttgatgaaatccggcaacagcagcagaaaattatccaagaacaggatgcaggccttgatgccctttcctctatcataagtcgccaaaaacaaatggggcaggaaattgggaatgaattggatgaacaaaatgagataattgacgaccttgccaacctagtggagaacacagatgaaaaaggatgatcatggtgattttactgctgcttgtggctatcgtggttgttgcagtctggccgaccaactgatggcagtaaagagaccaccagcagtgacacctggcaatgacagatgcaagcccaacacccttttggtacgcaaaacctgctctcaataaattcccccaaagctctga

SEQ ID NO: 314554 - DNA, 753 bp, Homo sapiens
ggctgtcatcacttagacctcaccctgtggagccacaccctagggttggccaatctactcccaggagcagggagggcaggagccagggctgggcataaaagtcagggcagagcatctcttgcttacatttgcttctgacacaactgtgttcactagcaacctcaaacagacaccatggtgcacctgactcctgaggagaagtctgccgttactgccctgtggggcaaggtgaacgtggatgaagttggtggtgaggccctgggcaggctgctggtggtctacccttggacccagaggttctttgagtcctttggggatctgtccactcctgatgctgttatgggcaaccctaaggtgaaggctcatggcaagaaagtgctcggtgcctttagtgatggcctggctcacctggacaacctcaagggcacctttgccacactgagtgagctgcactgtgacaagctgcacgtggatcctgagaacttcaggctcctggggcaacgtgctggtctgtgttgctggcccatcactttgggcaaagaattcaccccaccagtgcaggctgcctattcagaaagtggtggctggtgtggctaatgccctggcccacaagtatcactaagctcgctttcttgctgtccaatttctattaaaggttcctttgttccctaagtccaactactaaactgggggatattatgaagggccttgagcatctggattctgcctaataaaaaacatttattttcattg

SEQ ID NO: 314555 - DNA, 721 bp, Homo sapiens
ggctgtcatcacttagacctcaccctgtggagccacaccctagggttggccaatctactcccaggagcagggagggcaggagccagggctgggcataaaagtcagggcagagcatctcttgcttacatttgcttctgacacaactgtgttcactagcaacctcaaacagacaccatggtgcacctgactcctgaggagaagtctgccgttactgccctgtggggcaaggtgaacgtggatgaagttggtggtgaggccctgggcaggctgctggtggtctacccttggacccagaggttctttgagtcctttggggatctgtccactcctgatgctgttatgggcaaccctaaggtgaaggctcatggcaagaaagtgctcggtgcctttagtgatggcctggctcacctggacaacctcaagggcacctttgccacactgagtgagctgcactgtgacaagctgcacgtggatcctgagaacttcaggctcctggggcaacgtgctggtctgtgttgctggcccatcactttgggcaaagaattcaccccaccagtgcaggctgcctattcagaaagtggtggctggtgtggctaatgccctggaacagtgactgagaagaccaaagagcaagtgacaaacgccgaaggagcagtggcgacgggcgtgacagcagtagcccagaagacagcggagggagcagggggcatcgcagcagcca

SEQ ID NO: 314556 - DNA, 529 bp, Homo sapiens
ggctgtcatcacttagacctcaccctgtggagccacaccctagggttggccaatctactcccaggagcagggagggcaggagccagggctgggcataaaagtcagggcagagcatctcttgcttacatttgcttctgacacaactgtgttcactagcaacctcaaacagacaccatggtgcacctgactcctgaggagaagtctgccgttactgccctgtggggcaaggtgaacgtggatgaagttggtggtgaggccctgggcaggctgctggtggtctacccttggacccagaggttctttgagtcctttggggatctgtccactcctgatgctgttatgggcaaccctaaggtgaaggctcatggcaagaaagtgctcggtgcctttagtgatggcctggctcacctggacaacctcaagggcacctttgccacactgagtgagctgcactgtgacaagctgcacgtggatcctgagaacttcaggctctggcaacgtctgtctggtgctgccatacttcaagata

SEQ ID NO: 314557 - DNA, 604 bp, Homo sapiens
  misc_feature (6)..(6): n is a, c, g, or t
cccggncccggggaattcccgcaccatggtgcacctgactcctgaggagaagtctgccgttactgccctgtggggcaaggtgaacgtggatgaagttggtggtgaggccctgggcaggctgctggtggtctacccttggacccagaggttctttgagtcctttggggatctgtccactcctgatgctgttatgggcaaccctaaggtgaaggctcatggcaagaaagtgctcggtgcctttagtgatggcctggctcacctggacaacctcaagggcacctttgccacactgagtgagctgcactgtgacaagctgcacgtggatcctgagaacttcaggctcctggggcaacgtgctggtctgtgttgctggcccatcactttgggcaaagaattcaccccaccagtgcaggctgcctattcagaaagtggtggctggtgtggctaatgccctggcccacaagtatcactaagctcgctttcttgctgtccaatttctattaaaggttcctttgttccctaagtccaactactaaactgggggatattatgaagggccttgagcatctggattctgcctaataaaaaacatttattttcattg

SEQ ID NO: 314558 - DNA, 760 bp, Homo sapiens
ttttttttgtaaaaaggctttatttgcaggggagcaggaatttaatcaaaaaggccaaatcccatgtcatcatctgactcttcagactcctccttcttctcatctttcttctcctctgctgcagcaggggcagaaccagcagcaggggctgcagagcctggggcagcagagacggctcaccatggtgcacctgactcctgaggagaagtctgccgttactgccctgtggggcaaggtgaacgtggatgaagttggtggtgaggccctgggcaggctgctggtggtctacccttggacccagaggttctttgagtcctttggggatctgtccactcctgatgctgttatgggcaaccctaaggtgaaggctcatggcaagaaagtgctcggtgcctttagtgatggcctggctcacctggacaacctcaagggcacctttgccacactgagtgagctgcactgtgacaagctgcacgtggatcctgagaacttcaggctcctggggcaacgtgctggtctgtgttgctggcccatcactttgggcaaagaattcaccccaccagtgcaggctgcctattcagaaagtggtggctggtgtggctaatgccctggcccacaagtatcactaagctcgctttcttgctgtccaatttctattaaaggttcctttgttccctaagtccaactactaaactgggggatattatgaagggccttgagcatctggattctgcctaataaaaaacatttattttcattg

SEQ ID NO: 314559 - DNA, 885 bp, Homo sapiens
ggctgtcatcacttagacctcaccctgtggagccacaccctagggttggccaatctactcccaggagcagggagggcaggagccagggctgggcataaaagtcagggcagagcatctcttgcttacatttgcttctgacacaactgtgttcactagcaacctcaaacagacaccatggtgcacctgactcctgaggagaagtctgccgttactgccctgtggggcaaggtgaacgtggatgaagttggtggtgaggccctgggcagaggttggtatcaaggttacaagacaggtttaaggagaccaatagaaactgggcatgtggagacagagaagactcttgggtttctgataggcactgactctctctgcctattggtctattttcccacccttaggctgctggtggtctacccttggacccagaggttctttgagtcctttggggatctgtccactcctgatgctgttatgggcaaccctaaggtgaaggctcatggcaagaaagtgctcggtgcctttagtgatggcctggctcacctggacaacctcaagggcacctttgccacactgagtgagctgcactgtgacaagctgcacgtggatcctgagaacttcaggctcctggggcaacgtgctggtctgtgttgctggcccatcactttgggcaaagaattcaccccaccagtgcaggctgcctattcagaaagtggtggctggtgtggctaatgccctggcccacaagtatcactaagctcgctttcttgctgtccaatttctattaaaggttcctttgttccctaagtccaactactaaactgggggatattatgaagggccttgagcatctggattctgcctaataaaaaacatttattttcattg

SEQ ID NO: 314560 - DNA, 717 bp, Homo sapiens
  misc_feature (6)..(6): n is a, c, g, or t
  misc_feature (39)..(39): n is a, c, g, or t
  misc_feature (67)..(67): n is a, c, g, or t
  misc_feature (134)..(134): n is a, c, g, or t
  misc_feature (138)..(138): n is a, c, g, or t
cccggngcaattcagagcatgatcccccctactggcggngtgctgtgtggctcaatgtcaactaccnggctttgggagcactccaccactatgggcatctggagggtcctcaccaggctcgggctgccaaactncacnggagctccgtgccaacgtggtaggcaatgtatggcgccagtaccaggctacaggctttctttgggagcagttggtggtgaggccctgggcaggctgctggtggtctacccttggacccagaggttctttgagtcctttggggatctgtccactcctgatgctgttatgggcaaccctaaggtgaaggctcatggcaagaaagtgctcggtgcctttagtgatggcctggctcacctggacaacctcaagggcacctttgccacactgagtgagctgcactgtgacaagctgcacgtggatcctgagaacttcaggctcctggggcaacgtgctggtctgtgttgctggcccatcactttgggcaaagaattcaccccaccagtgcaggctgcctattcagaaagtggtggctggtgtggctaatgccctggcccacaagtatcactaagctcgctttcttgctgtccaatttctattaaaggttcctttgttccctaagtccaactactaaactgggggatattatgaagggccttgagcatctggattctgcctaataaaaaacatttattttcattg

SEQ ID NO: 314561 - DNA, 548 bp, Homo sapiens
  misc_feature (12)..(12): n is a, c, g, or t
  misc_feature (23)..(23): n is a, c, g, or t
gtaacagtaggnacttcaacctnttcaacaggttttggaggtggtggttctggtactgcaggctgctggtggtctacccttggacccagaggttctttgagtcctttggggatctgtccactcctgatgctgttatgggcaaccctaaggtgaaggctcatggcaagaaagtgctcggtgcctttagtgatggcctggctcacctggacaacctcaagggcacctttgccacactgagtgagctgcactgtgacaagctgcacgtggatcctgagaacttcaggctcctggggcaacgtgctggtctgtgttgctggcccatcactttgggcaaagaattcaccccaccagtgcaggctgcctattcagaaagtggtggctggtgtggctaatgccctggcccacaagtatcactaagctcgctttcttgctgtccaatttctattaaaggttcctttgttccctaagtccaactactaaactgggggatattatgaagggccttgagcatctggattctgcctaataaaaaacatttattttcattg

SEQ ID NO: 314562 - DNA, 726 bp, Homo sapiens
ggctgtcatcacttagacctcaccctgtggagccacaccctagggttggccaatctactcccaggagcagggagggcaggagccagggctgggcataaaagtcagggcagagcatctcttgcttacatttgcttctgacacaactgtgttcactagcaacctcaaacagacaccatggtgcacctgactcctgaggagaagtctgccgttactgccctgtggggcaaggtgaacgtggatgaagttggtggtgaggccctgggcaggaggttctttgagtcctttggggatctgtccactcctgatgctgttatgggcaaccctaaggtgaaggctcatggcaagaaagtgctcggtgcctttagtgatggcctggctcacctggacaacctcaagggcacctttgccacactgagtgagctgcactgtgacaagctgcacgtggatcctgagaacttcaggctcctggggcaacgtgctggtctgtgttgctggcccatcactttgggcaaagaattcaccccaccagtgcaggctgcctattcagaaagtggtggctggtgtggctaatgccctggcccacaagtatcactaagctcgctttcttgctgtccaatttctattaaaggttcctttgttccctaagtccaactactaaactgggggatattatgaagggccttgagcatctggattctgcctaataaaaaacatttattttcattg

SEQ ID NO: 314563 - DNA, 549 bp, Homo sapiens
gacgctctctctgatggggccaagtgtaacgtgtattatcttgaatgtgacggtctgggatgtctgtctgtgagcgtctaaccttcgtggaggttctttgagtcctttggggatctgtccactcctgatgctgttatgggcaaccctaaggtgaaggctcatggcaagaaagtgctcggtgcctttagtgatggcctggctcacctggacaacctcaagggcacctttgccacactgagtgagctgcactgtgacaagctgcacgtggatcctgagaacttcaggctcctggggcaacgtgctggtctgtgttgctggcccatcactttgggcaaagaattcaccccaccagtgcaggctgcctattcagaaagtggtggctggtgtggctaatgccctggcccacaagtatcactaagctcgctttcttgctgtccaatttctattaaaggttcctttgttccctaagtccaactactaaactgggggatattatgaagggccttgagcatctggattctgcctaataaaaaacatttattttcattg

SEQ ID NO: 314564 - DNA, 542 bp, Homo sapiens
ggctgtcatcacttagacctcaccctgtggagccacaccctagggttggccaatctactcccaggagcagggagggcaggagccagggctgggcataaaagtcagggcagagcatctcttgcttacatttgcttctgacacaactgtgttcactagcaacctcaaacagacaccatggtgcacctgactcctgaggagaagtctgccgttactgccctgtggggcaaggtgaacgtggatgaagttggtggtgaggccctgggcaggctgctggtggtctacccttggacccagaggttctttgagtcctttggggatctgtccactcctgatgctgttatgggcaaccctaaggtgaaggctcatggcaagaaagtgctcggtgcctttagtgcccacaagtatcactaagctcgctttcttgctgtccaatttctattaaaggttcctttgttccctaagtccaactactaaactgggggatattatgaagggccttgagcatctggattctgcctaataaaaaacatttattttcattg

SEQ ID NO: 314565 - DNA, 458 bp, Homo sapiens
ggctgtcatcacttagacctcaccctgtggagccacaccctagggttggccaatctactcccaggagcagggagggcaggagccagggctgggcataaaagtcagggcagagcatctcttgcttacatttgcttctgacacaactgtgttcactagcaacctcaaacagacaccatggtgcacctgactcctgaggagaagtctgccgttactgccctgtggggcaaggtgaacgtggatgaagttggtggtgaggccctgggcaggctgctggtggtctacccttggacccagaggttctttgagtcctttggggatctgtccactcctgatgctgttatgggcaaccctaaggtgaaggctcatggcaagaaagtgctcggtgcctttagtgtcaaagcctctgaggaggcgtttttacaggggccgtgtttaggaggcctttcacccatgggaaa

SEQ ID NO: 314566 - DNA, 510 bp, Homo sapiens
ggctgtcatcacttagacctcaccctgtggagccacaccctagggttggccaatctactcccaggagcagggagggcaggagccagggctgggcataaaagtcagggcagagcatctcttgcttacatttgcttctgacacaactgtgttcactagcaacctcaaacagacaccatggtgcacctgactcctgaggagaagtctgccgttactgccctgtggggcaaggtgaacgtggatgaagttggtggtgaggccctgggcaggctgctggtggtctacccttggacccagaggttctttgagtcctttggggatctgtccactcctgatgctgttatgggcaaccctaaggtgaaggctcatggcaagaaagtgctcggtgcctttagtgaagggcacctttgtccacacttagttagctgtcacttttacaagtcttcacgttgtatccttagtaacttagtctccttgtgcaacgtgtctgtttctgtgttctgtgcgcatcac

SEQ ID NO: 314567 - DNA, 633 bp, Homo sapiens
  misc_feature (6)..(6): n is a, c, g, or t
cccggncccggggaattcccgaactgtgttcactagcaacctcaaacagacaccatggtgcacctgactcctgaggagaagtctgccgttactgccctgtggggcaaggtgaacgtggatgaagttggtggtgaggccctgggcaggctgctggtggtctacccttggacccagaggttctttgagtcctttggggatctgtccactcctgatgctgttatgggcaaccctaaggtgaaggctcatggcaagaaagtgctcggtgcctttagtgatggcctggctcacctggacaacctcaagggcacctttgccacactgagtgagctgcactgtgacaagctgcacgtggatcctgagaacttcaggctcctggggcaacgtgctggtctgtgttgctggcccatcactttgggcaaagaattcaccccaccagtgcaggctgcctattcagaaagtggtggctggtgtggctaatgccctggcccacaagtatcactaagctcgctttcttgctgtccaatttctattaaaggttcctttgttccctaagtccaactactaaactgggggatattatgaagggccttgagcatctggattctgcctaataaaaaacatttattttcattg

SEQ ID NO: 314568 - DNA, 911 bp, Homo sapiens
ggctgtcatcacttagacctcaccctgtggagccacaccctagggttggccaatctactcccaggagcagggagggcaggagccagggctgggcataaaagtcagggcagagcatctcttgcttacatttgcttctgacacaactgtgttcactagcaacctcaaacagacaccatggtgcacctgactcctgaggagaagtctgccgttactgccctgtggggcaaggtgaacgtggatgaagttggtggtgaggccctgggcaggctgctggtggtctacccttggacccagaggttctttgagtcctttggggatctgtccactcctgatgctgttatgggcaaccctaaggtgaaggctcatggcaagaaagtgctcggtgcctttagtgatggcctggctcacctggacaacctcaagggcacctttgccacactgagtgagctgcactgtgacaagctgcacgtggatcctgagaacttcaggctcctggggcaacgtgctggtctgtgttgctggcccatcactttgggcaaagaattcaccccaccagtgcaggctgcctattcagaaagtggtggctggtgtggctaatgccctggcccacaagtatcactaagctcgctttcttgctgtccaatttctattaaaggttcctttgttccctaagtccaactactaaactgggggatattatgaagggccttgagcatctggattctgcctaataaaaaacatttattttcattgaaaaaaaaaaaaaaaaaaaaaaaaaaaaaaaaaaaccccacttttttttttgggggccgggggggggggggggggggcacaaaggggggcccaggggccgggggaagggggggggggggggcccgtcccccaagagatgcccacacagggggtggcgg

SEQ ID NO: 314569 - DNA, 784 bp, Homo sapiens
gggtctcgctatgttgcccaggctggtcttgggctcctgacctgaggtggtcctcccactggcctcacaatgttgggattacaggtataagccactgcacacggccttactatgctatcaattccatatatggaaaggtgttttccctttcagagctctttaaagctctgcagaagatttacatgtgtttatagagctaagagaaatcagggcatggaaattgagtgtgtaataaaaattaaactcttcatgttatataatcatgcataacttctatcttcattctctgaagttgcctagagcaccatcacagctaggaagcttccatcatgaattaccttatttccaaaagcaagtactcaaataattgtctcaagagaggaaggacaaaactgttacaagctgaaatatttggggatttgtttgacttgactagggaaccacaagttttcatataatgcctgatttagccctgtgcctaacagtttaaatcttaatgctaatgttaattgcttcccagttggttgaccttataagaaaacactgtgtggtattttaatgtggtaaacatgtgaatgaaggcctgtggctcagttaatcactcccacaactttgagctgtgagttttactggtggaaggaactttaacaggtcttcgctcttgtcattagatatcaaagaactgaaattagttggaattgtaagcagtgaatagatgtgttgttagaatgattccatcacttatacattgtttaaaatgctaataaagtaacttgctttgtaa

SEQ ID NO: 314570 - DNA, 732 bp, Homo sapiens
gggtctcgctatgttgcccaggctggtcttgggctcctgacctgaggtggtcctcccactggcctcacaatgttgggattacaggtataagccactgcacacggccttactatgctatcaattccatatatggaaaggtgttttccctttcagagctctttaaagctctgcagaagatttacatgtgtttatagagctaagagaaatcagggcatggaaattgagtgtgtaataaaaattaaactcttcatgttatataatcatgcataacttctatcttcattctctgaagttgcctagagcaccatcacagctaggaagcttccatcatgaattaccttatttccaaaagcaagtactcaaataattgtctcaagagaggaaggacaaaactgttttcatataatgcctgatttagccctgtgcctaacagtttaaatcttaatgctaatgttaattgcttcccagttggttgaccttataagaaaacactgtgtggtattttaatgtggtaaacatgtgaatgaaggcctgtggctcagttaatcactcccacaactttgagctgtgagttttactggtggaaggaactttaacaggtcttcgctcttgtcattagatatcaaagaactgaaattagttggaattgtaagcagtgaatagatgtgttgttagaatgattccatcacttatacattgtttaaaatgctaataaagtaacttgctttgtaa

SEQ ID NO: 314571 - DNA, 270 bp, Homo sapiens
gcggcccctactactactactgctcgaattcaagcttctaacgatgtacggggacatgtgaatgaaggcctgtggctcagttaatcactcccacaactttgagctgtgagttttactggtggaaggaactttaacaggtcttcgctcttgtcattagatatcaaagaactgaaattagttggaattgtaagcagtgaatagatgtgttgttagaatgattccatcacttatacattgtttaaaatgctaataaagtaacttgctttgtaa

SEQ ID NO: 314572 - DNA, 1791 bp, Homo sapiens
gagtggagtgggacaggtatataaaggaagtacagggcctggggaagaggccctgtctaggtagctggcaccaggagccgtgggcaagggaagaggccacaccctgccctgctctgctgcagccagaatgggtgtgaaggcgtctcaaacaggctttgtggtcctggtgctgctccagtgctgctctgcatacaaactggtctgctactacaccagctggtcccagtaccgggaaggcgatgggagctgcttcccagatgcccttgaccgcttcctctgtacccacatcatctacagctttgccaatataagcaacgatcacatcgacacctgggagtggaatgatgtgacgctctacggcatgctcaacacactcaagaacaggaaccccaacctgaagactctcttgtctgtcggaggatggaactttgggtctcaaagattttccaagatagcctccaacacccagagtcgccggactttcatcaagtcagtaccgccatttctgcgcacccatggctttgatgggctggaccttgcctggctctaccctggacggagagacaaacagcattttaccaccctaatcaaggaaatgaaggccgaatttataaaggaagcccagccagggaaaaagcagctcctgctcagcgcagcactgtctgcggggaaggtcaccattgacagcagctatgacattgccaagatatcccaacacctggatttcattagcatcatgacctacgattttcatggagcctggcgtgggaccacaggccatcacagtcccctgttccgaggtcaggaggatgcaagtcctgacagattcagcaacactgactatgctgtggggtacatgttgaggctgggggctcctgccagtaagctggtgatgggcatccccaccttcgggaggagcttcactctggcttcttctgagactggtgttggagccccaatctcaggaccgggaattccaggccggttcaccaaggaggcagggacccttgcctactatgagatctgtgacttcctccgcggagccacagtccatagaatcctcggccagcaggtcccctatgccaccaagggcaaccagtgggtaggatacgacgaccaggaaagcgtcaaaagcaaggtgcagtacctgaaggacaggcagctggcgggcgccatggtatgggccctggacctggatgacttccagggctccttctgcggccaggatctgcgcttccctctcaccaatgccatcaaggatgcactcgctgcaacgtagccctctgttctgcacacagcacgggggccaaggatgccccgtccccctctggctccagctggccgggagcctgatcacctgccctgctgagtcccaggctgagcctcagtctccctcccttggggcctatgcagaggtccacaacacacagatttgagctcagccctggtgggcagagaggtagggatggggctgtggggatagtgaggcatcgcaatgtaagactcgggattagtacacacttgttgattaatggaaatgtttacagatccccaagcctggcaagggaatttcttcaactccctgccccccagccctccttatcaaaggacaccattttggcaagctctatcaccaaggagccaaacatcctacaagacacagtgaccatactaattataccccctgcaaagcccagcttgaaaccttcacttaggaacgtaatcgtgtcccctatcctacttccccttcctaattccacagctgctcaataaagtacaagagcttaacag

SEQ ID NO: 314573 - DNA, 769 bp, Homo sapiens
gtcgtatcctacccactggttgcccttggtggcataggggaccaggaaagcgtcaaaagcgaggtgcagtacctgaaggacaggcagctggcgggcgccatggtatgggccctggacctggatgacttccagggctccttctgcggccaggatctgcgcttccctctcaccaatgccatcaaggatgcactcgctgcaacgtagccctctgttctgcacacagcacgggggccaaggatgccccgtccccctctggctccagctggccgggagcctgatcacctgccctgctgagtcccaggctgagcctcagtctccctcccttggggcctatgcagaggtccacaacacacagatttgagctcagccctggtgggcagagaggtagggatggggctgtggggatagtgaggcatcgcaatgtaagactcgggattagtacacacttgttgattaatggaaatgtttacagatccccaagcctggcaagggaatttcttcaactccctgccccccagccctccttatcaaaggacaccattttggcaagctctatcaccaaggagccaaacatcctacaagacacagtgaccatactaattataccccctgcaaagcccagcttgaaaccttcacttaggaacgtaatcgtgtcccctatcctacttccccttcctaattccacagctgctcaataaagtacaagagcttaacagacaaaaacaccgccatcaaaaacagcatcaagaccacaaacaaaaaaagaggg

SEQ ID NO: 314574 - DNA, 2383 bp, Homo sapiens
gagtggagtgggacaggtatataaaggaagtacagggcctggggaagaggccctgtctaggtagctggcaccaggagccgtgggcaagggaagaggccacaccctgccctgctctgctgcagccagaatgggtgtgaaggcgtctcaaacaggctttgtggtcctggtgctgctccagtgctgctctgcatacaaactggtctgctactacaccagctggtcccagtaccgggaaggcgatgggagctgcttcccagatgcccttgaccgcttcctctgtacccacatcatctacagctttgccaatataagcaacgatcacatcgacacctgggagtggaatgatgtgacgctctacggcatgctcaacacactcaagaacaggaaccccaacctgaagactctcttgtctgtcggaggatggaactttgggtctcaaagattttccaagatagcctccaacacccagagtcgccggactttcatcaagtcagtaccgccatttctgcgcacccatggctttgatgggctggaccttgcctggctctaccctggacggagagacaaacagcattttaccaccctaatcaaggaaatgaaggccgaatttataaaggaagcccagccagggaaaaagcagctcctgctcagcgcagcactgtctgcggggaaggtcaccattgacagcagctatgacattgccaagatatcccaacacctggatttcattagcatcatgacctacgattttcatggagcctggcgtgggaccacaggccatcacagtcccctgttccgaggtcaggaggatgcaagtcctgacagattcagcaacactgactatgctgtggggtacatgttgaggctgggggctcctgccagtaagctggtgatgggcatccccaccttcgggaggagcttcactctggcttcttctgagactggtgttggagccccaatctcaggaccgggaattccaggccggttcaccaaggaggcagggacccttgcctactatgaggtaatggagttggggagaaggtaggattcccccacaccaccagcagccctggggaaggtgattccccaccacgttcttgctttttctcctttgggaataaagaaaatgtccggttgccccagcatgcctgaggaagtggaagggagaggttaggacatttgttgctgaaaatctccagcaggtacaggcacatgggcctgcaccactaggcacctgggatagccctctggctatggggctgaggtcttccttccagcccaggaaagagcagaggtcaagaggcagattttttgtttcactctagcctctgctactctgtgtggccttgggcctgtcctcagtgtcaaccagcaggcctcacatctctgtttaaatggaagaagctaagcagggccaaggcagccaccatctctgggtcatttgcctctggtttgtataaacttgtgtgatgcatgcagcctgcagaccctgcagagagtgaggctgcaggatggagcaggagctaaaagagatttggagagtggcgtctcctggtgacctgcaaggtctcggcacgactccccacactgccttttccctgttatctgctcagatctgtgacttcctccgcggagccacagtccatagaatcctcggccagcaggtcccctatgccaccaagggcaaccagtgggtaggatacgacgaccaggaaagcgtcaaaagcaaggtgcagtacctgaaggacaggcagctggcgggcgccatggtatgggccctggacctggatgacttccagggctccttctgcggccaggatctgcgcttccctctcaccaatgccatcaaggatgcactcgctgcaacgtagccctctgttctgcacacagcacgggggccaaggatgccccgtccccctctggctccagctggccgggagcctgatcacctgccctgctgagtcccaggctgagcctcagtctccctcccttggggcctatgcagaggtccacaacacacagatttgagctcagccctggtgggcagagaggtagggatggggctgtggggatagtgaggcatcgcaatgtaagactcgggattagtacacacttgttgattaatggaaatgtttacagatccccaagcctggcaagggaatttcttcaactccctgccccccagccctccttatcaaaggacaccattttggcaagctctatcaccaaggagccaaacatcctacaagacacagtgaccatactaattataccccctgcaaagcccagcttgaaaccttcacttaggaacgtaatcgtgtcccctatcctacttccccttcctaattccacagctgctcaataaagtacaagagcttaacag

SEQ ID NO: 314575 - DNA, 1966 bp, Homo sapiens
gagtggagtgggacaggtatataaaggaagtacagggcctggggaagaggccctgtctaggtagctggcaccaggagccgtgggcaagggaagaggccacaccctgccctgctctgctgcagccagaatgggtgtgaaggcgtctcaaacaggctttgtggtcctggtgctgctccagtgctgctctgcatacaaactggtctgctactacaccagctggtcccagtaccgggaaggcgatgggagctgcttcccagatgcccttgaccgcttcctctgtacccacatcatctacagctttgccaatataagcaacgatcacatcgacacctgggagtggaatgatgtgacgctctacggcatgctcaacacactcaagaacaggaaccccaacctgaagactctcttgtctgtcggaggatggaactttgggtctcaaagattttccaagatagcctccaacacccagagtcgccggactttcatcaagtcagtaccgccatttctgcgcacccatggctttgatgggctggaccttgcctggctctaccctggacggagagacaaacagcattttaccaccctaatcaaggaaatgaaggccgaatttataaaggaagcccagccagggaaaaagcagctcctgctcagcgcagcactgtctgcggggaaggtcaccattgacagcagctatgacattgccaagatatcccaacacctggatttcattagcatcatgacctacgattttcatggagcctggcgtgggaccacaggccatcacagtcccctgttccgaggtcaggaggatgcaagtcctgacagattcagcaacactgactatgctgtggggtacatgttgaggctgggggctcctgccagtaagctggtgatgggcatccccaccttcgggaggagcttcactctggcttcttctgagactggtgttggagccccaatctcaggaccgggaattccaggccggttcaccaaggaggcagggacccttgcctactatgagatctgtgacttcctccgcggagccacagtccatagaatcctcggccagcaggtcccctatgccaccaagggcaaccagtgggtaggatacgacgaccaggaaagcgtcaaaagcaaggtaggtttccccaaggccacacctcaggacaaagagaaagaaggaggccccgctcccagcagccagattcctgtcccttgcactgaggtctgggctgggctcacagagcacatgtgccctgtacacactctgggtcagggaacccagccctgctcctctgggcctcccctgccaggtgcagtacctgaaggacaggcagctggcgggcgccatggtatgggccctggacctggatgacttccagggctccttctgcggccaggatctgcgcttccctctcaccaatgccatcaaggatgcactcgctgcaacgtagccctctgttctgcacacagcacgggggccaaggatgccccgtccccctctggctccagctggccgggagcctgatcacctgccctgctgagtcccaggctgagcctcagtctccctcccttggggcctatgcagaggtccacaacacacagatttgagctcagccctggtgggcagagaggtagggatggggctgtggggatagtgaggcatcgcaatgtaagactcgggattagtacacacttgttgattaatggaaatgtttacagatccccaagcctggcaagggaatttcttcaactccctgccccccagccctccttatcaaaggacaccattttggcaagctctatcaccaaggagccaaacatcctacaagacacagtgaccatactaattataccccctgcaaagcccagcttgaaaccttcacttaggaacgtaatcgtgtcccctatcctacttccccttcctaattccacagctgctcaataaagtacaagagcttaacag

SEQ ID NO: 314576 - DNA, 2558 bp, Homo sapiens
gagtggagtgggacaggtatataaaggaagtacagggcctggggaagaggccctgtctaggtagctggcaccaggagccgtgggcaagggaagaggccacaccctgccctgctctgctgcagccagaatgggtgtgaaggcgtctcaaacaggctttgtggtcctggtgctgctccagtgctgctctgcatacaaactggtctgctactacaccagctggtcccagtaccgggaaggcgatgggagctgcttcccagatgcccttgaccgcttcctctgtacccacatcatctacagctttgccaatataagcaacgatcacatcgacacctgggagtggaatgatgtgacgctctacggcatgctcaacacactcaagaacaggaaccccaacctgaagactctcttgtctgtcggaggatggaactttgggtctcaaagattttccaagatagcctccaacacccagagtcgccggactttcatcaagtcagtaccgccatttctgcgcacccatggctttgatgggctggaccttgcctggctctaccctggacggagagacaaacagcattttaccaccctaatcaaggaaatgaaggccgaatttataaaggaagcccagccagggaaaaagcagctcctgctcagcgcagcactgtctgcggggaaggtcaccattgacagcagctatgacattgccaagatatcccaacacctggatttcattagcatcatgacctacgattttcatggagcctggcgtgggaccacaggccatcacagtcccctgttccgaggtcaggaggatgcaagtcctgacagattcagcaacactgactatgctgtggggtacatgttgaggctgggggctcctgccagtaagctggtgatgggcatccccaccttcgggaggagcttcactctggcttcttctgagactggtgttggagccccaatctcaggaccgggaattccaggccggttcaccaaggaggcagggacccttgcctactatgaggtaatggagttggggagaaggtaggattcccccacaccaccagcagccctggggaaggtgattccccaccacgttcttgctttttctcctttgggaataaagaaaatgtccggttgccccagcatgcctgaggaagtggaagggagaggttaggacatttgttgctgaaaatctccagcaggtacaggcacatgggcctgcaccactaggcacctgggatagccctctggctatggggctgaggtcttccttccagcccaggaaagagcagaggtcaagaggcagattttttgtttcactctagcctctgctactctgtgtggccttgggcctgtcctcagtgtcaaccagcaggcctcacatctctgtttaaatggaagaagctaagcagggccaaggcagccaccatctctgggtcatttgcctctggtttgtataaacttgtgtgatgcatgcagcctgcagaccctgcagagagtgaggctgcaggatggagcaggagctaaaagagatttggagagtggcgtctcctggtgacctgcaaggtctcggcacgactccccacactgccttttccctgttatctgctcagatctgtgacttcctccgcggagccacagtccatagaatcctcggccagcaggtcccctatgccaccaagggcaaccagtgggtaggatacgacgaccaggaaagcgtcaaaagcaaggtaggtttccccaaggccacacctcaggacaaagagaaagaaggaggccccgctcccagcagccagattcctgtcccttgcactgaggtctgggctgggctcacagagcacatgtgccctgtacacactctgggtcagggaacccagccctgctcctctgggcctcccctgccaggtgcagtacctgaaggacaggcagctggcgggcgccatggtatgggccctggacctggatgacttccagggctccttctgcggccaggatctgcgcttccctctcaccaatgccatcaaggatgcactcgctgcaacgtagccctctgttctgcacacagcacgggggccaaggatgccccgtccccctctggctccagctggccgggagcctgatcacctgccctgctgagtcccaggctgagcctcagtctccctcccttggggcctatgcagaggtccacaacacacagatttgagctcagccctggtgggcagagaggtagggatggggctgtggggatagtgaggcatcgcaatgtaagactcgggattagtacacacttgttgattaatggaaatgtttacagatccccaagcctggcaagggaatttcttcaactccctgccccccagccctccttatcaaaggacaccattttggcaagctctatcaccaaggagccaaacatcctacaagacacagtgaccatactaattataccccctgcaaagcccagcttgaaaccttcacttaggaacgtaatcgtgtcccctatcctacttccccttcctaattccacagctgctcaataaagtacaagagcttaacag

SEQ ID NO: 314577 - DNA, 1947 bp, Homo sapiens
gagtggagtgggacaggtatataaaggaagtacagggcctggggaagaggccctgtctaggtagctggcaccaggagccgtgggcaagggaagaggccacaccctgccctgctctgctgcagccagaatgggtgtgaaggcgtctcaaacaggctttgtggtcctggtgctgctccagtgctgctctgcatacaaactggtctgctactacaccagctggtcccagtaccgggaaggcgatgggagctgcttcccagatgcccttgaccgcttcctctgtacccacatcatctacagctttgccaatataagcaacgatcacatcgacacctgggagtggaatgatgtgacgctctacggcatgctcaacacactcaagaacaggaaccccaacctgaagactctcttgtctgtcggaggatggaactttgggtctcaaagattttccaagatagcctccaacacccagagtcgccggactttcatcaagtcagtaccgccatttctgcgcacccatggctttgatgggctggaccttgcctggctctaccctggacggagagacaaacagcattttaccaccctaatcaaggaaatgaaggccgaatttataaaggaagcccagccagggaaaaagcagctcctgctcagcgcagcactgtctgcggggaaggtcaccattgacagcagctatgacattgccaagatatcccaacacctggatttcattagcatcatgacctacgattttcatggagcctggcgtgggaccacaggccatcacagtcccctgttccgaggtcaggaggatgcaagtcctgacagattcagcaacactgactatgctgtggggtacatgttgaggctgggggctcctgccagtaagctggtgatgggcatccccaccttcgggaggagcttcactctggcttcttctgagactggtgttggagccccaatctcaggaccgggaattccaggccggttcaccaaggaggcagggacccttgcctactatgagatctgtgacttcctccgcggagccacagtccatagaatcctcggccagcaggtcccctatgccaccaagggcaaccagtgggtaggatacgacgaccaggaaagcgtcaaaagcaaggtgcagtacctgaaggacaggcagctggcgggcgccatggtatgggccctggacctggatgacttccagggctccttctgcggccaggatctgcgcttccctctcaccaatgccatcaaggatgcactcgctgcaacgtagccctctgttctgcacacagcacgggggccaaggatgccccgtccccctctggctccagctggccgggagcctgatcacctgccctgctgagtcccaggctgagcctcagtctccctcccttggggcctatgcagaggtccacaacacacagatttgagctcagccctggtgggcagagaggtagggatggggctgtggggatagtgaggcatcgcaatgtaagactcgggattagtacacacttgttgattaatggaaatgtttacagatccccaagcctggcaagggaatttcttcaactccctgccccccagccctccttatcaaaggacaccattttggcaagctctatcaccaaggagccaaacatcctacaagacacagtgaccatactaattataccccctgcaaagcccagcttgaaaccttcacttaggaacgtaatcgtgtcccctatcctacttccccttcctaattccacagctgctcaataaagtacaagagcttaacagaaaaaaaaaaaaataaaaaaaaaaaaaagggggggggcaaaaaattcccggggggccaattagggtaccggtttttgtaaagggggcccaaaagggggggattaaaagaaggaagggggggggtaaaaggctgggggaaatggagggaatttggag

SEQ ID NO: 314578 - DNA, 1844 bp, Homo sapiens
gagtggagtgggacaggtatataaaggaagtacagggcctggggaagaggccctgtctaggtagctggcaccaggagccgtgggcaagggaagaggccacaccctgccctgctctgctgcagccagaatgggtgtgaaggcgtctcaaacaggctttgtggtcctggtgctgctccagtgctgctctgcatacaaactggtctgctactacaccagctggtcccagtaccgggaaggcgatgggagctgcttcccagatgcccttgaccgcttcctctgtacccacatcatctacagctttgccaatataagcaacgatcacatcgacacctgggagtggaatgatgtgacgctctacggcatgctcaacacactcaagaacaggaaccccaacctgaagactctcttgtctgtcggaggatggaactttgggtctcaaagattttccaagatagcctccaacacccagagtcgccggactttcatcaagtcagtaccgccatttctgcgcacccatggctttgatgggctggaccttgcctggctctaccctggacggagagacaaacagcattttaccaccctaatcaaggaaatgaaggccgaatttataaaggaagcccagccagggaaaaagcagctcctgctcagcgcagcactgtctgcggggaaggtcaccattgacagcagctatgacattgccaagatatcccaacacctggatttcattagcatcatgacctacgattttcatggagcctggcgtgggaccacaggccatcacagtcccctgttccgaggtcaggaggatgcaagtcctgacagattcagcaacactgactatgctgtggggtacatgttgaggctgggggctcctgccagtaagctggtgatgggcatccccaccttcgggaggagcttcactctggcttcttctgagactggtgttggagccccaatctcaggaccgggaattccaggccggttcaccaaggaggcagggacccttgcctactatgagatctgtgacttcctccgcggagccacagtccatagaatcctcggccagcaggtcccctatgccaccaagggcaaccagtgggtaggatacgacgaccaggaaagcgtcaaaagcaaggtgcagtacctgaaggacaggcagctggcgggcgccatggtatgggccctggacctggatgacttccagggctccttctgcggccaggatctgcgcttccctctcaccaatgccatcaaggatgcactcgctgcaacgtagccctctgttctgcacacagcacgggggccaaggatgccccgtccccctctggctccagctggccgggagcctgatcacctgccctgctgagtcccaggctgagcctcagtctccctcccttggggcctatgcagaggtccacaacacacagatttgagctcagccctggtgggcagagaggtagggatggggctgtggggatagtgaggcatcgcaatgtaagactcgggattagtacacacttgttgattaatggaaatgtttacagatccccaagcctggcaagggaatttcttcaactccctgccccccagccctccttatcaaaggacaccattttggcaagctctatcaccaaggagccaaacatcctacaagacacagtgaccatactaattataccccctgcaaagcccagcttgaaaccttcacttaggaacgtaatcgtgtcccctatcctacttccccttcctaattccacagctgctcaataaagtacaagagcttaacagacaaaaacaccgccatcaaaaacagcatcaagaccacaaacaaaaaaagaggg

SEQ ID NO: 314579 - DNA, 1734 bp, Homo sapiens
gagtggagtgggacaggtatataaaggaagtacagggcctggggaagaggccctgtctaggtagctggcaccaggagccgtgggcaagggaagaggccacaccctgccctgctctgctgcagccagaatgggtgtgaaggcgtctcaaacaggctttgtggtcctggtgctgctccagtgctgctctgcatacaaactggtctgctactacaccagctggtcccagtaccgggaaggcgatgggagctgcttcccagatgcccttgaccgcttcctctgtacccacatcatctacagctttgccaatataagcaacgatcacatcgacacctgggagtggaatgatgtgacgctctacggcatgctcaacacactcaagaacagattttccaagatagcctccaacacccagagtcgccggactttcatcaagtcagtaccgccatttctgcgcacccatggctttgatgggctggaccttgcctggctctaccctggacggagagacaaacagcattttaccaccctaatcaaggaaatgaaggccgaatttataaaggaagcccagccagggaaaaagcagctcctgctcagcgcagcactgtctgcggggaaggtcaccattgacagcagctatgacattgccaagatatcccaacacctggatttcattagcatcatgacctacgattttcatggagcctggcgtgggaccacaggccatcacagtcccctgttccgaggtcaggaggatgcaagtcctgacagattcagcaacactgactatgctgtggggtacatgttgaggctgggggctcctgccagtaagctggtgatgggcatccccaccttcgggaggagcttcactctggcttcttctgagactggtgttggagccccaatctcaggaccgggaattccaggccggttcaccaaggaggcagggacccttgcctactatgagatctgtgacttcctccgcggagccacagtccatagaatcctcggccagcaggtcccctatgccaccaagggcaaccagtgggtaggatacgacgaccaggaaagcgtcaaaagcaaggtgcagtacctgaaggacaggcagctggcgggcgccatggtatgggccctggacctggatgacttccagggctccttctgcggccaggatctgcgcttccctctcaccaatgccatcaaggatgcactcgctgcaacgtagccctctgttctgcacacagcacgggggccaaggatgccccgtccccctctggctccagctggccgggagcctgatcacctgccctgctgagtcccaggctgagcctcagtctccctcccttggggcctatgcagaggtccacaacacacagatttgagctcagccctggtgggcagagaggtagggatggggctgtggggatagtgaggcatcgcaatgtaagactcgggattagtacacacttgttgattaatggaaatgtttacagatccccaagcctggcaagggaatttcttcaactccctgccccccagccctccttatcaaaggacaccattttggcaagctctatcaccaaggagccaaacatcctacaagacacagtgaccatactaattataccccctgcaaagcccagcttgaaaccttcacttaggaacgtaatcgtgtcccctatcctacttccccttcctaattccacagctgctcaataaagtacaagagcttaacag

SEQ ID NO: 314580 - DNA, 1608 bp, Homo sapiens
gagtggagtgggacaggtatataaaggaagtacagggcctggggaagaggccctgtctaggtagctggcaccaggagccgtgggcaagggaagaggccacaccctgccctgctctgctgcagccagaatgggtgtgaaggcgtctcaaacaggctttgtggtcctggtgctgctccagtgctgctctgcatacaaactggtctgctactacaccagctggtcccagtaccgggaaggcgatgggagctgcttcccagatgcccttgaccgcttcctctgtacccacatcatctacagctttgccaatataagcaacgatcacatcgacacctgggagtggaatgatgtgacgctctacggcatgctcaacacactcaagaacaggaaccccaacctgaagactctcttgtctgtcggaggatggaactttgggtctcaaagattttccaagatagcctccaacacccagagtcgccggactttcatcaagtcagtaccgccatttctgcgcacccatggctttgatgggctggaccttgcctggctctaccctggacggagagacaaacagcattttaccaccctaatcaaggaaatgaaggccgaatttataaaggaagcccagccagggaaaaagcagctcctgctcagcgcagcactgtctgcggggaaggtcaccattgacagcagctatgacattgccaagatatcccaacacctggatttcattagcatcatgacctacgattttcatggagcctggcgtgggaccacaggccatcacagtcccctgttccgaggtcaggaggatgcaagtcctgacagattcagcaacactatctgtgacttcctccgcggagccacagtccatagaatcctcggccagcaggtcccctatgccaccaagggcaaccagtgggtaggatacgacgaccaggaaagcgtcaaaagcaaggtgcagtacctgaaggacaggcagctggcgggcgccatggtatgggccctggacctggatgacttccagggctccttctgcggccaggatctgcgcttccctctcaccaatgccatcaaggatgcactcgctgcaacgtagccctctgttctgcacacagcacgggggccaaggatgccccgtccccctctggctccagctggccgggagcctgatcacctgccctgctgagtcccaggctgagcctcagtctccctcccttggggcctatgcagaggtccacaacacacagatttgagctcagccctggtgggcagagaggtagggatggggctgtggggatagtgaggcatcgcaatgtaagactcgggattagtacacacttgttgattaatggaaatgtttacagatccccaagcctggcaagggaatttcttcaactccctgccccccagccctccttatcaaaggacaccattttggcaagctctatcaccaaggagccaaacatcctacaagacacagtgaccatactaattataccccctgcaaagcccagcttgaaaccttcacttaggaacgtaatcgtgtcccctatcctacttccccttcctaattccacagctgctcaataaagtacaagagcttaacag

SEQ ID NO: 314581 - DNA, 2910 bp, Homo sapiens
gagtggagtgggacaggtatataaaggaagtacagggcctggggaagaggccctgtctaggtagctggcaccaggagccgtgggcaagggaagaggccacaccctgccctgctctgctgcagccagaatgggtgtgaaggcgtctcaaacaggctttgtggtcctggtgctgctccagtgctgctctgcatacaaactggtctgctactacaccagctggtcccagtaccgggaaggcgatgggagctgcttcccagatgcccttgaccgcttcctctgtacccacatcatctacagctttgccaatataagcaacgatcacatcgacacctgggagtggaatgatgtgacgctctacggcatgctcaacacactcaagaacaggaaccccaacctgaagactctcttgtctgtcggaggatggaactttgggtctcaaagggctgattttggtcctagattttccaagatagcctccaacacccagagtcgccggactttcatcaagtcagtaccgccatttctgcgcacccatggctttgatgggctggaccttgcctggctctaccctggacggagagacaaacagcattttaccaccctaatcaaggaaatgaaggccgaatttataaaggaagcccagccagggaaaaagcagctcctgctcagcgcagcactgtctgcggggaaggtcaccattgacagcagctatgacattgccaagatatcccaacacctggatttcattagcatcatgacctacgattttcatggagcctggcgtgggaccacaggccatcacagtcccctgttccgaggtcaggaggatgcaagtcctgacagattcagcaacactgtgagttcccagaaggagggagggccaggagggggccgcaagacctgccatctgccagtgctcacacaccaatctctctagccctcagtacagtcctgcaagaggggggtcatgaggcccattccacagataaggaaactgaggcccaaagtctgggcatgctgcgttgctctgggaaggtgatctgcagggtaaatggagtgagggcagggggccgaatggggagaggctgggagccgaggaggtaggagtcattgtgccctcagagccaaccacctgatttctgcatctgtcaaatagtaatagccccttcctatgcctcaaaggatttttttcaagaatgaaactgtaaaattcactttaaagtgacatgatccgttcccggagggacaggggaatccccagtgcaccatacaccaataacccctgctaaggcagcagtattaattgctcaaccttccgcacctgtgcactaactgctcacgttgttcccaccctaccccacccaggactatgctgtggggtacatgttgaggctgggggctcctgccagtaagctggtgatgggcatccccaccttcgggaggagcttcactctggcttcttctgagactggtgttggagccccaatctcaggaccgggaattccaggccggttcaccaaggaggcagggacccttgcctactatgaggtaatggagttggggagaaggtaggattcccccacaccaccagcagccctggggaaggtgattccccaccacgttcttgctttttctcctttgggaataaagaaaatgtccggttgccccagcatgcctgaggaagtggaagggagaggttaggacatttgttgctgaaaatctccagcaggtacaggcacatgggcctgcaccactaggcacctgggatagccctctggctatggggctgaggtcttccttccagcccaggaaagagcagaggtcaagaggcagattttttgtttcactctagcctctgctactctgtgtggccttgggcctgtcctcagtgtcaaccagcaggcctcacatctctgtttaaatggaagaagctaagcagggccaaggcagccaccatctctgggtcatttgcctctggtttgtataaacttgtgtgatgcatgcagcctgcagaccctgcagagagtgaggctgcaggatggagcaggagctaaaagagatttggagagtggcgtctcctggtgacctgcaaggtctcggcacgactccccacactgccttttccctgttatctgctcagatctgtgacttcctccgcggagccacagtccatagaatcctcggccagcaggtcccctatgccaccaagggcaaccagtgggtaggatacgacgaccaggaaagcgtcaaaagcaaggtgcagtacctgaaggacaggcagctggcgggcgccatggtatgggccctggacctggatgacttccagggctccttctgcggccaggatctgcgcttccctctcaccaatgccatcaaggatgcactcgctgcaacgtagccctctgttctgcacacagcacgggggccaaggatgccccgtccccctctggctccagctggccgggagcctgatcacctgccctgctgagtcccaggctgagcctcagtctccctcccttggggcctatgcagaggtccacaacacacagatttgagctcagccctggtgggcagagaggtagggatggggctgtggggatagtgaggcatcgcaatgtaagactcgggattagtacacacttgttgattaatggaaatgtttacagatccccaagcctggcaagggaatttcttcaactccctgccccccagccctccttatcaaaggacaccattttggcaagctctatcaccaaggagccaaacatcctacaagacacagtgaccatactaattataccccctgcaaagcccagcttgaaaccttcacttaggaacgtaatcgtgtcccctatcctacttccccttcctaattccacagctgctcaataaagtacaagagcttaacag

SEQ ID NO: 314582 - DNA, 1786 bp, Homo sapiens
gagtggagtgggacaggtatataaaggaagtacagggcctggggaagaggccctgtctaggtagctggcaccaggagccgtgggcaagggaagaggccacaccctgccctgctctgctgcagccagaatgggtgtgaaggcgtctcaaacaggctttgtggtcctggtgctgctccagtgctgctctgcatacaaactggtctgctactacaccagctggtcccagtaccgggaaggcgatgggagctgcttcccagatgcccttgaccgcttcctctgtacccacatcatctacagctttgccaatataagcaacgatcacatcgacacctgggagtggaatgatgtgacgctctacggcatgctcaacacactcaagaacaggaaccccaacctgaagactctcttgtctgtcggaggatggaactttgggtctcaaagattttccaagatagcctccaacacccagagtcgccggactttcatcaagtcagtaccgccatttctgcgcacccatggctttgatgggctggaccttgcctggctctaccctggacggagagacaaacagcattttaccaccctaatcaaggaaatgaaggccgaatttataaaggaagcccagccagggaaaaagcagctcctgctcagcgcagcactgtctgcggggaaggtcaccattgacagcagctatgacattgccaagatatcccaacacctggatttcattagcatcatgacctacgattttcatggagcctggcgtgggaccacaggccatcacagtcccctgttccgaggtcaggaggatgcaagtcctgacagattcagcaacactgactatgctgtggggtacatgttgaggctgggggctcctgccagtaagctggtgatgggcatccccaccttcgggaggagcttcactctggcttcttctgagactggtgttggagccccaatctcaggaccgggaattccaggccggttcaccaaggaggcagggacccttgcctactatgagatctgtgacttcctccgcggagccacagtccatagaatcctcggccagcaggtcccctatgccaccaagggcaaccagtgggtaggatacgacgaccaggaaagcgtcaaaagcaaggtgcagtacctgaaggacaggcagctggcgggcgccatggtatgggccctggacctggatgacttccagggctccttctgcggccaggatctgcgcttccctctcaccaatgccatcaaggatgcactcgctgcaacgtagccctctgttctgcacacagcacgggggccaaggatgccccgtccccctctggctccagctggccgggagcctgatcacctgccctgctgagtcccaggctgagcctcagtctccctcccttggggcctatgcagaggtccacaacacacagatttgagctcagccctggtgggcagagaggtagggatggggctgtggggatagtgaggcatcgcaatgtaagactcgggattagtacacacttgttgattaatggaaatgtttacagatccccaagcctggcaagggaatttcttcaactccctgccccccagccctccttatcaaaggacaccattttggcaagctctatcaccaaggagccaaacattctaaaaccggtgacaataatgaccatgattccggattacgcgctgggttaccaccatcatgtaagcaacgtcgatcgtatacgcggtactcattcgcctccttcatcatcacatctagatgagcaatgatcagaat

SEQ ID NO: 314583 - DNA, 1703 bp, Homo sapiens
gagtggagtgggacaggtatataaaggaagtacagggcctggggaagaggccctgtctaggtagctggcaccaggagccgtgggcaagggaagaggccacaccctgccctgctctgctgcagccagaatgggtgtgaaggcgtctcaaacaggctttgtggtcctggtgctgctccagtgctgctctgcatacaaactggtctgctactacaccagctggtcccagtaccgggaaggcgatgggagctgcttcccagatgcccttgaccgcttcctctgtacccacatcatctacagctttgccaatataagcaacgatcacatcgacacctgggagtggaatgatgtgacgctctacggcatgctcaacacactcaagaacaggaaccccaacctgaagactctcttgtctgtcggaggatggaactttgggtctcaaagattttccaagatagcctccaacacccagagtcgccggactttcatcaagtcagtaccgccatttctgcgcacccatggctttgatgggctggaccttgcctggctctaccctggacggagagacaaacagcattttaccaccctaatcaaggaaatgaaggccgaatttataaaggaagcccagccagggaaaaagcagctcctgctcagcgcagcactgtctgcggggaaggtcaccattgacagcagctatgacattgccaagatatcccaacacctggatttcattagcatcatgacctacgattttcatggagcctggcgtgggaccacaggccatcacagtcccctgttccgaggtcaggaggatgcaagtcctgacagattcagcaacactgactatgctgtggggtacatgttgaggctgggggctcctgccagtaagctggtgatgggcatccccaccttcgggaggagcttcactctggcttcttctgagactggtgttggagccccaatctcaggaccgggaattccaggccggttcaccaaggaggcagggacccttgcctactatgagatctgtgacttcctccgcggagccacagtccatagaatcctcggccagcaggtcccctatgccaccaagggcaaccagtgggtaggatacgacgaccaggaaagcgtcaaaagcaaggtgcagtacctgaaggacaggcagctggcgggcgccatggtatgggccctggacctggatgacttccagggctccttctgcggccaggatctgcgcttccctctcaccaatgccatcaaggatgcactcgctgcaacgtagccctctgttctgcacacagcacgggggccaaggatgccccgtccccctctggctccagctggccgggagcctgatcacctgccctgctgagtcccaggctgagcctcagtctccctcccttggggcctatgcagaggtccacaacacacagatttgagctcagccctggtgggcagagagatccccaagcctggcaagggaatttcttcaactccctgccccccagccctccttatcaaaggacaccattttggcaagctctatcaccaaggagccaaacatcctacaagacacagtgaccatactaattataccccctgcaaagcccagcttgaaaccttcacttaggaacgtaatcgtgtcccctatcctacttccccttcctaattccacagctgctcaataaagtacaagagcttaacag

SEQ ID NO: 314584 - DNA, 1468 bp, Homo sapiens
gagtggagtgggacaggtatataaaggaagtacagggcctggggaagaggccctgtctaggtagctggcaccaggagccgtgggcaagggaagaggccacaccctgccctgctctgctgcagccagaatgggtgtgaaggcgtctcaaacaggctttgtggtcctggtgctgctccagtgctgctctgcatacaaactggtctgctactacaccagctggtcccagtaccgggaaggcgatgggagctgcttcccagatgcccttgaccgcttcctctgtacccacatcatctacagctttgccaatataagcaacgatcacatcgacacctgggagtggaatgatgtgacgctctacggcatgctcaacacactcaagaacaggaaccccaacctgaagactctcttgtctgtcggaggatggaactttgggtctcaaagattttccaagatagcctccaacacccagagtcgccggactttcatcaagtcagtaccgccatttctgcgcacccatggctttgatgggctggaccttgcctggctctaccctggacggagagacaaacagcattttaccaccctaatcaaggaaatgaaggccgaatttataaaggaagcccagccagggaaaaagcagctcctgctcagcgcagcactgtctgcggggaaggtcaccattgacagcagctatgacattgccaagatatcccaacacctggatttcattagcatcatgacctacgattttcatggagcctggcgtgggaccacaggccatcacagtcccctgttccgaggtcaggaggatgcaagtcctgacagattcagcaacactgactatgctgtggggtacatgttgaggctgggggctcctgccagtaagctggtgatgggcatccccaccttcgggaggagcttcactctggcttcttctgagactggtgttggagccccaatctcaggaccgggaattccaggccggttcaccaaggaggcagggacccttgcctactatgagatctgtgacttcctccgcggagccacagtccatagaatcctcggccagcaggtcccctatgccaccaagggcaaccagtgggtaggatacgacgaccaggaaagcgtcaaaagcaaggtgcagtacctgaaggacaggcagctggcgggcgccatggtatgggccctggacctggatgacttccagggctccttctgcggccaggatctgcgcttccctctcaccaatgccatcaaggatgcactcgctgcaacgtagccctctgttctgcacacagcacgggggccaaggatgccccgtccccctctggctccagctggccgggagcctgatcacctgccctgctgagtcccaggctgagcctcagttttcccttcccctttttgggggggccccttatttgcgaaggtttccccaaccccggatttgggttcagccttggtgggg

SEQ ID NO: 314585 - DNA, 415 bp, Homo sapiens
tcattccactcctgccctccccacctccctgtgctccacaggaaccccaacctgaagactctcttgtctgtcggaggatggaactttgggtctcaaaggtaggagcctctccccaggggcaggacggcagaggatgatggcataggagtgaggagcttgggtctcccgcatccactgtatggatgttccaggggctccagactagataggtacaaggcctacctgtttgtcaagggcctgcctgatgtgtagcaaagaaagcagagcccagagagagagcaggacttgccaagagtcacacagcaagttaacagtggatctcccaattccctgccaatgctctatttactacctcacaggcccgaaaatatgggacttctggggctaccaccattagggctggaaagagagagat

SEQ ID NO: 314586 - DNA, 1924 bp, Homo sapiens
  misc_feature (1924)..(1924): n is a, c, g, or t
gagtggagtgggacaggtatataaaggaagtacagggcctggggaagaggccctgtctaggtagctggcaccaggagccgtgggcaagggaagaggccacaccctgccctgctctgctgcagccagaatgggtgtgaaggcgtctcaaacaggctttgtggtcctggtgctgctccagtgctgctctgcatacaaactggtctgctactacaccagctggtcccagtaccgggaaggcgatgggagctgcttcccagatgcccttgaccgcttcctctgtacccacatcatctacagctttgccaatataagcaacgatcacatcgacacctgggagtggaatgatgtgacgctctacggcatgctcaacacactcaagaacaggaaccccaacctgaagactctcttgtctgtcggaggatggaactttgggtctcaaagattttccaagatagcctccaacacccagagtcgccggactttcatcaagtcagtaccgccatttctgcgcacccatggctttgatgggctggaccttgcctggctctaccctggacggagagacaaacagcattttaccaccctaatcaaggaaatgaaggccgaatttataaaggaagcccagccagggaaaaagcagctcctgctcagcgcagcactgtctgcggggaaggtcaccattgacagcagctatgacattgccaagatatcccaacacctggatttcattagcatcatgacctacgattttcatggagcctggcgtgggaccacaggccatcacagtcccctgttccgaggtcaggaggatgcaagtcctgacagattcagcaacactgactatgctgtggggtacatgttgaggctgggggctcctgccagtaagctggtgatgggcatccccaccttcgggaggagcttcactctggcttcttctgagactggtgttggagccccaatctcaggaccgggaattccaggccggttcaccaaggaggcagggacccttgcctactatgagatctgtgacttcctccgcggagccacagtccatagaatcctcggccagcaggtcccctatgccaccaagggcaaccagtgggtaggatacgacgaccaggaaagcgtcaaaagcaaggtgcagtacctgaaggacaggcagctggcgggcgccatggtatgggccctggacctggatgacttccagggctccttctgcggccaggatctgcgcttccctctcaccaatgccatcaaggatgcactcgctgcaacgtagccctctgttctgcacacagcacgggggccaaggatgccccgtccccctctggctccagctggccgggagcctgatcacctgccctgctgagtcccaggctgagcctcagtctccctcccttggggcctatgcagaggtccacaacacacagatttgagctcagccctggtgggcagagaggtagggatggggctgtggggatagtgaggcatcgcaatgtaagactcgggattagtacacacttgttgattaatggaaatgtttacagatccccaagcctggcaagggaatttcttcaactccctgccccccagccctccttatcaaaggacaccattttggcaagctctatcaccaaggagccaaacatcctacaagacacagtgaccatactaattataccccctgcaaagcccagcttgaaaccttcacttaggaacgtaatcgtgtcccctatcctacttccccttcctaattccacagctgctcaataaagtacaagagcttaacaggtgtgttggcgctttgctttggtctatctttgagcgcccactagacccactggactcacctcccccatctcttctgggttccttcctctgagccttgggacccctgagcttgcagagatgaggccgccatgtn

SEQ ID NO: 314587 - DNA, 417 bp, Homo sapiens
cagagagggatccccaaaagcgttgccattcagcagtgaaatgcaagggtttttataagctagctagtggggaggtgaggtgttatcttacctacatagggtgtgaaaaaccccaggtgtgcaatctgcgtagagcattaatttctggcatccccccaccccacccttttattatacaggcaggtcttttgcctgagctactccacgttgctttcctactgtgtatgtgcttcaaagggggaggtggagcctccatggtggacacacctggccccaggtacccctttctgtctgtgcagctgcaagcatactgcaaagcccagcttgaaaccttcacttaggaacgtaatcgtgtcccctatcctacttccccttcctaattccacagctgctcaataaagtacaagagcttaacag

SEQ ID NO: 314588 - DNA, 1808 bp, Homo sapiens
taacatggaatgtacacggtcctgtgctgcaagaggcccttgtcgtaggtagctggcaccagcgagaccctgtgcggtcggctgggaagaggccatatcctgtccctgttctgctgctcccatattgggtgtgaaagcggtcgtctagagactatgagcttatgttggtctctggttgctgcgtacctagttggcgtaggctctgcatacaaactggtctgctactacaccagctggtcccagtaccgggaaggcgatgggagctgcttcccagatgcccttgaccgcttcctctgtacccacatcatctacagctttgccaatataagcaacgatcacatcgacacctgggagtggaatgatgtgacgctctacggcatgctcaacacactcaagaacaggaaccccaacctgaagactctcttgtctgtcggaggatggaactttgggtctcaaagattttccaagatagcctccaacacccagagtcgccggactttcatcaagtcagtaccgccatttctgcgcacccatggctttgatgggctggaccttgcctggctctaccctggacggagagacaaacagcattttaccaccctaatcaaggaaatgaaggccgaatttataaaggaagcccagccagggaaaaagcagctcctgctcagcgcagcactgtctgcggggaaggtcaccattgacagcagctatgacattgccaagatatcccaacacctggatttcattagcatcatgacctacgattttcatggagcctggcgtgggaccacaggccatcacagtcccctgttccgaggtcaggaggatgcaagtcctgacagattcagcaacactgactatgctgtggggtacatgttgaggctgggggctcctgccagtaagctggtgatgggcatccccaccttcgggaggagcttcactctggcttcttctgagactggtgttggagccccaatctcaggaccgggaattccaggccggttcaccaaggaggcagggacccttgcctactatgagatctgtgacttcctccgcggagccacagtccatagaatcctcggccagcaggtcccctatgccaccaagggcaaccagtgggtaggatacgacgaccaggaaagcgtcaaaagcaaggtgcagtacctgaaggacaggcagctggcgggcgccatggtatgggccctggacctggatgacttccagggctccttctgcggccaggatctgcgcttccctctcaccaatgccatcaaggatgcactcgctgcaacgtagccctctgttctgcacacagcacgggggccaaggatgccccgtccccctctggctccagctggccgggagcctgatcacctgccctgctgagtcccaggctgagcctcagtctccctcccttggggcctatgcagaggtccacaacacacagatttgagctcagccctggtgggcagagaggtagggatggggctgtggggatagtgaggcatcgcaatgtaagactcgggattagtacacacttgttgattaatggaaatgtttacagatccccaagcctggcaagggaatttcttcaactccctgccccccagccctccttatcaaaggacaccattttggcaagctctatcaccaaggagccaaacatcctacaagacacagtgaccatactaattataccccctgcaaagcccagcttgaaaccttcacttaggaacgtaatcgtgtcccctatcctacttccccttcctaattccacagctgctcaataaagtacaagagcttaacag

SEQ ID NO: 314589 - DNA, 2892 bp, Homo sapiens
gagtggagtgggacaggtatataaaggaagtacagggcctggggaagaggccctgtctaggtagctggcaccaggagccgtgggcaagggaagaggccacaccctgccctgctctgctgcagccagaatgggtgtgaaggcgtctcaaacaggctttgtggtcctggtgctgctccagtgctgctctgcatacaaactggtctgctactacaccagctggtcccagtaccgggaaggcgatgggagctgcttcccagatgcccttgaccgcttcctctgtacccacatcatctacagctttgccaatataagcaacgatcacatcgacacctgggagtggaatgatgtgacgctctacggcatgctcaacacactcaagaacaggaaccccaacctgaagactctcttgtctgtcggaggatggaactttgggtctcaaagattttccaagatagcctccaacacccagagtcgccggactttcatcaagtcagtaccgccatttctgcgcacccatggctttgatgggctggaccttgcctggctctaccctggacggagagacaaacagcattttaccaccctaatcaaggaaatgaaggccgaatttataaaggaagcccagccagggaaaaagcagctcctgctcagcgcagcactgtctgcggggaaggtcaccattgacagcagctatgacattgccaagatatcccaacacctggatttcattagcatcatgacctacgattttcatggagcctggcgtgggaccacaggccatcacagtcccctgttccgaggtcaggaggatgcaagtcctgacagattcagcaacactgtgagttcccagaaggagggagggccaggagggggccgcaagacctgccatctgccagtgctcacacaccaatctctctagccctcagtacagtcctgcaagaggggggtcatgaggcccattccacagataaggaaactgaggcccaaagtctgggcatgctgcgttgctctgggaaggtgatctgcagggtaaatggagtgagggcagggggccgaatggggagaggctgggagccgaggaggtaggagtcattgtgccctcagagccaaccacctgatttctgcatctgtcaaatagtaatagccccttcctatgcctcaaaggatttttttcaagaatgaaactgtaaaattcactttaaagtgacatgatccgttcccggagggacaggggaatccccagtgcaccatacaccaataacccctgctaaggcagcagtattaattgctcaaccttccgcacctgtgcactaactgctcacgttgttcccaccctaccccacccaggactatgctgtggggtacatgttgaggctgggggctcctgccagtaagctggtgatgggcatccccaccttcgggaggagcttcactctggcttcttctgagactggtgttggagccccaatctcaggaccgggaattccaggccggttcaccaaggaggcagggacccttgcctactatgaggtaatggagttggggagaaggtaggattcccccacaccaccagcagccctggggaaggtgattccccaccacgttcttgctttttctcctttgggaataaagaaaatgtccggttgccccagcatgcctgaggaagtggaagggagaggttaggacatttgttgctgaaaatctccagcaggtacaggcacatgggcctgcaccactaggcacctgggatagccctctggctatggggctgaggtcttccttccagcccaggaaagagcagaggtcaagaggcagattttttgtttcactctagcctctgctactctgtgtggccttgggcctgtcctcagtgtcaaccagcaggcctcacatctctgtttaaatggaagaagctaagcagggccaaggcagccaccatctctgggtcatttgcctctggtttgtataaacttgtgtgatgcatgcagcctgcagaccctgcagagagtgaggctgcaggatggagcaggagctaaaagagatttggagagtggcgtctcctggtgacctgcaaggtctcggcacgactccccacactgccttttccctgttatctgctcagatctgtgacttcctccgcggagccacagtccatagaatcctcggccagcaggtcccctatgccaccaagggcaaccagtgggtaggatacgacgaccaggaaagcgtcaaaagcaaggtgcagtacctgaaggacaggcagctggcgggcgccatggtatgggccctggacctggatgacttccagggctccttctgcggccaggatctgcgcttccctctcaccaatgccatcaaggatgcactcgctgcaacgtagccctctgttctgcacacagcacgggggccaaggatgccccgtccccctctggctccagctggccgggagcctgatcacctgccctgctgagtcccaggctgagcctcagtctccctcccttggggcctatgcagaggtccacaacacacagatttgagctcagccctggtgggcagagaggtagggatggggctgtggggatagtgaggcatcgcaatgtaagactcgggattagtacacacttgttgattaatggaaatgtttacagatccccaagcctggcaagggaatttcttcaactccctgccccccagccctccttatcaaaggacaccattttggcaagctctatcaccaaggagccaaacatcctacaagacacagtgaccatactaattataccccctgcaaagcccagcttgaaaccttcacttaggaacgtaatcgtgtcccctatcctacttccccttcctaattccacagctgctcaataaagtacaagagcttaacag

SEQ ID NO: 314590 - DNA, 1495 bp, Homo sapiens
ggacgcgtggtcgacccacgcgtccgatcgacacctgggagtggaatgatgtgacgctctacggcatgctcaacacactcaagaacaggaaccccaacctgaagactctcttgtctgtcggaggatggaactttgggtctcaaagattttccaagatagcctccaacacccagagtcgccggactttcatcaagtcagtaccgccatttctgcgcacccatggctttgatgggctggaccttgcctggctctaccctggacggagagacaaacagcattttaccaccctaatcaaggaaatgaaggccgaatttataaaggaagcccagccagggaaaaagcagctcctgctcagcgcagcactgtctgcggggaaggtcaccattgacagcagctatgacattgccaagatatcccaacacctggatttcattagcatcatgacctacgattttcatggagcctggcgtgggaccacaggccatcacagtcccctgttccgaggtcaggaggatgcaagtcctgacagattcagcaacactgactatgctgtggggtacatgttgaggctgggggctcctgccagtaagctggtgatgggcatccccaccttcgggaggagcttcactctggcttcttctgagactggtgttggagccccaatctcaggaccgggaattccaggccggttcaccaaggaggcagggacccttgcctactatgagatctgtgacttcctccgcggagccacagtccatagaatcctcggccagcaggtcccctatgccaccaagggcaaccagtgggtaggatacgacgaccaggaaagcgtcaaaagcaaggtgcagtacctgaaggacaggcagctggcgggcgccatggtatgggccctggacctggatgacttccagggctccttctgcggccaggatctgcgcttccctctcaccaatgccatcaaggatgcactcgctgcaacgtagccctctgttctgcacacagcacgggggccaaggatgccccgtccccctctggctccagctggccgggagcctgatcacctgccctgctgagtcccaggctgagcctcagtctccctcccttggggcctatgcagaggtccacaacacacagatttgagctcagccctggtgggcagagaggtagggatggggctgtggggatagtgaggcatcgcaatgtaagactcgggattagtacacacttgttgattaatggaaatgtttacagatccccaagcctggcaagggaatttcttcaactccctgccccccagccctccttatcaaaggacaccattttggcaagctctatcaccaaggagccaaacatcctacaagacacagtgaccatactaattataccccctgcaaagcccagcttgaaaccttcacttaggaacgtaatcgtgtcccctatcctacttccccttcctaattccacagctgctcaataaagtacaagagcttaacag

SEQ ID NO: 314591 - DNA, 2300 bp, Homo sapiens
gagtggagtgggacaggtatataaaggaagtacagggcctggggaagaggccctgtctaggtagctggcaccaggagccgtgggcaagggaagaggccacaccctgccctgctctgctgcagccagaatgggtgtgaaggcgtctcaaacaggctttgtggtcctggtgctgctccagtgctgctctgcatacaaactggtctgctactacaccagctggtcccagtaccgggaaggcgatgggagctgcttcccagatgcccttgaccgcttcctctgtacccacatcatctacagctttgccaatataagcaacgatcacatcgacacctgggagtggaatgatgtgacgctctacggcatgctcaacacactcaagaacaggaaccccaacctgaagactctcttgtctgtcggaggatggaactttgggtctcaaagattttccaagatagcctccaacacccagagtcgccggactttcatcaagtcagtaccgccatttctgcgcacccatggctttgatgggctggaccttgcctggctctaccctggacggagagacaaacagcattttaccaccctaatcaaggaaatgaaggccgaatttataaaggaagcccagccagggaaaaagcagctcctgctcagcgcagcactgtctgcggggaaggtcaccattgacagcagctatgacattgccaagatatcccaacacctggatttcattagcatcatgacctacgattttcatggagcctggcgtgggaccacaggccatcacagtcccctgttccgaggtcaggaggatgcaagtcctgacagattcagcaacactgtgagttcccagaaggagggagggccaggagggggccgcaagacctgccatctgccagtgctcacacaccaatctctctagccctcagtacagtcctgcaagaggggggtcatgaggcccattccacagataaggaaactgaggcccaaagtctgggcatgctgcgttgctctgggaaggtgatctgcagggtaaatggagtgagggcagggggccgaatggggagaggctgggagccgaggaggtaggagtcattgtgccctcagagccaaccacctgatttctgcatctgtcaaatagtaatagccccttcctatgcctcaaaggatttttttcaagaatgaaactgtaaaattcactttaaagtgacatgatccgttcccggagggacaggggaatccccagtgcaccatacaccaataacccctgctaaggcagcagtattaattgctcaaccttccgcacctgtgcactaactgctcacgttgttcccaccctaccccacccaggactatgctgtggggtacatgttgaggctgggggctcctgccagtaagctggtgatgggcatccccaccttcgggaggagcttcactctggcttcttctgagactggtgttggagccccaatctcaggaccgggaattccaggccggttcaccaaggaggcagggacccttgcctactatgagatctgtgacttcctccgcggagccacagtccatagaatcctcggccagcaggtcccctatgccaccaagggcaaccagtgggtaggatacgacgaccaggaaagcgtcaaaagcaaggtgcagtacctgaaggacaggcagctggcgggcgccatggtatgggccctggacctggatgacttccagggctccttctgcggccaggatctgcgcttccctctcaccaatgccatcaaggatgcactcgctgcaacgtagccctctgttctgcacacagcacgggggccaaggatgccccgtccccctctggctccagctggccgggagcctgatcacctgccctgctgagtcccaggctgagcctcagtctccctcccttggggcctatgcagaggtccacaacacacagatttgagctcagccctggtgggcagagaggtagggatggggctgtggggatagtgaggcatcgcaatgtaagactcgggattagtacacacttgttgattaatggaaatgtttacagatccccaagcctggcaagggaatttcttcaactccctgccccccagccctccttatcaaaggacaccattttggcaagctctatcaccaaggagccaaacatcctacaagacacagtgaccatactaattataccccctgcaaagcccagcttgaaaccttcacttaggaacgtaatcgtgtcccctatcctacttccccttcctaattccacagctgctcaataaagtacaagagcttaacag

SEQ ID NO: 314592 - DNA, 1321 bp, Homo sapiens
cctgcctcagcctcccgagtagctgggattacaggtgcctgccaccatgcctggctaattttcgtagttagagtagagacggggtttcaccatcttggccaggctggtcttgaactcctcacctcatgatccacctgcctcggcctcccaaagtgctgggattccaggtatgagccaccacgcccggcctaaagcttttctattaataatttcctgcctcaccctccatccccttcctcctcagacacctggatttcattagcatcatgacctacgattttcatggagcctggcgtgggaccacaggccatcacagtcccctgttccgaggtcaggaggatgcaagtcctgacagattcagcaacactgactatgctgtggggtacatgttgaggctgggggctcctgccagtaagctggtgatgggcatccccaccttcgggaggagcttcactctggcttcttctgagactggtgttggagccccaatctcaggaccgggaattccaggccggttcaccaaggaggcagggacccttgcctactatgagatctgtgacttcctccgcggagccacagtccatagaatcctcggccagcaggtcccctatgccaccaagggcaaccagtgggtaggatacgacgaccaggaaagcgtcaaaagcaaggtgcagtacctgaaggacaggcagctggcgggcgccatggtatgggccctggacctggatgacttccagggctccttctgcggccaggatctgcgcttccctctcaccaatgccatcaaggatgcactcgctgcaacgtagccctctgttctgcacacagcacgggggccaaggatgccccgtccccctctggctccagctggccgggagcctgatcacctgccctgctgagtcccaggctgagcctcagtctccctcccttggggcctatgcagaggtccacaacacacagatttgagctcagccctggtgggcagagaggtagggatggggctgtggggatagtgaggcatcgcaatgtaagactcgggattagtacacacttgttgattaatggaaatgtttacagatccccaagcctggcaagggaatttcttcaactccctgccccccagccctccttatcaaaggacaccattttggcaagctctatcaccaaggagccaaacatcctacaagacacagtgaccatactaattataccccctgcaaagcccagcttgaaaccttcacttaggaacgtaatcgtgtcccctatcctacttccccttcctaattccacagctgctcaataaagtacaagagcttaacag

SEQ ID NO: 314593 - DNA, 1755 bp, Homo sapiens
gagtggagtgggacaggtatataaaggaagtacagggcctggggaagaggccctgtctaggtagctggcaccaggagccgtgggcaagggaagaggccacaccctgccctgctctgctgcagccagaatgggtgtgaaggcgtctcaaacaggctttgtggtcctggtgctgctccagtgctgctctgcatacaaactggtctgctactacaccagctggtcccagtaccgggaaggcgatgggagctgcttcccagatgcccttgaccgcttcctctgtacccacatcatctacagctttgccaatataagcaacgatcacatcgacacctgggagtggaatgatgtgacgctctacggcatgctcaacacactcaagaacaggaaccccaacctgaagactctcttgtctgtcggaggatggaactttgggtctcaaagattttccaagatagcctccaacacccagagtcgccggactttcatcaagtcagtaccgccatttctgcgcacccatggctttgatgggctggaccttgcctggctctaccctggacggagagacaaacagcattttaccaccctaatcaaggaaatgaaggccgaatttataaaggaagcccagccagggaaaaagcagctcctgctcagcgcagcactgtctgcggggaaggtcaccattgacagcagctatgacattgccaagatatcccaacacctggatttcattagcatcatgacctacgattttcatggagcctggcgtgggaccacaggccatcacagtcccctgttccgaggtcaggaggatgcaagtcctgacagattcagcaacactgactatgctgtggggtacatgttgaggctgggggctcctgccagtaagctggtgatgggcatccccaccttcgggaggagcttcactctggcttcttctgagactggtgttggagccccaatctcaggaccgggaattccaggccggttcaccaaggaggcagggacccttgcctactatgagatctgtgacttcctccgcggagccacagtccatagaatcctcggccagcaggtcccctatgccaccaagggcaaccagtgggtaggatacgacgaccaggaaagcgtcaaaagcaaggtgcagtacctgaaggacaggcagctggcgggcgccatggtatgggccctggacctggatgacttccagggctccttctgcggccaggatctgcgcttccctctcaccaatgccatcaaggatgcactcgctgcaacgtagccctctgttctgcacacagcacgggggccaaggcctgatcacctgccctgctgagtcccaggctgagcctcagtctccctcccttggggcctatgcagaggtccacaacacacagatttgagctcagccctggtgggcagagaggtagggatggggctgtggggatagtgaggcatcgcaatgtaagactcgggattagtacacacttgttgattaatggaaatgtttacagatccccaagcctggcaagggaatttcttcaactccctgccccccagccctccttatcaaaggacaccattttggcaagctctatcaccaaggagccaaacatcctacaagacacagtgaccatactaattataccccctgcaaagcccagcttgaaaccttcacttaggaacgtaatcgtgtcccctatcctacttccccttcctaattccacagctgctcaataaagtacaagagcttaacag

SEQ ID NO: 314594 - DNA, 1732 bp, Homo sapiens
agcggccgcccgcgatctagaactatgtaaaattcactttaaagtgacatgatccgttcccggagggacaggggaatccccagtgcaccatacaccaataacccctgctaaggcagcagtattaattgctcaaccttccgcacctgtgcactaactgctcacgttgttcccaccctaccccacccaggactatgctgtggggtacatgttgaggctgggggctcctgccagtaagctggtgatgggcatccccaccttcgggaggagcttcactctggcttcttctgagactggtgttggagccccaatctcaggaccgggaattccaggccggttcaccaaggaggcagggacccttgcctactatgaggtaatggagttggggagaaggtaggattcccccacaccaccagcagccctggggaaggtgattccccaccacgttcttgctttttctcctttgggaataaagaaaatgtccggttgccccagcatgcctgaggaagtggaagggagaggttaggacatttgttgctgaaaatctccagcaggtacaggcacatgggcctgcaccactaggcacctgggatagccctctggctatggggctgaggtcttccttccagcccaggaaagagcagaggtcaagaggcagattttttgtttcactctagcctctgctactctgtgtggccttgggcctgtcctcagtgtcaaccagcaggcctcacatctctgtttaaatggaagaagctaagcagggccaaggcagccaccatctctgggtcatttgcctctggtttgtataaacttgtgtgatgcatgcagcctgcagaccctgcagagagtgaggctgcaggatggagcaggagctaaaagagatttggagagtggcgtctcctggtgacctgcaaggtctcggcacgactccccacactgccttttccctgttatctgctcagatctgtgacttcctccgcggagccacagtccatagaatcctcggccagcaggtcccctatgccaccaagggcaaccagtgggtaggatacgacgaccaggaaagcgtcaaaagcaaggtgcagtacctgaaggacaggcagctggcgggcgccatggtatgggccctggacctggatgacttccagggctccttctgcggccaggatctgcgcttccctctcaccaatgccatcaaggatgcactcgctgcaacgtagccctctgttctgcacacagcacgggggccaaggatgccccgtccccctctggctccagctggccgggagcctgatcacctgccctgctgagtcccaggctgagcctcagtctccctcccttggggcctatgcagaggtccacaacacacagatttgagctcagccctggtgggcagagaggtagggatggggctgtggggatagtgaggcatcgcaatgtaagactcgggattagtacacacttgttgattaatggaaatgtttacagatccccaagcctggcaagggaatttcttcaactccctgccccccagccctccttatcaaaggacaccattttggcaagctctatcaccaaggagccaaacatcctacaagacacagtgaccatactaattataccccctgcaaagcccagcttgaaaccttcacttaggaacgtaatcgtgtcccctatcctacttccccttcctaattccacagctgctcaataaagtacaagagcttaacag

SEQ ID NO: 314595 - DNA, 1529 bp, Homo sapiens
gagtggagtgggacaggtatataaaggaagtacagggcctggggaagaggccctgtctaggtagctggcaccaggagccgtgggcaagggaagaggccacaccctgccctgctctgctgcagccagaatgggtgtgaaggcgtctcaaacaggctttgtggtcctggtgctgctccagtgctgctctgcatacaaactggtctgctactacaccagctggtcccagtaccgggaaggcgatgggagctgcttcccagatgcccttgaccgcttcctctgtacccacatcatctacagctttgccaatataagcaacgatcacatcgacacctgggagtggaatgatgtgacgctctacggcatgctcaacacactcaagaacaggaaccccaacctgaagactctcttgtctgtcggaggatggaactttgggtctcaaagattttccaagatagcctccaacacccagagtcgccggactttcatcaagtcagtaccgccatttctgcgcacccatggctttgatgggctggaccttgcctggctctaccctggacggagagacaaacagcattttaccaccctaatcaaggaaatgaaggccgaatttataaaggaagcccagccagggaaaaagcagctcctgctcagcgcagcactgtctgcggggaaggtcaccattgacagcagctatgacattgccaagatatcccaacacctggatttcattagcatcatgacctacgattttcatggagcctggcgtgggaccacaggccatcacagtcccctgttccgaggtcaggaggatgcaagtcctgacagattcagcaacactgactatgctgtggggtacatgttgaggctgggggctcctgccagtaagctggtgatgggcatccccaccttcgggaggagcttcactctggcttcttctgagactggtgttggagccccaatctcaggaccgggaattccaggccggttcaccaaggaggcagggacccttgcctactatgagatctgtgacttcctccgcggagccacagtccatagaatcctcggccagcaggtcccctatgccaccaagggcaaccagtgggtaggatacgacgaccaggaaagcgtcaaaagcaagatgccccgtccccctctggctccagctggccgggagcctgatcacctgccctgctgagtcccaggctgagcctcagtctccctcccttggggcctatgcagaggtccacaacacacagatttgagctcagccctggtgggcagagagatccccaagcctggcaagggaatttcttcaactccctgccccccagccctccttatcaaaggacaccattttggcaagctctatcaccaaggagccaaacatcctacaagacacagtgaccatactaattataccccctgcaaagcccagcttgaaaccttcacttaggaacgtaatcgtgtcccctatcctacttccccttcctaattccacagctgctcaataaagtacaagagcttaacag

SEQ ID NO: 314596 - DNA, 950 bp, Homo sapiens
tccctggctcgcagtgcctgccgggagccacgtctccgaagaccgatagctgcttcgggattggcgtccgggcggctatctaggggctgctgggaagatggcggactcggtggctagccgatgaggaggccgcggggggaacccggcccccgggccccgagaccgactgagggagcgacctgcgcagggcccggggagtcatgtaggggtggcgcctgcggggagggctgcgggagggcagcgggagctggtgttagcggcagcggccacggtctcctggcgtccctgggccggggtgggtgttggggcccccgacttcgccgactccgcgccatcgcaaagcggtgcactcgggctccacgcgcgccctgcgaggtgggcgctgcgttttcatttcacgggtgaggagacttagagagacgaagccacttgtccaaggtcacgccgctggtgagtgggagcgcccagcatggaacccagcaccgtccagccgcggagcccgcgttccaccctctgtgccgccgccgcctcctgtgggagagggaggtggtcgggagagtgcacgccggtgccgcctgggctccagactgggcgcgaccactaacccggttaatgacctcgggcttaacttaaccccttcgctgctctgggcctgcgtttctccaccggtgaaatgaggtaatgccagccctgcctactcttcatgggcgtgtaaggagcatcagagatggtgcatgtggaattgctttgcaagtagtgctgcgctgagcgcactgaggattatgattgctgtttcaaaggcgtggaaggaggcagaggggcggggtggggaagaggcccagagcagtcacaaaggcttgctctgaccacaggccccctaaatgaggagtgaggtaagcagtaggtagcaggtctttctcccctttggagaaaacctcaccccctttttt

SEQ ID NO: 314597 - DNA, 1871 bp, Homo sapiens
tccctggctcgcagtgcctgccgggagccacgtctccgaagaccgatagctgcttcgggattggcgtccgggcggctatctaggggctgctgggaagatggcggactcggtggctagccgatgaggaggccgcggggggaacccggcccccgggccccgagaccgactgagggagcgacctgcgcagggcccggggagtcatggtctccatcacccaactccatgcttcgagtcctgctctctgctcagacctcccctgctcggctgtctggcctgctgctgatccctccagtacagccctgctgtttggggcccagcaaatggggggaccggcctgttggaggaggccccagtgcaggtcctgtgcaaggactgcagcggcttctggaacaggcgaagagccctggggagctgctgcgctggctgggccagaaccccagcaaggtgcgcgcccaccactactcggtggcgcttcgtcgtctgggccagctcttggggtctcggccacggccccctcctgtggagcaggtcacactgcaggacttgagtcagctcatcatccgaaactgcccctcctttgacattcacaccatccacgtgtgtctgcaccttgcagtcttacttggctttccatctgatggtcccctggtgtgtgccctggaacaggagcgaaggctccgcctccctccgaagccacctccccctttgcagccccttctccgaggtgggcaagggttggaagctgctctaagctgcccccgttttctgcggtatccacggcagcatctgatcagcagcctggcagaggcaaggccagaggaactgactccccacgtgatggtgctcctggcccagcacctggcccggcaccggttgcgggagccccagcttctggaagccattgcccacttcctggtggttcaggaaacgcaactcagcagcaaggtggtacagaagttggtcctgccctttgggcgactgaactacctgcccctggaacagcagtttatgccctgccttgagaggatcctggctcgggaagcaggggtggcacccctggctacagtcaacatcttgatgtcactgtgccaactgcggtgcctgcccttcagagccctgcactttgttttttcccctggcttcatcaactacatcagtggcacccctcatgctctgattgtgcgtcgctacctctccctgctggacacggccgtggagctggagctcccaggataccggggtccccgccttccccgaaggcagcaagtgcccatctttccccagcctctcatcaccgaccgtgcccgctgcaagtacagtcacaaggacatagtagctgaggggttgcgccagctgctgggggaggagaaataccgccaggacctgactgtgcctccaggctactgcacagacttcctgctgtgcgccagcagctctggtgctgtgcttcccgtgaggacccaggaccccttcctgccatacccaccaaggtcctgcccacagggccaggctgcctctagcgccactactcgagaccctgcccagagggtggtgctggtgttgcgggaacgctggcatttctgccgggacggccgggtgctgctgggctcgagggccctgagggagcggcacctaggcctgatgggctaccagctcctgccgctacccttcgaggaactggagtcccagagaggcctgccccagctcaagagctacctgaggcagaagctccaggccctgggcctgcgctgggggcctgaagggggctgaggggatgatgtggggttcaggatggcccccccatggggggtggatgatttgcactttggttccctgtgttttgatttctcattaaagttcctttccttccc

SEQ ID NO: 314598 - DNA, 1700 bp, Homo sapiens
tccctggctcgcagtgcctgccgggagccacgtctccgaagaccgatagctgcttcgggattggcgtccgggcggctatctaggggctgctgggaagatggcggactcggtggctagccgatgaggaggccgcggggggaacccggcccccgggccccgagaccgactgagggagcgacctgcgcagggcccggggagtcatggtctccatcacccaactccatgcttcgagtcctgctctctgctcagacctcccctgctcggctgtctggcctgctgctgatccctccagtacagccctgctgtttggggcccagcaaatggggggaccggcctgttggaggaggccccagtgcaggtcctgtgcaaggactgcagcggcttctggaacaggcgaagagccctggggagctgctgcgctggctgggccagaaccccagcaaggtgcgcgcccaccactactcggtggcgcttcgtcgtctgggccagctcttggggtctcggccacggccccctcctgtggagcaggtcacactgcaggacttgagtcagctcatcatccgaaactgcccctcctttgacattcacaccatccacgtgtgtctgcaccttgcagtcttacttggctttccatctgatggtcccctggtgtgtgccctggaacaggagcgaaggctccgcctccctccgaagccacctccccctttgcagccccttctccgaggtgggcaagggttggaagctgctctaagctgcccccgttttctgcggtatccacggcagcatctgatcagcagcctggcagaggcaaggccagaggaactgactccccacgtgatggtgctcctggcccagcacctggcccggcaccggttgcgggagccccagcttctggaagccattgcccacttcctggtggttcaggaaacgcaactcagcagcaaggtggtacagaagttggtcctgccctttgggcgactgaactacctgcccctggaacagcagtttatgccctgccttgagaggatcctggctcgggaagcaggggtggcacccctggctacagtcaacatcttgatgtcactgtgccaactgcggtgcctgcccttcagagccctgcactttgttttttcccctggcttcatcaactacatcagtggcacccctcatgctctgattgtgcgtcgctacctctccctgctggacacggccgtggagctggagctcccaggataccggggtccccgccttccccgaaggcagcaagtgcccatctttccccagcctctcatcaccgaccgtgcccgctgcaagtacagtcacaaggacatagtagctgaggggttgcgccagctgctgggggaggagaaataccgccaggacctgactgtgcctccaggctactgcacagacttcctgctgtgcgccagcagctctggtgctgtgcttcccgtgaggacccaggaccccttcctgccatacccaccaaggtcctgccccagctcaagagctacctgaggcagaagctccaggccctgggcctgcgctgggggcctgaagggggctgaggggatgatgtggggttcaggatggcccccccatggggggtggatgatttgcactttggttccctgtgttttgatttctcattaaagttcctttccttccccgttgtgaatctcagttttgggacggggagc

SEQ ID NO: 314599 - DNA, 2426 bp, Homo sapiens
  misc_feature (1885)..(1885): n is a, c, g, or t
tccctggctcgcagtgcctgccgggagccacgtctccgaagaccgatagctgcttcgggattggcgtccgggcggctatctaggggctgctgggaagatggcggactcggtggctagccgatgaggaggccgcggggggaacccggcccccgggccccgagaccgactgagggagcgacctgcgcagggcccggggagtcatggtctccatcacccaactccatgcttcgagtcctgctctctgctcagacctcccctgctcggctgtctggcctgctgctgatccctccagtacagccctgctgtttggggcccagcaaatggggggaccggcctgttggaggaggccccagtgcaggtcctgtgcaaggactgcagcggcttctggaacaggcgaagagccctggggagctgctgcgctggctgggccagaaccccagcaaggtgcgcgcccaccactactcggtggcgcttcgtcgtctgggccagctcttggggtctcggccacggccccctcctgtggagcaggtcacactgcaggacttgagtcagctcatcatccgaaactgcccctcctttgacattcacaccatccacgtgtgtctgcaccttgcagtcttacttggctttccatctgatggtcccctggtgtgtgccctggaacaggagcgaaggctccgcctccctccgaagccacctccccctttgcagccccttctccgaggtgggcaagggttggaagctgctctaagctgcccccgttttctgcggtatccacggcagcatctgatcagcagcctggcagaggcaaggccagaggaactgactccccacgtgatggtgctcctggcccagcacctggcccggcaccggttgcgggagccccagcttctggaagccattgcccacttcctggtggttcaggaaacgcaactcagcagcaaggtggtacagaagttggtcctgccctttgggcgactgaactacctgcccctggaacagcagtttatgccctgccttgagaggatcctggctcgggaagcaggggtggcacccctggctacagtcaacatcttgatgtcactgtgccaactgcggtgcctgcccttcagagccctgcactttgttttttcccctggcttcatcaactacatcagtggcacccctcatgctctgattgtgcgtcgctacctctccctgctggacacggccgtggagctggagctcccaggataccggggtccccgccttccccgaaggcagcaagtgcccatctttccccagcctctcatcaccgaccgtgcccgctgcaagtacagtcacaaggacatagtagctgaggggttgcgccagctgctgggggaggagaaataccgccaggacctgactgtgcctccaggctactgcacagacttcctgctgtgcgccagcagctctggtgctgtgcttcccgtgaggacccaggaccccttcctgccatacccaccaaggtcctgcccacagggccaggctgcctctagcgccactactcgagaccctgcccagagggtggtgctggtgttgcgggaacgctggcatttctgccgggacggccgggtgctgctgggctcgagggccctgagggagcggcacctaggcctgatgggctaccagctcctgccgctacccttcgaggaactggagtcccagagaggcctgccccagctcaagagctacctgaggcagaagctccaggccctgggcctgcgctgggggcctgaagggggctgaggggatgatgtggggttcaggatggcccccccatggggggtggatgatttgcactttggttccctgtgttttgatttctcattaaagttcctttccttcccaaaaaaaaaaaaanaaaaaaaaaaaaaaaaaaaaaaaaaaaaaaaaaaaaaaaaaaaaaaaaaaaaaaaaaaaaaacaacaaaaagagagagggggggcggcgcacagcaaaactctctccccgcagggaggcggcagcagtacgagacgcgcccccgcgcggtttatgggagaagaagggcgggccgccacaagagggggggcgggtatataaaaacgaggcgagcgagggggggggtgttataacaagaatgcgcgagagagagggggagaaaaaggagcggaatagggggagtaattatgtgtggaagagagcaaacatatatatttgtggggggggggtggagaaaaatgtgtgggggaacaataaccaacgaaggagaagtatattaagaagggtcagtaggggggagggaaatatacaatagaattaggaagcggaggttggaggagggggggaaaaaaaaagtgtaattatattgtagttagggatgtgaaaagaagaatgtgtgaaatgaggagggtatgatttataagaaagagaaaatttttggg

SEQ ID NO: 314600 - DNA, 2090 bp, Homo sapiens
tccctggctcgcagtgcctgccgggagccacgtctccgaagaccgatagctgcttcgggattggcgtccgggcggctatctaggggctgctgggaagatggcggactcggtggctagccgatgaggaggccgcggggggaacccggcccccgggccccgagaccgactgagggagcgacctgcgcagggcccggggagtcatggtctccatcacccaactccatgcttcgagtcctgctctctgctcagacctcccctgctcggctgtctggcctgctgctgatccctccagtacagccctgctgtttggggcccagcaaatggggggaccggcctgttggaggaggccccagtgcaggtcctgtgcaaggactgcagcggcttctggaacaggcgaagagccctggggagctgctgcgctggctgggccagaaccccagcaaggtgcgcgcccaccactactcggtggcgcttcgtcgtctgggccagctcttggggtctcggccacggccccctcctgtggagcaggtcacactgcaggacttgagtcagctcatcatccgaaactgcccctcctttgacattcacaccatccacgtgtgtctgcaccttgcagtcttacttggctttccatctgatggtcccctggtgtgtgccctggaacaggagcgaaggctccgcctccctccgaagccacctccccctttgcagccccttctccgaggtgggcaagggttggaagctgctctaagctgcccccgttttctgcggtatccacggcagcatctgatcagcagcctggcagaggcaaggccagaggaactgactccccacgtgatggtgctcctggcccagcacctggcccggcaccggttgcgggagccccagcttctggaagccattgcccacttcctggtggttcaggaaacgcaactcagcagcaaggtggtacagaagttggtcctgccctttgggcgactgaactacctgcccctggaacagcagtttatgccctgccttgagaggatcctggctcgggaagcaggggtggcacccctggctacagtcaacatcttgatgtcactgtgccaactgcggtgcctgcccttcagagccctgcactttgttttttcccctggcttcatcaactacatcagtggcacccctcatgctctgattgtgcgtcgctacctctccctgctggacacggccgtggagctggagctcccaggataccggggtccccgccttccccgaaggcagcaagtgcccatctttccccagcctctcatcaccgaccgtgcccgctgcaagtacaggtggatggggcagcctggggcaaggggaggggccagcctgggaccagcagagtggaaaagccagagggaccatgaagcgccaaagctaaggagctctcggccaccataaaactgggccctgaagcagcagagggctttgcccagggtggtggcactagactgggacagattaggatgaggtgccgggcccttcctgctactggtgtcctttctcctcagtcacaaggacatagtagctgaggggttgcgccagctgctgggggaggagaaataccgccaggacctgactgtgcctccaggctactgcacagacttcctgctgtgcgccagcagctctggtgctgtgcttcccgtgaggacccaggaccccttcctgccatacccaccaaggtcctgcccacagggccaggctgcctctagcgccactactcgagaccctgcccagagggtggtgctggtgttgcgggaacgctggcatttctgccgggacggccgggtgctgctgggctcgagggccctgagggagcggcacctaggcctgatgggctaccagctcctgccgctacccttcgaggaactggagtcccagagaggcctgccccagctcaagagctacctgaggcagaagctccaggccctgggcctgcgctgggggcctgaagggggctgaggggatgatgtggggttcaggatggcccccccatggggggtggatgatttgcactttggttccctgtgttttgatttctcattaaagttcctttccttccc

SEQ ID NO: 314601 - DNA, 2163 bp, Homo sapiens
tccctggctcgcagtgcctgccgggagccacgtctccgaagaccgatagctgcttcgggattggcgtccgggcggctatctaggggctgctgggaagatggcggactcggtggctagccgatgaggaggccgcggggggaacccggcccccgggccccgagaccgactgagggagcgacctgcgcagggcccggggagtcatggtctccatcacccaactccatgcttcgagtcctgctctctgctcagacctcccctgctcggctgtctggcctgctgctgatccctccagtacagccctgctgtttggggcccagcaaatggggggaccggcctgttggaggaggccccagtgcaggtcctgtgcaaggactgcagcggcttctggaacaggcgaagagccctggggagctgctgcgctggctgggccagaaccccagcaaggtgcgcgcccaccactactcggtggcgcttcgtcgtctgggccagctcttggggtctcggccacggccccctcctgtggagcaggtcacactgcaggacttgagtcagctcatcatccgaaactgcccctcctttgacattcacaccatccacgtgtgtctgcaccttgcagtcttacttggctttccatctgatggtcccctggtgtgtgccctggaacaggagcgaaggctccgcctccctccgaagccacctccccctttgcagccccttctccgaggtgggcaagggttggaagctgctctaagctgcccccgttttctgcggtatccacggcagcatctgatcagcagcctggcagaggcaaggccagaggaactgactccccacgtgatggtgctcctggcccagcacctggcccggcaccggttgcgggagccccagcttctggaagccattgcccacttcctggtggttcaggaaacgcaactcagcagcaaggtggtacagaagttggtcctgccctttgggcgactgaactacctgcccctggaacagcagtttatgccctgccttgagaggatcctggctcgggaagcaggggtggcacccctggctacagtcaacatcttgatgtcactgtgccaactgcggtgcctgcccttcagagccctgcactttgttttttcccctggcttcatcaactacatcagtggcacccctcatgctctgattgtgcgtcgctacctctccctgctggacacggccgtggagctggagctcccaggataccggggtccccgccttccccgaaggcagcaagtgcccatctttccccagcctctcatcaccgaccgtgcccgctgcaagtacaggtggatggggcagcctggggcaaggggaggggccagcctgggaccagcagagtggaaaagccagagggaccatgaagcgccaaagctaaggagctctcggccaccataaaactgggccctgaagcagcagagggctttgcccagggtggtggcactagactgggacagattaggatgaggtgccgggcccttcctgctactggtgtcctttctcctcagtcacaaggacatagtagctgaggggttgcgccagctgctgggggaggagaaataccgccaggacctgactgtgcctccaggctactgcacaggtgagcaaggggcaggcggcaggcccggggagacggagccctggctaaggccgccggccctgctcccctccagacttcctgctgtgcgccagcagctctggtgctgtgcttcccgtgaggacccaggaccccttcctgccatacccaccaaggtcctgcccacagggccaggctgcctctagcgccactactcgagaccctgcccagagggtggtgctggtgttgcgggaacgctggcatttctgccgggacggccgggtgctgctgggctcgagggccctgagggagcggcacctaggcctgatgggctaccagctcctgccgctacccttcgaggaactggagtcccagagaggcctgccccagctcaagagctacctgaggcagaagctccaggccctgggcctgcgctgggggcctgaagggggctgaggggatgatgtggggttcaggatggcccccccatggggggtggatgatttgcactttggttccctgtgttttgatttctcattaaagttcctttccttccc

SEQ ID NO: 314602 - DNA, 1944 bp, Homo sapiens
tccctggctcgcagtgcctgccgggagccacgtctccgaagaccgatagctgcttcgggattggcgtccgggcggctatctaggggctgctgggaagatggcggactcggtggctagccgatgaggaggccgcggggggaacccggcccccgggccccgagaccgactgagggagcgacctgcgcagggcccggggagtcatggtctccatcacccaactccatgcttcgagtcctgctctctgctcagacctcccctgctcggctgtctggcctgctgctgatccctccagtacagccctgctgtttggggcccagcaaatggggggaccggcctgttggaggaggccccagtgcaggtcctgtgcaaggactgcagcggcttctggaacaggcgaagagccctggggagctgctgcgctggctgggccagaaccccagcaaggtgcgcgcccaccactactcggtggcgcttcgtcgtctgggccagctcttggggtctcggccacggccccctcctgtggagcaggtcacactgcaggacttgagtcagctcatcatccgaaactgcccctcctttgacattcacaccatccacgtgtgtctgcaccttgcagtcttacttggctttccatctgatggtcccctggtgtgtgccctggaacaggagcgaaggctccgcctccctccgaagccacctccccctttgcagccccttctccgaggtgggcaagggttggaagctgctctaagctgcccccgttttctgcggtatccacggcagcatctgatcagcagcctggcagaggcaaggccagaggaactgactccccacgtgatggtgctcctggcccagcacctggcccggcaccggttgcgggagccccagcttctggaagccattgcccacttcctggtggttcaggaaacgcaactcagcagcaaggtggtacagaagttggtcctgccctttgggcgactgaactacctgcccctggaacagcagtttatgccctgccttgagaggatcctggctcgggaagcaggggtggcacccctggctacagtcaacatcttgatgtcactgtgccaactgcggtgcctgcccttcagagccctgcactttgttttttcccctggcttcatcaactacatcagtggcacccctcatgctctgattgtgcgtcgctacctctccctgctggacacggccgtggagctggagctcccaggataccggggtccccgccttccccgaaggcagcaagtgcccatctttccccagcctctcatcaccgaccgtgcccgctgcaagtacagtcacaaggacatagtagctgaggggttgcgccagctgctgggggaggagaaataccgccaggacctgactgtgcctccaggctactgcacagacttcctgctgtgcgccagcagctctggtgctgtgcttcccgtgaggacccaggaccccttcctgccatacccaccaaggtcctgcccacagggccaggctgcctctagcgccactactcgagaccctgcccagaggtaaaggaggcagggtgggggagccctggccaccttgcccgccatgccctgagccacgtccctccccctgcagggtggtgctggtgttgcgggaacgctggcatttctgccgggacggccgggtgctgctgggctcgagggccctgagggagcggcacctaggcctgatgggctaccagctcctgccgctacccttcgaggaactggagtcccagagaggcctgccccagctcaagagctacctgaggcagaagctccaggccctgggcctgcgctgggggcctgaagggggctgaggggatgatgtggggttcaggatggcccccccatggggggtggatgatttgcactttggttccctgtgttttgatttctcattaaagttcctttccttccc

SEQ ID NO: 314603 - DNA, 2236 bp, Homo sapiens
tccctggctcgcagtgcctgccgggagccacgtctccgaagaccgatagctgcttcgggattggcgtccgggcggctatctaggggctgctgggaagatggcggactcggtggctagccgatgaggaggccgcggggggaacccggcccccgggccccgagaccgactgagggagcgacctgcgcagggcccggggagtcatggtctccatcacccaactccatgcttcgagtcctgctctctgctcagacctcccctgctcggctgtctggcctgctgctgatccctccagtacagccctgctgtttggggcccagcaaatggggggaccggcctgttggaggaggccccagtgcaggtcctgtgcaaggactgcagcggcttctggaacaggcgaagagccctggggagctgctgcgctggctgggccagaaccccagcaaggtgcgcgcccaccactactcggtggcgcttcgtcgtctgggccagctcttggggtctcggccacggccccctcctgtggagcaggtcacactgcaggacttgagtcagctcatcatccgaaactgcccctcctttgacattcacaccatccacgtgtgtctgcaccttgcagtcttacttggctttccatctgatggtcccctggtgtgtgccctggaacaggagcgaaggctccgcctccctccgaagccacctccccctttgcagccccttctccgaggtgggcaagggttggaagctgctctaagctgcccccgttttctgcggtatccacggcagcatctgatcagcagcctggcagaggcaaggccagaggaactgactccccacgtgatggtgctcctggcccagcacctggcccggcaccggttgcgggagccccagcttctggaagccattgcccacttcctggtggttcaggaaacgcaactcagcagcaaggtggtacagaagttggtcctgccctttgggcgactgaactacctgcccctggaacagcagtttatgccctgccttgagaggatcctggctcgggaagcaggggtggcacccctggctacagtcaacatcttgatgtcactgtgccaactgcggtgcctgcccttcagagccctgcactttgttttttcccctggcttcatcaactacatcagtggcacccctcatgctctgattgtgcgtcgctacctctccctgctggacacggccgtggagctggagctcccaggataccggggtccccgccttccccgaaggcagcaagtgcccatctttccccagcctctcatcaccgaccgtgcccgctgcaagtacaggtggatggggcagcctggggcaaggggaggggccagcctgggaccagcagagtggaaaagccagagggaccatgaagcgccaaagctaaggagctctcggccaccataaaactgggccctgaagcagcagagggctttgcccagggtggtggcactagactgggacagattaggatgaggtgccgggcccttcctgctactggtgtcctttctcctcagtcacaaggacatagtagctgaggggttgcgccagctgctgggggaggagaaataccgccaggacctgactgtgcctccaggctactgcacaggtgagcaaggggcaggcggcaggcccggggagacggagccctggctaaggccgccggccctgctcccctccagacttcctgctgtgcgccagcagctctggtgctgtgcttcccgtgaggacccaggaccccttcctgccatacccaccaaggtcctgcccacagggccaggctgcctctagcgccactactcgagaccctgcccagaggtaaaggaggcagggtgggggagccctggccaccttgcccgccatgccctgagccacgtccctccccctgcagggtggtgctggtgttgcgggaacgctggcatttctgccgggacggccgggtgctgctgggctcgagggccctgagggagcggcacctaggcctgatgggctaccagctcctgccgctacccttcgaggaactggagtcccagagaggcctgccccagctcaagagctacctgaggcagaagctccaggccctgggcctgcgctgggggcctgaagggggctgaggggatgatgtggggttcaggatggcccccccatggggggtggatgatttgcactttggttccctgtgttttgatttctcattaaagttcctttccttccc

SEQ ID NO: 314604 - DNA, 2024 bp, Homo sapiens
tccctggctcgcagtgcctgccgggagccacgtctccgaagaccgatagctgcttcgggattggcgtccgggcggctatctaggggctgctgggaagatggcggactcggtggctagccgatgaggaggccgcggggggaacccggcccccgggccccgagaccgactgagggagcgacctgcgcagggcccggggagtcatggtctccatcacccaactccatgcttcgagtcctgctctctgctcagacctcccctgctcggctgtctggcctgctgctgatccctccagtacagccctgctgtttggggcccagcaaatggggggaccggcctgttggaggaggccccagtgcaggtcctgtgcaaggactgcagcggcttctggaacaggcgaagagccctggggagctgctgcgctggctgggccagaaccccagcaaggtgcgcgcccaccactactcggtggcgcttcgtcgtctgggccagctcttggggtctcggccacggccccctcctgtggagcaggtcacactgcaggacttgagtcagctcatcatccgaaactgcccctcctttgacattcacaccatccacgtgtgtctgcaccttgcagtcttacttggctttccatctgatggtcccctggtgtgtgccctggaacaggagcgaaggctccgcctccctccgaagccacctccccctttgcagccccttctccgaggtgggcaagggttggaagctgctctaagctgcccccgttttctgcggtatccacggcagcatctgatcagcagcctggcagaggcaaggccagaggaactgactccccacgtgatggtgctcctggcccagcacctggcccggcaccggttgcgggagccccagcttctggaagccattgcccacttcctggtggttcaggaaacgcaactcagcagcaaggtggtacagaagttggtcctgccctttgggcgactgaactacctgcccctggaacagcagtttatgccctgccttgagaggatcctggctcgggaagcaggggtggcacccctggctacagtcaacatcttgatgtcactgtgccaactgcggtgcctgcccttcagagccctgcactttgttttttcccctggcttcatcaactacatcagtggcacccctcatgctctgattgtgcgtcgctacctctccctgctggacacggccgtggagctggagctcccaggataccggggtccccgccttccccgaaggcagcaagtgcccatctttccccagcctctcatcaccgaccgtgcccgctgcaagtacagtcacaaggacatagtagctgaggggttgcgccagctgctgggggaggagaaataccgccaggacctgactgtgcctccaggctactgcacagacttcctgctgtgcgccagcagctctggtgctgtgcttcccgtgaggacccaggaccccttcctgccatacccaccaaggtcctgcccacagggccaggctgcctctagcgccactactcgagaccctgcccagaggtaaaggaggcagggtgggggagccctggccaccttgcccgccatgccctgagccacgtccctccccctgcagggtggtgctggtgttgcgggaacgctggcatttctgccgggacggccgggtgctgctgggctcgagggccctgagggagcggcacctaggcctgatgggctaccagctcctgccggtgagtggccctggcctggcccgtggcgcatcctcactcccagcctgcgggtaacctgccgccctctcctctccccacagctacccttcgaggaactggagtcccagagaggcctgccccagctcaagagctacctgaggcagaagctccaggccctgggcctgcgctgggggcctgaagggggctgaggggatgatgtggggttcaggatggcccccccatggggggtggatgatttgcactttggttccctgtgttttgatttctcattaaagttcctttccttccc

SEQ ID NO: 314605 - DNA, 1669 bp, Homo sapiens
tccctggctcgcagtgcctgccgggagccacgtctccgaagaccgatagctgcttcgggattggcgtccgggcggctatctaggggctgctgggaagatggcggactcggtggctagccgatgaggaggccgcggggggaacccggcccccgggccccgagaccgactgagggagcgacctgcgcagggcccggggagtcatggtctccatcacccaactccatgcttcgagtcctgctctctgctcagacctcccctgctcggctgtctggcctgctgctgatccctccagtacagccctgctgtttggggcccagcaaatggggggaccggcctgttggaggaggccccagtgcaggtcctgtgcaaggactgcagcggcttctggaacaggcgaagagccctggggagctgctgcgctggctgggccagaaccccagcaaggtgcgcgcccaccactactcggtggcgcttcgtcgtctgggccagctcttggggtctcggccacggccccctcctgtggagcaggtcacactgcaggacttgagtcagctcatcatccgaaactgcccctcctttgacattcacaccatccacgtgtgtctgcaccttgcagtcttacttggctttccatctgatggtcccctggtgtgtgccctggaacaggagcgaaggctccgcctccctccgaagccacctccccctttgcagccccttctccgaggtgggcaagggttggaagctgctctaagctgcccccgttttctgcggtatccacggcagcatctgatcagcagcctggcagaggcaaggccagaggaactgactccccacgtgatggtgctcctggcccagcacctggcccggcaccggttgcgggagccccagcttctggaagccattgcccacttcctggtggttcaggaaacgcaactcagcagcaaggtggtacagaagttggtcctgccctttgggcgactgaactacctgcccctggaacagcagtttatgccctgccttgagaggatcctggctcgggaagcaggggtggcacccctggctacagtcaacatcttgatgtcactgtgccaactgcggtgcctgcccttcagagccctgcactttgttttttcccctggcttcatcaactacatcagtggcacccctcatgctctgattgtgcgtcgctacctctccctgctggacacggccgtggagctggagctcccaggataccggggtccccgccttccccgaaggcagcaagtgcccatctttccccagcctctcatcaccgaccgtgcccgctgcaagtacagtcacaaggacatagtagctgaggggttgcgccagctgctgggggaggagaaataccgccaggacctgactgtgcctccaggctactgcacagacttcctgctgtgcgccagcagctctggtgctgtgcttcccgtgaggacccaggaccccttcctgccatacccaccaaggtcctgccccagctcaagagctacctgaggcagaagctccaggccctgggcctgcgctgggggcctgaagggggctgaggggatgatgtggggttcaggatggcccccccatggggggtggatgatttgcactttggttccctgtgttttgatttctcattaaagttcctttccttccc

SEQ ID NO: 314606 - DNA, 2119 bp, Homo sapiens
tccctggctcgcagtgcctgccgggagccacgtctccgaagaccgatagctgcttcgggattggcgtccgggcggctatctaggggctgctgggaagatggcggactcggtggctagccgatgaggaggccgcggggggaacccggcccccgggccccgagaccgactgagggagcgacctgcgcagggcccggggagtcatgtaggggtggcgcctgcggggagggctgcgggagggcagcgggagctggtgttagcggcagcggccacggtctcctggcgtccctgggccggggtgggtgttggggcccccgacttcgccgactccgcgccatcgcaaagcggtgcactcgggctccacgcgcgccctgcgaggtgggcgctgcgttttcatttcacgggtgaggagacttagagagacgaagccacttgtccaaggtcacgccgctgggtctccatcacccaactccatgcttcgagtcctgctctctgctcagacctcccctgctcggctgtctggcctgctgctgatccctccagtacagccctgctgtttggggcccagcaaatggggggaccggcctgttggaggaggccccagtgcaggtcctgtgcaaggactgcagcggcttctggaacaggcgaagagccctggggagctgctgcgctggctgggccagaaccccagcaaggtgcgcgcccaccactactcggtggcgcttcgtcgtctgggccagctcttggggtctcggccacggccccctcctgtggagcaggtcacactgcaggacttgagtcagctcatcatccgaaactgcccctcctttgacattcacaccatccacgtgtgtctgcaccttgcagtcttacttggctttccatctgatggtcccctggtgtgtgccctggaacaggagcgaaggctccgcctccctccgaagccacctccccctttgcagccccttctccgaggtgggcaagggttggaagctgctctaagctgcccccgttttctgcggtatccacggcagcatctgatcagcagcctggcagaggcaaggccagaggaactgactccccacgtgatggtgctcctggcccagcacctggcccggcaccggttgcgggagccccagcttctggaagccattgcccacttcctggtggttcaggaaacgcaactcagcagcaaggtggtacagaagttggtcctgccctttgggcgactgaactacctgcccctggaacagcagtttatgccctgccttgagaggatcctggctcgggaagcaggggtggcacccctggctacagtcaacatcttgatgtcactgtgccaactgcggtgcctgcccttcagagccctgcactttgttttttcccctggcttcatcaactacatcagtggcacccctcatgctctgattgtgcgtcgctacctctccctgctggacacggccgtggagctggagctcccaggataccggggtccccgccttccccgaaggcagcaagtgcccatctttccccagcctctcatcaccgaccgtgcccgctgcaagtacagtcacaaggacatagtagctgaggggttgcgccagctgctgggggaggagaaataccgccaggacctgactgtgcctccaggctactgcacagacttcctgctgtgcgccagcagctctggtgctgtgcttcccgtgaggacccaggaccccttcctgccatacccaccaaggtcctgcccacagggccaggctgcctctagcgccactactcgagaccctgcccagagggtggtgctggtgttgcgggaacgctggcatttctgccgggacggccgggtgctgctgggctcgagggccctgagggagcggcacctaggcctgatgggctaccagctcctgccgctacccttcgaggaactggagtcccagagaggcctgccccagctcaagagctacctgaggcagaagctccaggccctgggcctgcgctgggggcctgaagggggctgaggggatgatgtggggttcaggatggcccccccatggggggtggatgatttgcactttggttccctgtgttttgatttctcattaaagttcctttccttccc

SEQ ID NO: 314607 - DNA, 1790 bp, Homo sapiens
tccctggctcgcagtgcctgccgggagccacgtctccgaagaccgatagctgcttcgggattggcgtccgggcggctatctaggggctgctgggaagatggcggactcggtggctagccgatgaggaggccgcggggggaacccggcccccgggccccgagaccgactgagggagcgacctgcgcagggcccggggagtcatggtctccatcacccaactccatgcttcgagtcctgctctctgctcagacctcccctgctcggctgtctggcctgctgctgatccctccagtacagccctgctgtttggggcccagcaaatggggggaccggcctgttggaggaggccccagtgcaggtcctgtgcaaggactgcagcggcttctggaacaggcgaagagccctggggagctgctgcgctggctgggccagaaccccagcaaggtgcgcgcccaccactactcggtggcgcttcgtcgtctgggccagctcttggggtctcggccacggccccctcctgtggagcaggtcacactgcaggacttgagtcagctcatcatccgaaactgcccctcctttgacattcacaccatccacgtgtgtctgcaccttgcagtcttacttggctttccatctgatggtcccctggtgtgtgccctggaacaggagcgaaggctccgcctccctccgaagccacctccccctttgcagccccttctccgagaggcaaggccagaggaactgactccccacgtgatggtgctcctggcccagcacctggcccggcaccggttgcgggagccccagcttctggaagccattgcccacttcctggtggttcaggaaacgcaactcagcagcaaggtggtacagaagttggtcctgccctttgggcgactgaactacctgcccctggaacagcagtttatgccctgccttgagaggatcctggctcgggaagcaggggtggcacccctggctacagtcaacatcttgatgtcactgtgccaactgcggtgcctgcccttcagagccctgcactttgttttttcccctggcttcatcaactacatcagtggcacccctcatgctctgattgtgcgtcgctacctctccctgctggacacggccgtggagctggagctcccaggataccggggtccccgccttccccgaaggcagcaagtgcccatctttccccagcctctcatcaccgaccgtgcccgctgcaagtacagtcacaaggacatagtagctgaggggttgcgccagctgctgggggaggagaaataccgccaggacctgactgtgcctccaggctactgcacagacttcctgctgtgcgccagcagctctggtgctgtgcttcccgtgaggacccaggaccccttcctgccatacccaccaaggtcctgcccacagggccaggctgcctctagcgccactactcgagaccctgcccagagggtggtgctggtgttgcgggaacgctggcatttctgccgggacggccgggtgctgctgggctcgagggccctgagggagcggcacctaggcctgatgggctaccagctcctgccgctacccttcgaggaactggagtcccagagaggcctgccccagctcaagagctacctgaggcagaagctccaggccctgggcctgcgctgggggcctgaagggggctgaggggatgatgtggggttcaggatggcccccccatggggggtggatgatttgcactttggttccctgtgttttgatttctcattaaagttcctttccttccc

SEQ ID NO: 314608 - DNA, 2597 bp, Homo sapiens
tccctggctcgcagtgcctgccgggagccacgtctccgaagaccgatagctgcttcgggattggcgtccgggcggctatctaggggctgctgggaagatggcggactcggtggctagccgatgaggaggccgcggggggaacccggcccccgggccccgagaccgactgagggagcgacctgcgcagggcccggggagtcatgtaggggtggcgcctgcggggagggctgcgggagggcagcgggagctggtgttagcggcagcggccacggtctcctggcgtccctgggccggggtgggtgttggggcccccgacttcgccgactccgcgccatcgcaaagcggtgcactcgggctccacgcgcgccctgcgaggtgggcgctgcgttttcatttcacgggtgaggagacttagagagacgaagccacttgtccaaggtcacgccgctgggtctccatcacccaactccatgcttcgagtcctgctctctgctcagacctcccctgctcggctgtctggcctgctgctgatccctccagtacagccctgctgtttggggcccagcaaatggggggaccggcctgttggaggaggccccagtgcaggtcctgtgcaaggactgcagcggcttctggaacaggcgaagagccctggggagctgctgcgctggctgggccagaaccccagcaaggtgcgcgcccaccactactcggtggcgcttcgtcgtctgggccagctcttggggtctcggccacggccccctcctgtggagcaggtcacactgcaggacttgagtcagctcatcatccgaaactgcccctcctttgacattcacaccatccacgtgtgtctgcaccttgcagtcttacttggtgaggaggggcttgaggtgggcgcctggggggctaggtgttaatgaagaatagggagaacagtagaggaccacggacagagacccagcctctcaggcgtttgcccaggaacgcttgctcctgctcccgtcctatgtctgcggcagacatcatgagtcgaacgcactccttccggcctcgctagggtgccaccccagattcctgctaatagagtgccctaggaagccaccataatttgtcacaattggtatgagatgaaagcctatttgccatctttgtatgtactccctacaaaccgtttcgatacctcatagccacatgatactttacatgtctctagtgtttgcacttaaactctagcacaccttcccgctcaggaaacgggagaggagaaaggtggagaattcaccaagtaaccccatgataagaacagcagcacagctctgttaccaggctgccttttacctctccccctcaggctttccatctgatggtcccctggtgtgtgccctggaacaggagcgaaggctccgcctccctccgaagccacctccccctttgcagccccttctccgaggtgggcaagggttggaagctgctctaagctgcccccgttttctgcggtatccacggcagcatctgatcagcagcctggcagaggcaaggccagaggaactgactccccacgtgatggtgctcctggcccagcacctggcccggcaccggttgcgggagccccagcttctggaagccattgcccacttcctggtggttcaggaaacgcaactcagcagcaaggtggtacagaagttggtcctgccctttgggcgactgaactacctgcccctggaacagcagtttatgccctgccttgagaggatcctggctcgggaagcaggggtggcacccctggctacagtcaacatcttgatgtcactgtgccaactgcggtgcctgcccttcagagccctgcactttgttttttcccctggcttcatcaactacatcagtggcacccctcatgctctgattgtgcgtcgctacctctccctgctggacacggccgtggagctggagctcccaggataccggggtccccgccttccccgaaggcagcaagtgcccatctttccccagcctctcatcaccgaccgtgcccgctgcaagtacagtcacaaggacatagtagctgaggggttgcgccagctgctgggggaggagaaataccgccaggacctgactgtgcctccaggctactgcacagacttcctgctgtgcgccagcagctctggtgctgtgcttcccgtgaggacccaggaccccttcctgccatacccaccaaggtcctgcccacagggccaggctgcctctagcgccactactcgagaccctgcccagagggtggtgctggtgttgcgggaacgctggcatttctgccgggacggccgggtgctgctgggctcgagggccctgagggagcggcacctaggcctgatgggctaccagctcctgccgctacccttcgaggaactggagtcccagagaggcctgccccagctcaagagctacctgaggcagaagctccaggccctgggcctgcgctgggggcctgaagggggctgaggggatgatgtggggttcaggatggcccccccatggggggtggatgatttgcactttggttccctgtgttttgatttctcattaaagttcctttccttccc

SEQ ID NO: 314609 - DNA, 1882 bp, Homo sapiens
tccctggctcgcagtgcctgccgggagccacgtctccgaagaccgatagctgcttcgggattggcgtccgggcggctatctaggggctgctgggaagatggcggactcggtggctagccgatgaggaggccgcggggggaacccggcccccgggccccgagaccgactgagggagcgacctgcgcagggcccggggagtcatggtctccatcacccaactccatgcttcgagtcctgctctctgctcagacctcccctgctcggctgtctggcctgctgctgatccctccagtacagccctgctgtttggggcccagcaaatggggggaccggcctgttggaggaggccccagtgcaggtcctgtgcaaggactgcagcggcttctggaacaggcgaagagccctggggagctgctgcgctggctgggccagaaccccagcaaggtgcgcgcccaccactactcggtggcgcttcgtcgtctgggccagctcttggggtctcggccacggccccctcctgtggagcaggtcacactgcaggacttgagtcagctcatcatccgaaactgcccctcctttgtagattttcaccaatactaccatggttttttctgctatgcttgctgtcttgacttggctttccatctgatggtcccctggtgtgtgccctggaacaggagcgaaggctccgcctccctccgaagccacctccccctttgcagccccttctccgaggtgggcaagggttggaagctgctctaagctgcccccgttttctgcggtatccacggcagcatctgatcagcagcctggcagaggcaaggccagaggaactgactccccacgtgatggtgctcctggcccagcacctggcccggcaccggttgcgggagccccagcttctggaagccattgcccacttcctggtggttcaggaaacgcaactcagcagcaaggtggtacagaagttggtcctgccctttgggcgactgaactacctgcccctggaacagcagtttatgccctgccttgagaggatcctggctcgggaagcaggggtggcacccctggctacagtcaacatcttgatgtcactgtgccaactgcggtgcctgcccttcagagccctgcactttgttttttcccctggcttcatcaactacatcagtggcacccctcatgctctgattgtgcgtcgctacctctccctgctggacacggccgtggagctggagctcccaggataccggggtccccgccttccccgaaggcagcaagtgcccatctttccccagcctctcatcaccgaccgtgcccgctgcaagtacagtcacaaggacatagtagctgaggggttgcgccagctgctgggggaggagaaataccgccaggacctgactgtgcctccaggctactgcacagacttcctgctgtgcgccagcagctctggtgctgtgcttcccgtgaggacccaggaccccttcctgccatacccaccaaggtcctgcccacagggccaggctgcctctagcgccactactcgagaccctgcccagagggtggtgctggtgttgcgggaacgctggcatttctgccgggacggccgggtgctgctgggctcgagggccctgagggagcggcacctaggcctgatgggctaccagctcctgccgctacccttcgaggaactggagtcccagagaggcctgccccagctcaagagctacctgaggcagaagctccaggccctgggcctgcgctgggggcctgaagggggctgaggggatgatgtggggttcaggatggcccccccatggggggtggatgatttgcactttggttccctgtgttttgatttctcattaaagttcctttccttccc

SEQ ID NO: 314610 - DNA, 1599 bp, Homo sapiens
tccctggctcgcagtgcctgccgggagccacgtctccgaagaccgatagctgcttcgggattggcgtccgggcggctatctaggggctgctgggaagatggcggactcggtggctagccgatgaggaggccgcggggggaacccggcccccgggccccgagaccgactgagggagcgacctgcgcagggcccggggagtcatgcgaagagccctggggagctgctgcgctggctgggccagaaccccagcaaggtgcgcgcccaccactactcggtggcgcttcgtcgtctgggccagctcttggggtctcggccacggccccctcctgtggagcaggtcacactgcaggacttgagtcagctcatcatccgaaactgcccctcctttgacattcacaccatccacgtgtgtctgcaccttgcagtcttacttggctttccatctgatggtcccctggtgtgtgccctggaacaggagcgaaggctccgcctccctccgaagccacctccccctttgcagccccttctccgagaggcaaggccagaggaactgactccccacgtgatggtgctcctggcccagcacctggcccggcaccggttgcgggagccccagcttctggaagccattgcccacttcctggtggttcaggaaacgcaactcagcagcaaggtggtacagaagttggtcctgccctttgggcgactgaactacctgcccctggaacagcagtttatgccctgccttgagaggatcctggctcgggaagcaggggtggcacccctggctacagtcaacatcttgatgtcactgtgccaactgcggtgcctgcccttcagagccctgcactttgttttttcccctggcttcatcaactacatcagtggcacccctcatgctctgattgtgcgtcgctacctctccctgctggacacggccgtggagctggagctcccaggataccggggtccccgccttccccgaaggcagcaagtgcccatctttccccagcctctcatcaccgaccgtgcccgctgcaagtacagtcacaaggacatagtagctgaggggttgcgccagctgctgggggaggagaaataccgccaggacctgactgtgcctccaggctactgcacagacttcctgctgtgcgccagcagctctggtgctgtgcttcccgtgaggacccaggaccccttcctgccatacccaccaaggtcctgcccacagggccaggctgcctctagcgccactactcgagaccctgcccagagggtggtgctggtgttgcgggaacgctggcatttctgccgggacggccgggtgctgctgggctcgagggccctgagggagcggcacctaggcctgatgggctaccagctcctgccgctacccttcgaggaactggagtcccagagaggcctgccccagctcaagagctacctgaggcagaagctccaggccctgggcctgcgctgggggcctgaagggggctgaggggatgatgtggggttcaggatggcccccccatggggggtggatgatttgcactttggttccctgtgttttgatttctcattaaagttcctttccttccc

SEQ ID NO: 314611 - DNA, 1851 bp, Homo sapiens
  misc_feature (1494)..(1494): n is a, c, g, or t
tccctggctcgcagtgcctgccgggagccacgtctccgaagaccgatagctgcttcgggattggcgtccgggcggctatctaggggctgctgggaagatggcggactcggtggctagccgatgaggaggccgcggggggaacccggcccccgggccccgagaccgactgagggagcgacctgcgcagggcccggggagtcatggtctccatcacccaactccatgcttcgagtcctgctctctgctcagacctcccctgctcggctgtctggcctgctgctgatccctccagtacagccctgctgtttggggcccagcaaatggggggaccggcctgttggaggaggccccagtgcaggtcctgtgcaaggactgcagcggcttctggaacaggcgaagagccctggggagctgctgcgctggctgggccagaaccccagcaaggtgcgcgcccaccactactcggtggcgcttcgtcgtctgggccagctcttggggtctcggccacggccccctcctgtggagcaggtcacactgcaggacttgagtcagctcatcatccgaaactgcccctcctttgacattcacaccatccacgtgtgtctgcaccttgcagtcttacttggctttccatctgatggtcccctggtgtgtgccctggaacaggagcgaaggctccgcctccctccgaagccacctccccctttgcagccccttctccgaggtgggcaagggttggaagctgctctaagctgcccccgttttctgcggtatccacggcagcatctgatcagcagcctggcagaggcaaggccagaggaactgactccccacgtgatggtgctcctggcccagcacctggcccggcaccggttgcgggagccccagcccagcctctcatcaccgaccgtgcccgctgcaagtacagtcacaaggacatagtagctgaggggttgcgccagctgctgggggaggagaaataccgccaggacctgactgtgcctccaggctactgcacagacttcctgctgtgcgccagcagctctggtgctgtgcttcccgtgaggacccaggaccccttcctgccatacccaccaaggtcctgcccacagggccaggctgcctctagcgccactactcgagaccctgcccagagggtggtgctggtgttgcgggaacgctggcatttctgccgggacggccgggtgctgctgggctcgagggccctgagggagcggcacctaggcctgatgggctaccagctcctgccgctacccttcgaggaactggagtcccagagaggcctgccccagctcaagagctacctgaggcagaagctccaggccctgggcctgcgctgggggcctgaagggggctgaggggatgatgtggggttcaggatggcccccccatggggggtggatgatttgcactttggttccctgtgttttgatttctcattaaagttcctttccttcccaaaaaaaaaaaaanaaaaaaaaaaaaaaaaaaaggggggggagacaaaaaagattatctcccgagagggggcccaaagttaacggggatacccacagtttttgtgtggacaagggggccccaaaaggagggacccagtattataaacgcaaaaggaacagtgggccacggcagtattaaaacaagacgtccagaagaggtggggaaaaactgtttgtaaacgataggggaaaaatcatgtgagataaagaggagaggacataaatttcggggggggtacaaccaattttggggacaaaaatatacttataagaaagtatttaaagcgtctaaagggaaaaatattaaaattttaaagggtataaaactggg

SEQ ID NO: 314612 - DNA, 1551 bp, Homo sapiens
tccctggctcgcagtgcctgccgggagccacgtctccgaagaccgatagctgcttcgggattggcgtccgggcggctatctaggggctgctgggaagatggcggactcggtggctagccgatgaggaggccgcggggggaacccggcccccgggccccgagaccgactgagggagcgacctgcgcagggcccggggagtcatggtctccatcacccaactccatgcttcgagtcctgctctctgctcagacctcccctgctcggctgtctggcctgctgctgatccctccagtacagccctgctgtttggggcccagcaaatggggggaccggcctgttggaggaggccccagtgcaggtcctgtgcaaggactgcagcggcttctggaacaggcgaagagccctggggagctgctgcgctggctgggccagaaccccagcaaggtgcgcgcccaccactactcggtggcgcttcgtcgtctgggccagctcttggggtctcggccacggccccctcctgtggagcaggtcacactgcaggacttgagtcagctcatcatccgaaactgcccctcctttgacattcacaccatccacgtgtgtctgcaccttgcagtcttacttggtggtacagaagttggtcctgccctttgggcgactgaactacctgcccctggaacagcagtttatgccctgccttgagaggatcctggctcgggaagcaggggtggcacccctggctacagtcaacatcttgatgtcactgtgccaactgcggtgcctgcccttcagagccctgcactttgttttttcccctggcttcatcaactacatcagtggcacccctcatgctctgattgtgcgtcgctacctctccctgctggacacggccgtggagctggagctcccaggataccggggtccccgccttccccgaaggcagcaagtgcccatctttccccagcctctcatcaccgaccgtgcccgctgcaagtacagtcacaaggacatagtagctgaggggttgcgccagctgctgggggaggagaaataccgccaggacctgactgtgcctccaggctactgcacagacttcctgctgtgcgccagcagctctggtgctgtgcttcccgtgaggacccaggaccccttcctgccatacccaccaaggtcctgcccacagggccaggctgcctctagcgccactactcgagaccctgcccagagggtggtgctggtgttgcgggaacgctggcatttctgccgggacggccgggtgctgctgggctcgagggccctgagggagcggcacctaggcctgatgggctaccagctcctgccgctacccttcgaggaactggagtcccagagaggcctgccccagctcaagagctacctgaggcagaagctccaggccctgggcctgcgctgggggcctgaagggggctgaggggatgatgtggggttcaggatggcccccccatggggggtggatgatttgcactttggttccctgtgttttgatttctcattaaagttcctttccttccc

SEQ ID NO: 314613 - DNA, 2614 bp, Homo sapiens
tccctggctcgcagtgcctgccgggagccacgtctccgaagaccgatagctgcttcgggattggcgtccgggcggctatctaggggctgctgggaagatggcggactcggtggctagccgatgaggaggccgcggggggaacccggcccccgggccccgagaccgactgagggagcgacctgcgcagggcccggggagtcatgtaggggtggcgcctgcggggagggctgcgggagggcagcgggagctggtgttagcggcagcggccacggtctcctggcgtccctgggccggggtgggtgttggggcccccgacttcgccgactccgcgccatcgcaaagcggtgcactcgggctccacgcgcgccctgcgaggtgggcgctgcgttttcatttcacgggtgaggagacttagagagacgaagccacttgtccaaggtcacgccgctgggtctccatcacccaactccatgcttcgagtcctgctctctgctcagacctcccctgctcggctgtctggcctgctgctgatccctccagtacagccctgctgtttggggcccagcaaatggggggaccggcctgttggaggaggccccagtgcaggtcctgtgcaaggactgcagcggcttctggaacaggcgaagagccctggggagctgctgcgctggctgggccagaaccccagcaaggtgcgcgcccaccactactcggtggcgcttcgtcgtctgggccagctcttggggtctcggccacggccccctcctgtggagcaggtcacactgcaggacttgagtcagctcatcatccgaaactgcccctcctttgacattcacaccatccacgtgtgtctgcaccttgcagtcttacttggtgaggaggggcttgaggtgggcgcctggggggctaggtgttaatgaagaatagggagaacagtagaggaccacggacagagacccagcctctcaggcgtttgcccaggaacgcttgctcctgctcccgtcctatgtctgcggcagacatcatgagtcgaacgcactccttccggcctcgctagggtgccaccccagattcctgctaatagagtgccctaggaagccaccataatttgtcacaattggtatgagatgaaagcctatttgccatctttgtatgtactccctacaaaccgtttcgatacctcatagccacatgatactttacatgtctctagtgtttgcacttaaactctagcacaccttcccgctcaggaaacgggagaggagaaaggtggagaattcaccaagtaaccccatgataagaacagcagcacagctctgttaccaggctgccttttacctctccccctcaggctttccatctgatggtcccctggtgtgtgccctggaacaggagcgaaggctccgcctccctccgaagccacctccccctttgcagccccttctccgagaggcaaggccagaggaactgactccccacgtgatggtgctcctggcccagcacctggcccggcaccggttgcgggagccccagcttctggaagccattgcccacttcctggtggttcaggaaacgcaactcagcagcaaggtggtacagaagttggtcctgccctttgggcgactgaactacctgcccctggaacagcagtttatgccctgccttgagaggatcctggctcgggaagcaggggtggcacccctggctacagtcaacatcttgatgtcactgtgccaactgcggtgcctgcccttcagagccctgcactttgttttttcccctggcttcatcaactacatcagtggtacgcagccaggatggctggctgggcccctgagggctggagaggcaggggagcagggtggcctgcagcccagagccccagtccccgcctccccacaggcacccctcatgctctgattgtgcgtcgctacctctccctgctggacacggccgtggagctggagctcccaggataccggggtccccgccttccccgaaggcagcaagtgcccatctttccccagcctctcatcaccgaccgtgcccgctgcaagtacagtcacaaggacatagtagctgaggggttgcgccagctgctgggggaggagaaataccgccaggacctgactgtgcctccaggctactgcacagacttcctgctgtgcgccagcagctctggtgctgtgcttcccgtgaggacccaggaccccttcctgccatacccaccaaggtcctgcccacagggccaggctgcctctagcgccactactcgagaccctgcccagagggtggtgctggtgttgcgggaacgctggcatttctgccgggacggccgggtgctgctgggctcgagggccctgagggagcggcacctaggcctgatgggctaccagctcctgccgctacccttcgaggaactggagtcccagagaggcctgccccagctcaagagctacctgaggcagaagctccaggccctgggcctgcgctgggggcctgaagggggctgaggggatgatgtggggttcaggatggcccccccatggggggtggatgatttgcactttggttccctgtgttttgatttctcattaaagttcctttccttccc

SEQ ID NO: 314614 - DNA, 1465 bp, Homo sapiens
tccctggctcgcagtgcctgccgggagccacgtctccgaagaccgatagctgcttcgggattggcgtccgggcggctatctaggggctgctgggaagatggcggactcggtggctagccgatgaggaggccgcggggggaacccggcccccgggccccgagaccgactgagggagcgacctgcgcagggcccggggagtcatgctttccatctgatggtcccctggtgtgtgccctggaacaggagcgaaggctccgcctccctccgaagccacctccccctttgcagccccttctccgagaggcaaggccagaggaactgactccccacgtgatggtgctcctggcccagcacctggcccggcaccggttgcgggagccccagcttctggaagccattgcccacttcctggtggttcaggaaacgcaactcagcagcaaggtggtacagaagttggtcctgccctttgggcgactgaactacctgcccctggaacagcagtttatgccctgccttgagaggatcctggctcgggaagcaggggtggcacccctggctacagtcaacatcttgatgtcactgtgccaactgcggtgcctgcccttcagagccctgcactttgttttttcccctggcttcatcaactacatcagtggtacgcagccaggatggctggctgggcccctgagggctggagaggcaggggagcagggtggcctgcagcccagagccccagtccccgcctccccacaggcacccctcatgctctgattgtgcgtcgctacctctccctgctggacacggccgtggagctggagctcccaggataccggggtccccgccttccccgaaggcagcaagtgcccatctttccccagcctctcatcaccgaccgtgcccgctgcaagtacagtcacaaggacatagtagctgaggggttgcgccagctgctgggggaggagaaataccgccaggacctgactgtgcctccaggctactgcacagacttcctgctgtgcgccagcagctctggtgctgtgcttcccgtgaggacccaggaccccttcctgccatacccaccaaggtcctgcccacagggccaggctgcctctagcgccactactcgagaccctgcccagagggtggtgctggtgttgcgggaacgctggcatttctgccgggacggccgggtgctgctgggctcgagggccctgagggagcggcacctaggcctgatgggctaccagctcctgccgctacccttcgaggaactggagtcccagagaggcctgccccagctcaagagctacctgaggcagaagctccaggccctgggcctgcgctgggggcctgaagggggctgaggggatgatgtggggttcaggatggcccccccatggggggtggatgatttgcactttggttccctgtgttttgatttctcattaaagttcctttccttccc

SEQ ID NO: 314615 - DNA, 2601 bp, Homo sapiens
tccctggctcgcagtgcctgccgggagccacgtctccgaagaccgatagctgcttcgggattggcgtccgggcggctatctaggggctgctgggaagatggcggactcggtggctagccgatgaggaggccgcggggggaacccggcccccgggccccgagaccgactgagggagcgacctgcgcagggcccggggagtcatgtaggggtggcgcctgcggggagggctgcgggagggcagcgggagctggtgttagcggcagcggccacggtctcctggcgtccctgggccggggtgggtgttggggcccccgacttcgccgactccgcgccatcgcaaagcggtgcactcgggctccacgcgcgccctgcgaggtgggcgctgcgttttcatttcacgggtgaggagacttagagagacgaagccacttgtccaaggtcacgccgctggtgagtgggagcgcccagcatggaacccagcaccgtccagccgcggagcccgcgttccaccctctgtgccgccgccgcctcctgtgggagagggaggtggtcgggagagtgcacgccggtgccgcctgggctccagactgggcgcgaccactaacccggttaatgacctcgggcttaacttaaccccttcgctgctctgggcctgcgtttctccaccggtgaaatgagggtctccatcacccaactccatgcttcgagtcctgctctctgctcagacctcccctgctcggctgtctggcctgctgctgatccctccagtacagccctgctgtttggggcccagcaaatggggggaccggcctgttggaggaggccccagtgcaggtcctgtgcaaggactgcagcggcttctggaacaggcgaagagccctggggagctgctgcgctggctgggccagaaccccagcaaggtgcgcgcccaccactactcggtggcgcttcgtcgtctgggccagctcttggggtctcggccacggccccctcctgtggagcaggtcacactgcaggacttgagtcagctcatcatccgaaactgcccctcctttgacattcacaccatccacgtgtgtctgcaccttgcagtcttacttggtggtacagaagttggtcctgccctttgggcgactgaactacctgcccctggaacagcagtttatgccctgccttgagaggatcctggctcgggaagcaggggtggcacccctggctacagtcaacatcttgatgtcactgtgccaactgcggtgcctgcccttcagagccctgcactttgttttttcccctggcttcatcaactacatcagtggtacgcagccaggatggctggctgggcccctgagggctggagaggcaggggagcagggtggcctgcagcccagagccccagtccccgcctccccacaggcacccctcatgctctgattgtgcgtcgctacctctccctgctggacacggccgtggagctggagctcccaggataccggggtccccgccttccccgaaggcagcaagtgcccatctttccccagcctctcatcaccgaccgtgcccgctgcaagtacaggtggatggggcagcctggggcaaggggaggggccagcctgggaccagcagagtggaaaagccagagggaccatgaagcgccaaagctaaggagctctcggccaccataaaactgggccctgaagcagcagagggctttgcccagggtggtggcactagactgggacagattaggatgaggtgccgggcccttcctgctactggtgtcctttctcctcagtcacaaggacatagtagctgaggggttgcgccagctgctgggggaggagaaataccgccaggacctgactgtgcctccaggctactgcacaggtgagcaaggggcaggcggcaggcccggggagacggagccctggctaaggccgccggccctgctcccctccagacttcctgctgtgcgccagcagctctggtgctgtgcttcccgtgaggacccaggaccccttcctgccatacccaccaaggtcctgcccacagggccaggctgcctctagcgccactactcgagaccctgcccagaggtaaaggaggcagggtgggggagccctggccaccttgcccgccatgccctgagccacgtccctccccctgcagggtggtgctggtgttgcgggaacgctggcatttctgccgggacggccgggtgctgctgggctcgagggccctgagggagcggcacctaggcctgatgggctaccagctcctgccggtgagtggccctggcctggcccgtggcgcatcctcactcccagcctgcgggtaacctgccgccctctcctctccccacagctacccttcgaggaactggagtcccagagaggcctgccccagctcaagagctacctgaggcagaagctccaggccctgggcctgcgctgggggcctgaagggggctgaggggatgatgtggggttcaggatggcccccccatggggggtggatgatttgcactttggttccctgtgttttgatttctcattaaagttcctttccttccccgttgtgaatctcagttttgggacggggagc

SEQ ID NO: 314616 - DNA, 308 bp, Homo sapiens
caggaaacgggagaggagaaaggtggagaattcaccaagtaaccccatgataagaacagcagcacagctctgttaccaggctgccttttacctctccccctcaggctttccatctgatggtcccctggtgtgtgccctggaacaggagcgaaggctccgcctccctccgaagccacctccccctttgcagccccttctccgaggtgggcaagggttggaagctgctctaagctgcccccgttttctgcggtatccacggcagcatctgatcagcagcctggcaggtgctggagggggttaaaatcaga

SEQ ID NO: 314617 - DNA, 1969 bp, Homo sapiens
tccctggctcgcagtgcctgccgggagccacgtctccgaagaccgatagctgcttcgggattggcgtccgggcggctatctaggggctgctgggaagatggcggactcggtggctagccgatgaggaggccgcggggggaacccggcccccgggccccgagaccgactgagggagcgacctgcgcagggcccggggagtcatggtctccatcacccaactccatgcttcgagtcctgctctctgctcagacctcccctgctcggctgtctggcctgctgctgatccctccagtacagccctgctgtttggggcccagcaaatggggggaccggcctgttggaggaggccccagtgcaggtcctgtgcaaggactgcagcggcttctggaacaggcgaagagccctggggagctgctgcgctggctgggccagaaccccagcaaggtgcgcgcccaccactactcggtggcgcttcgtcgtctgggccagctcttggggtctcggccacggccccctcctgtggagcaggtcacactgcaggacttgagtcagctcatcatccgaaactgcccctcctttgacattcacaccatccacgtgtgtctgcaccttgcagtcttacttggctttccatctgatggtcccctggtgtgtgccctggaacaggagcgaaggctccgcctccctccgaagccacctccccctttgcagccccttctccgaggtgggcaagggttggaagctgctctaagctgcccccgttttctgcggtatccacggcagcatctgatcagcagcctggcagaggcaaggccagaggaactgactccccacgtgatggtgctcctggcccagcacctggcccggcaccggttgcgggagccccagcttctggaagccattgcccacttcctggtggttcaggaaacgcaactcagcagcaaggtggtacagaagttggtcctgccctttgggcgactgaactacctgcccctggaacagcagtttatgccctgccttgagaggatcctggctcgggaagcaggggtggcacccctggctacagtcaacatcttgatgtcactgtgccaactgcggtgcctgcccttcagagccctgcactttgttttttcccctggcttcatcaactacatcagtggtacgcagccaggatggctggctgggcccctgagggctggagaggcaggggagcagggtggcctgcagcccagagccccagtccccgcctccccacaggcacccctcatgctctgattgtgcgtcgctacctctccctgctggacacggccgtggagctggagctcccaggataccggggtccccgccttccccgaaggcagcaagtgcccatctttccccagcctctcatcaccgaccgtgcccgctgcaagtacagtcacaaggacatagtagctgaggggttgcgccagctgctgggggaggagaaataccgccaggacctgactgtgcctccaggctactgcacagacttcctgctgtgcgccagcagctctggtgctgtgcttcccgtgaggacccaggaccccttcctgccatacccaccaaggtcctgcccacagggccaggctgcctctagcgccactactcgagaccctgcccagagggtggtgctggtgttgcgggaacgctggcatttctgccgggacggccgggtgctgctgggctcgagggccctgagggagcggcacctaggcctgatgggctaccagctcctgccgctacccttcgaggaactggagtcccagagaggcctgccccagctcaagagctacctgaggcagaagctccaggccctgggcctgcgctgggggcctgaagggggctgaggggatgatgtggggttcaggatggcccccccatggggggtggatgatttgcactttggttccctgtgttttgatttctcattaaagttcctttccttccc

SEQ ID NO: 314618 - DNA, 2242 bp, Homo sapiens
  misc_feature (1885)..(1885): n is a, c, g, or t
tccctggctcgcagtgcctgccgggagccacgtctccgaagaccgatagctgcttcgggattggcgtccgggcggctatctaggggctgctgggaagatggcggactcggtggctagccgatgaggaggccgcggggggaacccggcccccgggccccgagaccgactgagggagcgacctgcgcagggcccggggagtcatggtctccatcacccaactccatgcttcgagtcctgctctctgctcagacctcccctgctcggctgtctggcctgctgctgatccctccagtacagccctgctgtttggggcccagcaaatggggggaccggcctgttggaggaggccccagtgcaggtcctgtgcaaggactgcagcggcttctggaacaggcgaagagccctggggagctgctgcgctggctgggccagaaccccagcaaggtgcgcgcccaccactactcggtggcgcttcgtcgtctgggccagctcttggggtctcggccacggccccctcctgtggagcaggtcacactgcaggacttgagtcagctcatcatccgaaactgcccctcctttgacattcacaccatccacgtgtgtctgcaccttgcagtcttacttggctttccatctgatggtcccctggtgtgtgccctggaacaggagcgaaggctccgcctccctccgaagccacctccccctttgcagccccttctccgaggtgggcaagggttggaagctgctctaagctgcccccgttttctgcggtatccacggcagcatctgatcagcagcctggcagaggcaaggccagaggaactgactccccacgtgatggtgctcctggcccagcacctggcccggcaccggttgcgggagccccagcttctggaagccattgcccacttcctggtggttcaggaaacgcaactcagcagcaaggtggtacagaagttggtcctgccctttgggcgactgaactacctgcccctggaacagcagtttatgccctgccttgagaggatcctggctcgggaagcaggggtggcacccctggctacagtcaacatcttgatgtcactgtgccaactgcggtgcctgcccttcagagccctgcactttgttttttcccctggcttcatcaactacatcagtggcacccctcatgctctgattgtgcgtcgctacctctccctgctggacacggccgtggagctggagctcccaggataccggggtccccgccttccccgaaggcagcaagtgcccatctttccccagcctctcatcaccgaccgtgcccgctgcaagtacagtcacaaggacatagtagctgaggggttgcgccagctgctgggggaggagaaataccgccaggacctgactgtgcctccaggctactgcacagacttcctgctgtgcgccagcagctctggtgctgtgcttcccgtgaggacccaggaccccttcctgccatacccaccaaggtcctgcccacagggccaggctgcctctagcgccactactcgagaccctgcccagagggtggtgctggtgttgcgggaacgctggcatttctgccgggacggccgggtgctgctgggctcgagggccctgagggagcggcacctaggcctgatgggctaccagctcctgccgctacccttcgaggaactggagtcccagagaggcctgccccagctcaagagctacctgaggcagaagctccaggccctgggcctgcgctgggggcctgaagggggctgaggggatgatgtggggttcaggatggcccccccatggggggtggatgatttgcactttggttccctgtgttttgatttctcattaaagttcctttccttcccaaaaaaaaaaaaanaaaaaaaaaaaaaaaaaaaggggggggagacaaaaaagattatctcccgagagggggcccaaagttaacggggatacccacagtttttgtgtggacaagggggccccaaaaggagggacccagtattataaacgcaaaaggaacagtgggccacggcagtattaaaacaagacgtccagaagaggtggggaaaaactgtttgtaaacgataggggaaaaatcatgtgagataaagaggagaggacataaatttcggggggggtacaaccaattttggggacaaaaatatacttataagaaagtatttaaagcgtctaaagggaaaaatattaaaattttaaagggtataaaactggg

SEQ ID NO: 314619 - DNA, 1944 bp, Homo sapiens
tccctggctcgcagtgcctgccgggagccacgtctccgaagaccgatagctgcttcgggattggcgtccgggcggctatctaggggctgctgggaagatggcggactcggtggctagccgatgaggaggccgcggggggaacccggcccccgggccccgagaccgactgagggagcgacctgcgcagggcccggggagtcatggtctccatcacccaactccatgcttcgagtcctgctctctgctcagacctcccctgctcggctgtctggcctgctgctgatccctccagtacagccctgctgtttggggcccagcaaatggggggaccggcctgttggaggaggccccagtgcaggtcctgtgcaaggactgcagcggcttctggaacaggcgaagagccctggggagctgctgcgctggctgggccagaaccccagcaaggtgcgcgcccaccactactcggtggcgcttcgtcgtctgggccagctcttggggtctcggccacggccccctcctgtggagcaggtcacactgcaggacttgagtcagctcatcatccgaaactgcccctcctttgacattcacaccatccacgtgtgtctgcaccttgcagtcttacttggctttccatctgatggtcccctggtgtgtgccctggaacaggagcgaaggctccgcctccctccgaagccacctccccctttgcagccccttctccgaggtgggcaagggttggaagctgctctaagctgcccccgttttctgcggtatccacggcagcatctgatcagcagcctggcagaggcaaggccagaggaactgactccccacgtgatggtgctcctggcccagcacctggcccggcaccggttgcgggagccccagcttctggaagccattgcccacttcctggtggttcaggaaacgcaactcagcagcaaggtggtacagaagttggtcctgccctttgggcgactgaactacctgcccctggaacagcagtttatgccctgccttgagaggatcctggctcgggaagcaggggtggcacccctggctacagtcaacatcttgatgtcactgtgccaactgcggtgcctgcccttcagagccctgcactttgttttttcccctggcttcatcaactacatcagtggcacccctcatgctctgattgtgcgtcgctacctctccctgctggacacggccgtggagctggagctcccaggataccggggtccccgccttccccgaaggcagcaagtgcccatctttccccagcctctcatcaccgaccgtgcccgctgcaagtacagtcacaaggacatagtagctgaggggttgcgccagctgctgggggaggagaaataccgccaggacctgactgtgcctccaggctactgcacaggtgagcaaggggcaggcggcaggcccggggagacggagccctggctaaggccgccggccctgctcccctccagacttcctgctgtgcgccagcagctctggtgctgtgcttcccgtgaggacccaggaccccttcctgccatacccaccaaggtcctgcccacagggccaggctgcctctagcgccactactcgagaccctgcccagagggtggtgctggtgttgcgggaacgctggcatttctgccgggacggccgggtgctgctgggctcgagggccctgagggagcggcacctaggcctgatgggctaccagctcctgccgctacccttcgaggaactggagtcccagagaggcctgccccagctcaagagctacctgaggcagaagctccaggccctgggcctgcgctgggggcctgaagggggctgaggggatgatgtggggttcaggatggcccccccatggggggtggatgatttgcactttggttccctgtgttttgatttctcattaaagttcctttccttccc

SEQ ID NO: 314620 - DNA, 1951 bp, Homo sapiens
tccctggctcgcagtgcctgccgggagccacgtctccgaagaccgatagctgcttcgggattggcgtccgggcggctatctaggggctgctgggaagatggcggactcggtggctagccgatgaggaggccgcggggggaacccggcccccgggccccgagaccgactgagggagcgacctgcgcagggcccggggagtcatggtctccatcacccaactccatgcttcgagtcctgctctctgctcagacctcccctgctcggctgtctggcctgctgctgatccctccagtacagccctgctgtttggggcccagcaaatggggggaccggcctgttggaggaggccccagtgcaggtcctgtgcaaggactgcagcggcttctggaacaggcgaagagccctggggagctgctgcgctggctgggccagaaccccagcaaggtgcgcgcccaccactactcggtggcgcttcgtcgtctgggccagctcttggggtctcggccacggccccctcctgtggagcaggtcacactgcaggacttgagtcagctcatcatccgaaactgcccctcctttgacattcacaccatccacgtgtgtctgcaccttgcagtcttacttggctttccatctgatggtcccctggtgtgtgccctggaacaggagcgaaggctccgcctccctccgaagccacctccccctttgcagccccttctccgaggtgggcaagggttggaagctgctctaagctgcccccgttttctgcggtatccacggcagcatctgatcagcagcctggcagaggcaaggccagaggaactgactccccacgtgatggtgctcctggcccagcacctggcccggcaccggttgcgggagccccagcttctggaagccattgcccacttcctggtggttcaggaaacgcaactcagcagcaaggtggtacagaagttggtcctgccctttgggcgactgaactacctgcccctggaacagcagtttatgccctgccttgagaggatcctggctcgggaagcaggggtggcacccctggctacagtcaacatcttgatgtcactgtgccaactgcggtgcctgcccttcagagccctgcactttgttttttcccctggcttcatcaactacatcagtggcacccctcatgctctgattgtgcgtcgctacctctccctgctggacacggccgtggagctggagctcccaggataccggggtccccgccttccccgaaggcagcaagtgcccatctttccccagcctctcatcaccgaccgtgcccgctgcaagtacagtcacaaggacatagtagctgaggggttgcgccagctgctgggggaggagaaataccgccaggacctgactgtgcctccaggctactgcacagacttcctgctgtgcgccagcagctctggtgctgtgcttcccgtgaggacccaggaccccttcctgccatacccaccaaggtcctgcccacagggccaggctgcctctagcgccactactcgagaccctgcccagagggtggtgctggtgttgcgggaacgctggcatttctgccgggacggccgggtgctgctgggctcgagggccctgagggagcggcacctaggcctgatgggctaccagctcctgccggtgagtggccctggcctggcccgtggcgcatcctcactcccagcctgcgggtaacctgccgccctctcctctccccacagctacccttcgaggaactggagtcccagagaggcctgccccagctcaagagctacctgaggcagaagctccaggccctgggcctgcgctgggggcctgaagggggctgaggggatgatgtggggttcaggatggcccccccatggggggtggatgatttgcactttggttccctgtgttttgatttctcattaaagttcctttccttccc

SEQ ID NO: 314621 - DNA, 2017 bp, Homo sapiens
tccctggctcgcagtgcctgccgggagccacgtctccgaagaccgatagctgcttcgggattggcgtccgggcggctatctaggggctgctgggaagatggcggactcggtggctagccgatgaggaggccgcggggggaacccggcccccgggccccgagaccgactgagggagcgacctgcgcagggcccggggagtcatggtctccatcacccaactccatgcttcgagtcctgctctctgctcagacctcccctgctcggctgtctggcctgctgctgatccctccagtacagccctgctgtttggggcccagcaaatggggggaccggcctgttggaggaggccccagtgcaggtcctgtgcaaggactgcagcggcttctggaacaggcgaagagccctggggagctgctgcgctggctgggccagaaccccagcaaggtgcgcgcccaccactactcggtggcgcttcgtcgtctgggccagctcttggggtctcggccacggccccctcctgtggagcaggtcacactgcaggacttgagtcagctcatcatccgaaactgcccctcctttgacattcacaccatccacgtgtgtctgcaccttgcagtcttacttggctttccatctgatggtcccctggtgtgtgccctggaacaggagcgaaggctccgcctccctccgaagccacctccccctttgcagccccttctccgaggtgggcaagggttggaagctgctctaagctgcccccgttttctgcggtatccacggcagcatctgatcagcagcctggcagaggcaaggccagaggaactgactccccacgtgatggtgctcctggcccagcacctggcccggcaccggttgcgggagccccagcttctggaagccattgcccacttcctggtggttcaggaaacgcaactcagcagcaaggtggtacagaagttggtcctgccctttgggcgactgaactacctgcccctggaacagcagtttatgccctgccttgagaggatcctggctcgggaagcaggggtggcacccctggctacagtcaacatcttgatgtcactgtgccaactgcggtgcctgcccttcagagccctgcactttgttttttcccctggcttcatcaactacatcagtggcacccctcatgctctgattgtgcgtcgctacctctccctgctggacacggccgtggagctggagctcccaggataccggggtccccgccttccccgaaggcagcaagtgcccatctttccccagcctctcatcaccgaccgtgcccgctgcaagtacagtcacaaggacatagtagctgaggggttgcgccagctgctgggggaggagaaataccgccaggacctgactgtgcctccaggctactgcacaggtgagcaaggggcaggcggcaggcccggggagacggagccctggctaaggccgccggccctgctcccctccagacttcctgctgtgcgccagcagctctggtgctgtgcttcccgtgaggacccaggaccccttcctgccatacccaccaaggtcctgcccacagggccaggctgcctctagcgccactactcgagaccctgcccagaggtaaaggaggcagggtgggggagccctggccaccttgcccgccatgccctgagccacgtccctccccctgcagggtggtgctggtgttgcgggaacgctggcatttctgccgggacggccgggtgctgctgggctcgagggccctgagggagcggcacctaggcctgatgggctaccagctcctgccgctacccttcgaggaactggagtcccagagaggcctgccccagctcaagagctacctgaggcagaagctccaggccctgggcctgcgctgggggcctgaagggggctgaggggatgatgtggggttcaggatggcccccccatggggggtggatgatttgcactttggttccctgtgttttgatttctcattaaagttcctttccttccc

SEQ ID NO: 314622 - DNA, 1756 bp, Homo sapiens
tccctggctcgcagtgcctgccgggagccacgtctccgaagaccgatagctgcttcgggattggcgtccgggcggctatctaggggctgctgggaagatggcggactcggtggctagccgatgaggaggccgcggggggaacccggcccccgggccccgagaccgactgagggagcgacctgcgcagggcccggggagtcatggtctccatcacccaactccatgcttcgagtcctgctctctgctcagacctcccctgctcggctgtctggcctgctgctgatccctccagtacagccctgctgtttggggcccagcaaatggggggaccggcctgttggaggaggccccagtgcaggtcctgtgcaaggactgcagcggcttctggaacaggcgaagagccctggggagctgctgcgctggctgggccagaaccccagcaaggtgcgcgcccaccactactcggtggcgcttcgtcgtctgggccagctcttggggtctcggccacggccccctcctgtggagcaggtcacactgcaggacttgagtcagctcatcatccgaaactgcccctcctttgacattcacaccatccacgtgtgtctgcaccttgcagtcttacttggctttccatctgatggtcccctggtgtgtgccctggaacaggagcgaaggctccgcctccctccgaagccacctccccctttgcagccccttctccgaggtgggcaagggttggaagctgctctaagctgcccccgttttctgcggtatccacggcagcatctgatcagcagcctggcagaggcaaggccagaggaactgactccccacgtgatggtgctcctggcccagcacctggcccggcaccggttgcgggagccccagcttctggaagccattgcccacttcctggtggttcaggaaacgcaactcagcagcaaggtggtacagaagttggtcctgccctttgggcgactgaactacctgcccctggaacagcagtttatgccctgccttgagaggatcctggctcgggaagcaggggtggcacccctggctacagtcaacatcttgatgtcactgtgccaactgcggtgcctgcccttcagagccctgcactttgttttttcccctggcttcatcaactacatcagtggcacccctcatgctctgattgtgcgtcgctacctctccctgctggacacggccgtggagctggagctcccaggataccggggtccccgccttccccgaaggcagcaagtgcccatctttccccagcctctcatcaccgaccgtgcccgctgcaagtacagtcacaaggacatagtagctgaggggttgcgccagctgctgggggaggagaaataccgccaggacctgactgtgcctccaggctactgcacagacttcctgctgtgcgccagcagctctggtgctgtgcttcccgtgaggacccaggaccccttcctgccatacccaccaaggtcctgcccacagggccaggctgcctctagcgccactactcgagaccctgcccagagctacccttcgaggaactggagtcccagagaggcctgccccagctcaagagctacctgaggcagaagctccaggccctgggcctgcgctgggggcctgaagggggctgaggggatgatgtggggttcaggatggcccccccatggggggtggatgatttgcactttggttccctgtgttttgatttctcattaaagttcctttccttccc

SEQ ID NO: 314623 - DNA, 1620 bp, Homo sapiens
tccctggctcgcagtgcctgccgggagccacgtctccgaagaccgatagctgcttcgggattggcgtccgggcggctatctaggggctgctgggaagatggcggactcggtggctagccgatgaggaggccgcggggggaacccggcccccgggccccgagaccgactgagggagcgacctgcgcagggcccggggagtcatggtctccatcacccaactccatgcttcgagtcctgctctctgctcagacctcccctgctcggctgtctggcctgctgctgatccctccagtacagccctgctgtttggggcccagcaaatggggggaccggcctgttggaggaggccccagtgcaggtcctgtgcaaggactgcagcggcttctggaacaggcgaagagccctggggagctgctgcgctggctgggccagaaccccagcaaggtgcgcgcccaccactactcggtggcgcttcgtcgtctgggccagctcttggggtctcggccacggccccctcctgtggagcaggtcacactgcaggacttgagtcagctcatcatccgaaactgcccctcctttgacattcacaccatccacgtgtgtctgcaccttgcagtcttacttggctttccatctgatggtcccctggtgtgtgccctggaacaggagcgaaggctccgcctccctccgaagccacctccccctttgcagccccttctccgaggtgggcaagggttggaagctgctctaagctgcccccgttttctgcggtatccacggcagcatctgatcagcagcctggcagaggcaaggccagaggaactgactccccacgtgatggtgctcctggcccagcacctggcccggcaccggttgcgggagccccagcttctggaagccattgcccacttcctggtggttcaggaaacgcaactcagcagcaaggtggtacagaagttggtcctgccctttgggcgactgaactacctgcccctggaacagcagtttatgccctgccttgagaggatcctggctcgggaagcaggggtggcacccctggctacagtcaacatcttgatgtcactgtgccaactgcggtgcctgcccttcagagccctgcactttgttttttcccctggcttcatcaactacatcagtggcacccctcatgctctgattgtgcgtcgctacctctccctgctggacacggccgtggagctggagctcccaggataccggggtccccgccttccccgaaggcagcaagtgcccatctttccccagcctctcatcaccgaccgtgcccgctgcaagtacagtcacaaggacatagtagctgaggggttgcgccagctgctgggggaggagaaataccgccaggacctgactgtgcctccaggctactgcacagctacccttcgaggaactggagtcccagagaggcctgccccagctcaagagctacctgaggcagaagctccaggccctgggcctgcgctgggggcctgaagggggctgaggggatgatgtggggttcaggatggcccccccatggggggtggatgatttgcactttggttccctgtgttttgatttctcattaaagttcctttccttccc

SEQ ID NO: 314624 - DNA, 2347 bp, Homo sapiens
tccctggctcgcagtgcctgccgggagccacgtctccgaagaccgatagctgcttcgggattggcgtccgggcggctatctaggggctgctgggaagatggcggactcggtggctagccgatgaggaggccgcggggggaacccggcccccgggccccgagaccgactgagggagcgacctgcgcagggcccggggagtcatgtaggggtggcgcctgcggggagggctgcgggagggcagcgggagctggtgttagcggcagcggccacggtctcctggcgtccctgggccggggtgggtgttggggcccccgacttcgccgactccgcgccatcgcaaagcggtgcactcgggctccacgcgcgccctgcgaggtgggcgctgcgttttcatttcacgggtgaggagacttagagagacgaagccacttgtccaaggtcacgccgctggtgagtgggagcgcccagcatggaacccagcaccgtccagccgcggagcccgcgttccaccctctgtgccgccgccgcctcctgtgggagagggaggtggtcgggagagtgcacgccggtgccgcctgggctccagactgggcgcgaccactaacccggttaatgacctcgggcttaacttaaccccttcgctgctctgggcctgcgtttctccaccggtgaaatgagggtctccatcacccaactccatgcttcgagtcctgctctctgctcagacctcccctgctcggctgtctggcctgctgctgatccctccagtacagccctgctgtttggggcccagcaaatggggggaccggcctgttggaggaggccccagtgcaggtcctgtgcaaggactgcagcggcttctggaacaggcgaagagccctggggagctgctgcgctggctgggccagaaccccagcaaggtgcgcgcccaccactactcggtggcgcttcgtcgtctgggccagctcttggggtctcggccacggccccctcctgtggagcaggtcacactgcaggacttgagtcagctcatcatccgaaactgcccctcctttgacattcacaccatccacgtgtgtctgcaccttgcagtcttacttggctttccatctgatggtcccctggtgtgtgccctggaacaggagcgaaggctccgcctccctccgaagccacctccccctttgcagccccttctccgaggtgggcaagggttggaagctgctctaagctgcccccgttttctgcggtatccacggcagcatctgatcagcagcctggcagaggcaaggccagaggaactgactccccacgtgatggtgctcctggcccagcacctggcccggcaccggttgcgggagccccagcttctggaagccattgcccacttcctggtggttcaggaaacgcaactcagcagcaaggtggtacagaagttggtcctgccctttgggcgactgaactacctgcccctggaacagcagtttatgccctgccttgagaggatcctggctcgggaagcaggggtggcacccctggctacagtcaacatcttgatgtcactgtgccaactgcggtgcctgcccttcagagccctgcactttgttttttcccctggcttcatcaactacatcagtggcacccctcatgctctgattgtgcgtcgctacctctccctgctggacacggccgtggagctggagctcccaggataccggggtccccgccttccccgaaggcagcaagtgcccatctttccccagcctctcatcaccgaccgtgcccgctgcaagtacagtcacaaggacatagtagctgaggggttgcgccagctgctgggggaggagaaataccgccaggacctgactgtgcctccaggctactgcacagacttcctgctgtgcgccagcagctctggtgctgtgcttcccgtgaggacccaggaccccttcctgccatacccaccaaggtcctgcccacagggccaggctgcctctagcgccactactcgagaccctgcccagagggtggtgctggtgttgcgggaacgctggcatttctgccgggacggccgggtgctgctgggctcgagggccctgagggagcggcacctaggcctgatgggctaccagctcctgccgctacccttcgaggaactggagtcccagagaggcctgccccagctcaagagctacctgaggcagaagctccaggccctgggcctgcgctgggggcctgaagggggctgaggggatgatgtggggttcaggatggcccccccatggggggtggatgatttgcactttggttccctgtgttttgatttctcattaaagttcctttccttccc

SEQ ID NO: 314625 - DNA, 1843 bp, Homo sapiens
tccctggctcgcagtgcctgccgggagccacgtctccgaagaccgatagctgcttcgggattggcgtccgggcggctatctaggggctgctgggaagatggcggactcggtggctagccgatgaggaggccgcggggggaacccggcccccgggccccgagaccgactgagggagcgacctgcgcagggcccggggagtcatgtaggggtggcgcctgcggggagggctgcgggagggcagcgggagctggtgttagcggcagcggccacggtctcctggcgtccctgggccggggtgggtgttggggcccccgacttcgccgactccgcgccatcgcaaagcggtgcactcgggctccacgcgcgccctgcgaggtgggcgctgcgttttcatttcacgggtgaggagacttagagagacgaagccacttgtccaaggtcacgccgctggtgagtgggagcgcccagcatggaacccagcaccgtccagccgcggagcccgcgttccaccctctgtgccgccgccgcctcctgtgggagagggaggtggtcgggagagtgcacgccggtgccgcctgggctccagactgggcgcgaccactaacccggttaatgacctcgggcttaacttaaccccttcgctgctctgggcctgcgtttctccaccggtgaaatgaggctttccatctgatggtcccctggtgtgtgccctggaacaggagcgaaggctccgcctccctccgaagccacctccccctttgcagccccttctccgagaggcaaggccagaggaactgactccccacgtgatggtgctcctggcccagcacctggcccggcaccggttgcgggagccccagcttctggaagccattgcccacttcctggtggttcaggaaacgcaactcagcagcaaggtggtacagaagttggtcctgccctttgggcgactgaactacctgcccctggaacagcagtttatgccctgccttgagaggatcctggctcgggaagcaggggtggcacccctggctacagtcaacatcttgatgtcactgtgccaactgcggtgcctgcccttcagagccctgcactttgttttttcccctggcttcatcaactacatcagtggcacccctcatgctctgattgtgcgtcgctacctctccctgctggacacggccgtggagctggagctcccaggataccggggtccccgccttccccgaaggcagcaagtgcccatctttccccagcctctcatcaccgaccgtgcccgctgcaagtacagtcacaaggacatagtagctgaggggttgcgccagctgctgggggaggagaaataccgccaggacctgactgtgcctccaggctactgcacagacttcctgctgtgcgccagcagctctggtgctgtgcttcccgtgaggacccaggaccccttcctgccatacccaccaaggtcctgcccacagggccaggctgcctctagcgccactactcgagaccctgcccagagggtggtgctggtgttgcgggaacgctggcatttctgccgggacggccgggtgctgctgggctcgagggccctgagggagcggcacctaggcctgatgggctaccagctcctgccgctacccttcgaggaactggagtcccagagaggcctgccccagctcaagagctacctgaggcagaagctccaggccctgggcctgcgctgggggcctgaagggggctgaggggatgatgtggggttcaggatggcccccccatggggggtggatgatttgcactttggttccctgtgttttgatttctcattaaagttcctttccttccc

SEQ ID NO: 314626 - DNA, 1448 bp, Homo sapiens
tccctggctcgcagtgcctgccgggagccacgtctccgaagaccgatagctgcttcgggattggcgtccgggcggctatctaggggctgctgggaagatggcggactcggtggctagccgatgaggaggccgcggggggaacccggcccccgggccccgagaccgactgagggagcgacctgcgcagggcccggggagtcatgctttccatctgatggtcccctggtgtgtgccctggaacaggagcgaaggctccgcctccctccgaagccacctccccctttgcagccccttctccgaggtgggcaagggttggaagctgctctaagctgcccccgttttctgcggtatccacggcagcatctgatcagcagcctggcagaggcaaggccagaggaactgactccccacgtgatggtgctcctggcccagcacctggcccggcaccggttgcgggagccccagcttctggaagccattgcccacttcctggtggttcaggaaacgcaactcagcagcaaggtggtacagaagttggtcctgccctttgggcgactgaactacctgcccctggaacagcagtttatgccctgccttgagaggatcctggctcgggaagcaggggtggcacccctggctacagtcaacatcttgatgtcactgtgccaactgcggtgcctgcccttcagagccctgcactttgttttttcccctggcttcatcaactacatcagtggcacccctcatgctctgattgtgcgtcgctacctctccctgctggacacggccgtggagctggagctcccaggataccggggtccccgccttccccgaaggcagcaagtgcccatctttccccagcctctcatcaccgaccgtgcccgctgcaagtacagtcacaaggacatagtagctgaggggttgcgccagctgctgggggaggagaaataccgccaggacctgactgtgcctccaggctactgcacagacttcctgctgtgcgccagcagctctggtgctgtgcttcccgtgaggacccaggaccccttcctgccatacccaccaaggtcctgcccacagggccaggctgcctctagcgccactactcgagaccctgcccagagggtggtgctggtgttgcgggaacgctggcatttctgccgggacggccgggtgctgctgggctcgagggccctgagggagcggcacctaggcctgatgggctaccagctcctgccgctacccttcgaggaactggagtcccagagaggcctgccccagctcaagagctacctgaggcagaagctccaggccctgggcctgcgctgggggcctgaagggggctgaggggatgatgtggggttcaggatggcccccccatggggggtggatgatttgcactttggttccctgtgttttgatttctcattaaagttcctttccttccc

SEQ ID NO: 314627 - DNA, 1378 bp, Homo sapiens
tccctggctcgcagtgcctgccgggagccacgtctccgaagaccgatagctgcttcgggattggcgtccgggcggctatctaggggctgctgggaagatggcggactcggtggctagccgatgaggaggccgcggggggaacccggcccccgggccccgagaccgactgagggagcgacctgcgcagggcccggggagtcatggtctccatcacccaactccatgcttcgagtcctgctctctgctcagacctcccctgctcggctgtctggcctgctgctgatccctccagtacagccctgctgtttggggcccagcaaatggggggaccggcctgttggaggaggccccagtgcaggtcctgtgcaaggactgcagcggcttctggaacaggcgaagagccctggggagctgctgcgctggctgggccagaaccccagcaaggtgcgcgcccaccactactcggtggcgcttcgtcgtctgggccagctcttggggtctcggccacggccccctcctgtggagcaggtcacactgcaggacttgagtcagctcatcatccgaaactgcccctcctttgacattcacaccatccacgtgtgtctgcaccttgcagtcttacttggctttccatctgatggtcccctggtgtgtgccctggaacaggagcgaaggctccgcctccctccgaagccacctccccctttgcagccccttctccgaggtgggcaagggttggaagctgctctaagctgcccccgttttctgcggtatccacggcagcatcccagcctctcatcaccgaccgtgcccgctgcaagtacagtcacaaggacatagtagctgaggggttgcgccagctgctgggggaggagaaataccgccaggacctgactgtgcctccaggctactgcacagacttcctgctgtgcgccagcagctctggtgctgtgcttcccgtgaggacccaggaccccttcctgccatacccaccaaggtcctgcccacagggccaggctgcctctagcgccactactcgagaccctgcccagagggtggtgctggtgttgcgggaacgctggcatttctgccgggacggccgggtgctgctgggctcgagggccctgagggagcggcacctaggcctgatgggctaccagctcctgccgctacccttcgaggaactggagtcccagagaggcctgccccagctcaagagctacctgaggcagaagctccaggccctgggcctgcgctgggggcctgaagggggctgaggggatgatgtggggttcaggatggcccccccatggggggtggatgatttgcactttggttccctgtgttttgatttctcattaaagttcctttccttccc

SEQ ID NO: 314628 - DNA, 2027 bp, Homo sapiens
tccctggctcgcagtgcctgccgggagccacgtctccgaagaccgatagctgcttcgggattggcgtccgggcggctatctaggggctgctgggaagatggcggactcggtggctagccgatgaggaggccgcggggggaacccggcccccgggccccgagaccgactgagggagcgacctgcgcagggcccggggagtcatgtaggggtggcgcctgcggggagggctgcgggagggcagcgggagctggtgttagcggcagcggccacggtctcctggcgtccctgggccggggtgggtgttggggcccccgacttcgccgactccgcgccatcgcaaagcggtgcactcgggctccacgcgcgccctgcgaggtgggcgctgcgttttcatttcacgggtgaggagacttagagagacgaagccacttgtccaaggtcacgccgctggtgagtgggagcgcccagcatggaacccagcaccgtccagccgcggagcccgcgttccaccctctgtgccgccgccgcctcctgtgggagagggaggtggtcgggagagtgcacgccggtgccgcctgggctccagactgggcgcgaccactaacccggttaatgacctcgggcttaacttaaccccttcgctgctctgggcctgcgtttctccaccggtgaaatgagggtctccatcacccaactccatgcttcgagtcctgctctctgctcagacctcccctgctcggctgtctggcctgctgctgatccctccagtacagccctgctgtttggggcccagcaaatggggggaccggcctgttggaggaggccccagtgcaggtcctgtgcaaggactgcagcggcttctggaacaggcgaagagccctggggagctgctgcgctggctgggccagaaccccagcaaggtgcgcgcccaccactactcggtggcgcttcgtcgtctgggccagctcttggggtctcggccacggccccctcctgtggagcaggtcacactgcaggacttgagtcagctcatcatccgaaactgcccctcctttgacattcacaccatccacgtgtgtctgcaccttgcagtcttacttggtggtacagaagttggtcctgccctttgggcgactgaactacctgcccctggaacagcagtttatgccctgccttgagaggatcctggctcgggaagcaggggtggcacccctggctacagtcaacatcttgatgtcactgtgccaactgcggtgcctgcccttcagagccctgcactttgttttttcccctggcttcatcaactacatcagtggcacccctcatgctctgattgtgcgtcgctacctctccctgctggacacggccgtggagctggagctcccaggataccggggtccccgccttccccgaaggcagcaagtgcccatctttccccagcctctcatcaccgaccgtgcccgctgcaagtacagtcacaaggacatagtagctgaggggttgcgccagctgctgggggaggagaaataccgccaggacctgactgtgcctccaggctactgcacagacttcctgctgtgcgccagcagctctggtgctgtgcttcccgtgaggacccaggaccccttcctgccatacccaccaaggtcctgcccacagggccaggctgcctctagcgccactactcgagaccctgcccagagggtggtgctggtgttgcgggaacgctggcatttctgccgggacggccgggtgctgctgggctcgagggccctgagggagcggcacctaggcctgatgggctaccagctcctgccgctacccttcgaggaactggagtcccagagaggcctgccccagctcaagagctacctgaggcagaagctccaggccctgggcctgcgctgggggcctgaagggggctgaggggatgatgtggggttcaggatggcccccccatggggggtggatgatttgcactttggttccctgtgttttgatttctcattaaagttcctttccttccc

SEQ ID NO: 314629 - DNA, 1399 bp, Homo sapiens
tccctggctcgcagtgcctgccgggagccacgtctccgaagaccgatagctgcttcgggattggcgtccgggcggctatctaggggctgctgggaagatggcggactcggtggctagccgatgaggaggccgcggggggaacccggcccccgggccccgagaccgactgagggagcgacctgcgcagggcccggggagtcatggtctccatcacccaactccatgcttcgagtcctgctctctgctcagacctcccctgctcggctgtctggcctgctgctgatccctccagtacagccctgctgtttggggcccagcaaatggggggaccggcctgttggaggaggccccagtgcaggtcctgtgcaaggactgcagcggcttctggaacaggcgaagagccctggggagctgctgcgctggctgggccagaaccccagcaaggtgcgcgcccaccactactcggtggcgcttcgtcgtctgggccagctcttggggtctcggccacggccccctcctgtggagcaggtcacactgcaggacttgagtcagctcatcatccgaaactgcccctcctttgacattcacaccatccacgtgtgtctgcaccttgcagtcttacttggctttccatctgatggtcccctggtgtgtgccctggaacaggagcgaaggctccgcctccctccgaagccacctccccctttgcagccccttctccgagaggcaaggccagaggaactgactccccacgtgatggtgctcctggcccagcacctggcccggcaccggttgcgggagccccagcccagcctctcatcaccgaccgtgcccgctgcaagtacagtcacaaggacatagtagctgaggggttgcgccagctgctgggggaggagaaataccgccaggacctgactgtgcctccaggctactgcacagacttcctgctgtgcgccagcagctctggtgctgtgcttcccgtgaggacccaggaccccttcctgccatacccaccaaggtcctgcccacagggccaggctgcctctagcgccactactcgagaccctgcccagagggtggtgctggtgttgcgggaacgctggcatttctgccgggacggccgggtgctgctgggctcgagggccctgagggagcggcacctaggcctgatgggctaccagctcctgccgctacccttcgaggaactggagtcccagagaggcctgccccagctcaagagctacctgaggcagaagctccaggccctgggcctgcgctgggggcctgaagggggctgaggggatgatgtggggttcaggatggcccccccatggggggtggatgatttgcactttggttccctgtgttttgatttctcattaaagttcctttccttccc

SEQ ID NO: 314630 - DNA, 2570 bp, Homo sapiens
tccctggctcgcagtgcctgccgggagccacgtctccgaagaccgatagctgcttcgggattggcgtccgggcggctatctaggggctgctgggaagatggcggactcggtggctagccgatgaggaggccgcggggggaacccggcccccgggccccgagaccgactgagggagcgacctgcgcagggcccggggagtcatgtaggggtggcgcctgcggggagggctgcgggagggcagcgggagctggtgttagcggcagcggccacggtctcctggcgtccctgggccggggtgggtgttggggcccccgacttcgccgactccgcgccatcgcaaagcggtgcactcgggctccacgcgcgccctgcgaggtgggcgctgcgttttcatttcacgggtgaggagacttagagagacgaagccacttgtccaaggtcacgccgctggtgagtgggagcgcccagcatggaacccagcaccgtccagccgcggagcccgcgttccaccctctgtgccgccgccgcctcctgtgggagagggaggtggtcgggagagtgcacgccggtgccgcctgggctccagactgggcgcgaccactaacccggttaatgacctcgggcttaacttaaccccttcgctgctctgggcctgcgtttctccaccggtgaaatgagggtctccatcacccaactccatgcttcgagtcctgctctctgctcagacctcccctgctcggctgtctggcctgctgctgatccctccagtacagccctgctgtttggggcccagcaaatggggggaccggcctgttggaggaggccccagtgcaggtcctgtgcaaggactgcagcggcttctggaacaggcgaagagccctggggagctgctgcgctggctgggccagaaccccagcaaggtgcgcgcccaccactactcggtggcgcttcgtcgtctgggccagctcttggggtctcggccacggccccctcctgtggagcaggtcacactgcaggacttgagtcagctcatcatccgaaactgcccctcctttgacattcacaccatccacgtgtgtctgcaccttgcagtcttacttggtggtacagaagttggtcctgccctttgggcgactgaactacctgcccctggaacagcagtttatgccctgccttgagaggatcctggctcgggaagcaggggtggcacccctggctacagtcaacatcttgatgtcactgtgccaactgcggtgcctgcccttcagagccctgcactttgttttttcccctggcttcatcaactacatcagtggtacgcagccaggatggctggctgggcccctgagggctggagaggcaggggagcagggtggcctgcagcccagagccccagtccccgcctccccacaggcacccctcatgctctgattgtgcgtcgctacctctccctgctggacacggccgtggagctggagctcccaggataccggggtccccgccttccccgaaggcagcaagtgcccatctttccccagcctctcatcaccgaccgtgcccgctgcaagtacaggtggatggggcagcctggggcaaggggaggggccagcctgggaccagcagagtggaaaagccagagggaccatgaagcgccaaagctaaggagctctcggccaccataaaactgggccctgaagcagcagagggctttgcccagggtggtggcactagactgggacagattaggatgaggtgccgggcccttcctgctactggtgtcctttctcctcagtcacaaggacatagtagctgaggggttgcgccagctgctgggggaggagaaataccgccaggacctgactgtgcctccaggctactgcacaggtgagcaaggggcaggcggcaggcccggggagacggagccctggctaaggccgccggccctgctcccctccagacttcctgctgtgcgccagcagctctggtgctgtgcttcccgtgaggacccaggaccccttcctgccatacccaccaaggtcctgcccacagggccaggctgcctctagcgccactactcgagaccctgcccagaggtaaaggaggcagggtgggggagccctggccaccttgcccgccatgccctgagccacgtccctccccctgcagggtggtgctggtgttgcgggaacgctggcatttctgccgggacggccgggtgctgctgggctcgagggccctgagggagcggcacctaggcctgatgggctaccagctcctgccggtgagtggccctggcctggcccgtggcgcatcctcactcccagcctgcgggtaacctgccgccctctcctctccccacagctacccttcgaggaactggagtcccagagaggcctgccccagctcaagagctacctgaggcagaagctccaggccctgggcctgcgctgggggcctgaagggggctgaggggatgatgtggggttcaggatggcccccccatggggggtggatgatttgcactttggttccctgtgttttgatttctcattaaagttcctttccttccc

SEQ ID NO: 314631 - DNA, 5952 bp, Homo sapiens
gactggctgcagccgcagtcttggtggaggaggtggtgaccaccaccgctcctccacctgcatccggctgcgggactgcggcggccgcgtttgccctgcagaccctgcaccccgggacgcggctcatctgtcattagcaccggcactaagctcccaccgctcagcgacttggtccgccgcaagctccgccgcaggctttgtccgctagcgctcggctgagtctgggcgggcgggaaacctgggctagggcgaggcggggcccctggacatgcctttctccacgtccgcctcctcgaccctattgtaagcggagaaacttagtgtgcgaggcaggcaggggacgtccccattttgatgtcccgtaccctccacccccttcggatcgaggtagtaaagaggctcctgtaggaaactgactgcctctatgattgcggcctcttgggggattttgcgtttagcccgaaagttggctttgccaaaagacgcacgggtaggaagggcgaaaaggaaaccctgtattccgtcgcgctgggctctccgagtccgtgcgcaaagcggcctacgagtcctggctccgcacctgcagaggacaagagccaatgcctaaaaaagaacagcggaggaaccggctggcgcggccagctggaacgctggatcgcagtgcgcccagggaaggccgggggcgcccgccggccctagccctcagtggtcctctcccacgccggcccgcgcgtgcctctgcctacaagacctggggcgtcctggccagatctggatggcaggtccctccgccacccccggcccggttccgggggcgtggcttggcgcgggggcgggtttaagtcaccgcgggtgtctgaccactctgacaggtctccaaatttctcccagtcgcctggcgcccgcggtgcgtttcagagctccagggtggcacgcggcggcgcttccctagatccagaggcgtctctgtcgacttccacgcggcctcgggcctcccttctcctccaaaccttcgcctcatccgccaagcttcggttctcagcctcagatatccgcaccggcggcttctcttcgttctcggagctcttggctttggagccctcaccactttttccttcccccgcctctcctgatcctcctagctccgagccaaatggactccaaagaacgaaataaaggggatgagaactgtgtgctgcgacccttcgaaagcacagctgaaagcgttgacctcgtcttatagatcaggctgggaccctggggcgagagtccccacaccccctccgggagggatgcttctggccagagccagcgctgcgctgtcagtccttgctcccgaactaggaaagagcctaggagggagcctcagcataccccttcctccaaattaactatttggtgaattgttagcgccgaggctaccacctctccaaccctgtcgcggggcgcgccgccacctcaccgtgaccccctcctcctccttctttgccaccgcccccagctccgcccctgctccccatcccggcgcaatggagttctccgaagggcgatgattccagccacatctgctaacttcgcacccatcgctgccgccggtcaccgccggccaggccccctgcagccgcggagcagtgggcgtccaaagcccagtgcagcagccaggacccgcccgacgcgcagcagaagcacggcgcccaggcgcttaggcgtctcttggagagcaaaggctgcgccaaaacgctgagcctagaatcaaccaaggagcctgagcccaggaaggggctgcgtggctcacagcgctgcggctcctgaggacaaatagccactgccgctgcgtacccaagctgcgccggctggcgggagagcagcacgcaaggacgccgaggtccgccgcgatcttccaggtgccctttgcccctgggcacagtatgacccgacctacagggagccctagcgcagggctcctgcaacgggtcagcctaggataaaaaggatccttgccaagctcctaccaggccgcctttgagtctttaggaacccctcctccggctgcctccccaaggttctgggcctccttccctgcggcccagagccatggagctctccgatgtgcgctgccttacaggcagcgaggaactctacaccatccacccgacgcccccggccggcgacggcaggagcgcctcccggccgcagcggctgctgtggcagacggcggtgcgacacatcacggagcagcgcttcattcacgggcaccggggaggcagcggcagcgggagtggaggctcgggcaaagcctcggaccctgcgggcggcggccccaaccaccacgcgccgcagctgtcaggcgactcggcgctgcccctctactcgctgggcccgggagagcgagcgcacagcacctgcggcaccaaagtcttcccggaacgcagcgggagcggcagtgccagcggcagcggaggcgggggcgacctgggcttcctgcaccttgactgtgcccctagcaactcggatttctttcttaatgggggctatagctaccgaggggtcattttccccaccctgcgcaactccttcaaatctcgggatttggaacgcctctaccagcgctatttcttgggccaaaggcgcaaatcggaagtggtgatgaacgtgctggacgtgctgaccaaactcactctcttggtcctacacttgagcctggcctcggcccccatggacccgctcaagggcatcctgctgggcttcttcaccggcattgaggtagtgatctgcgccctggtggtggtcaggaaggacaccacctcccacacgtacctgcagtacagcggcgtggtcacctgggtggccatgaccacccagatcctggcagcaggcctcggctacgggctcctgggcgacggcataggctacgtgctcttcacgctcttcgccacctacagtatgctgccgctgccgctcacctgggccatcctggccggcctgggcacctcgctgctgcaggtcatcctccaagtggtcataccccggctggcggtcatttccatcaaccaggttgtggcccaggcagtgctattcatgtgtatgaacacagctggaatcttcatcagttacctgtcagaccgggcccagcgccaagctttcctggagactcggaggtgtgtggaggccaggctgcgcctggagacagagaaccaaagacaggagcggctcgtgctttctgtgctcccccggtttgttgtcctggaaatgatcaacgacatgaccaatgtggaagatgagcacctgcagcaccagttccatcggatctacatccatcgctatgagaacgtcagtattctttttgcagatgttaaaggatttaccaacctctccacgaccttgtctgctcaggagctggtcaggatgctcaacgagctctttgccagatttgatcgactggcccatgagcatcactgccttcgtattaaaatcctgggggactgctactactgcgtgtctggacttcctgagccccgccaggaccatgcccactgctgtgttgaaatgggtctcagcatgatcaaaaccatcaggtatgtgcggtcaaggacaaaacacgatgttgacatgaggattggaatccactccggctcggtgctgtgcggtgttttgggactacggaagtggcagtttgatgtctggtcttgggatgtggatattgcaaacaaactcgaatctggaggaatccccgggaggattcacatttccaaagccacgctggactgtctcaacggtgactataacgtggaagagggccatggtaaagagaggaatgaattcctgaggaagcataatatcgaaacttacttaattaagcagcctgaggacagtctgctgtccttgcctgaagatatcgtcaaggagtcagtgagctcctcagaccggagaaacagtggggccacattcactgaaggatcctggagccctgaactgccctttgataatatcgtggggaaacagaatactctggctgccctaacaagaaattcaataaatctgcttccaaaccatcttgcacaagctttgcatgtccagtctgggcctgaggaaattaacaagagaatagaacataccatcgacttgcggagtggcgataaattgagaagagagcatatcaagccattctcactgatgtttaaagactccagcctggagcacaagtattctcaaatgagggatgaagtgttcaagtcaaacttggtctgtgcatttatcgttcttctatttatcacggcaatacaaagtttgcttccttcttcaagagtgatgccaatgaccatccagttctccattctgattatgctgcactcggctctggtcctcatcaccacagcagaggattataaatgtttgcccctcatcctccggaaaacttgctgttggattaatgagacctatttggcccggaacgtcatcatctttgcatccattttgattaatttcctgggtgccatcttaaatatcctgtggtgtgattttgacaagtcgatacccttgaagaacctgactttcaattcctcagctgtgtttacagatatctgctcctacccagagtactttgtcttcacgggggtgttggccatggtgacctgtgcagttttcctccggctgaactccgtcctgaagctggcagtgctgctgatcatgattgccatctatgccctgctcactgagaccgtctacgcaggcctctttctgcgttatgacaacctcaaccacagtggagaagatttcctggggaccaaggaggtatcactgctactgatggccatgttcctcctggctgtgttctaccatggacagcagctggagtacacagcccgcctggacttcctttggcgagtacaggccaaagaggagatcaatgagatgaaggagctgagggaacacaatgagaacatgctccggaatatcttacccagccatgtggcccgccatttcctagagaaggaccgagacaatgaggagctgtattctcaatcctatgatgctgttggggtgatgtttgcctccatcccaggatttgcggacttttactctcagactgaaatgaataaccagggagtggaatgcctgcgcttgctcaatgagatcattgctgacttcgatgagttgcttggtgaagaccgatttcaagacattgaaaagattaagaccattggcagcacctacatggccgtgtcaggcctgtcacctgaaaaacagcaatgtgaagacaagtggggacatttgtgtgctctggctgacttctcactcgccctgacagaaagcatacaggagatcaacaagcattcattcaacaattttgaactccggattggcatcagccacggctcagtggtagctggcgttatcggcgctaagaaaccacagtatgacatttggggcaaaactgtgaacctggcaagccgaatggacagcacgggggttagtggccggatccaagtcccagaggagacctatctcatcctgaaggaccagggctttgcctttgattaccgaggggagatctatgtgaagggtatcagtgaacaggaaggaaaaatcaaaacgtactttcttctgggaagagtccaacccaacccattcatcttgcccccaagaagactgcctgggcagtactccctggccgcggttgtcctgggacttgtccagtccctcaataggcaaaggcagaagcagctactcaatgagaacaacaacacaggaatcatcaagggtcattacaaccggcggactttgttgtcacccagcggcacagagcctggagcccaggctgaaggcaccgacaaatctgatttgccataaaagcattttctttctgtttttttttttttttgtatttcttttatatataaaataaatatactaataaaaaggtttaattttttttagaacaaaaaaaaaaaa

SEQ ID NO: 314632 - DNA, 2875 bp, Homo sapiens
ctggtgaaggggagacagataaggttgtggcccaggcagtgctattcatgtgtatgaacacagctggaatcttcatcagttacctgtcagaccgggcccagcgccaagctttcctggagactcggaggagcggctcgtgctttctgtgctcccccggtttgttgtcctggaaatgatcaacgacatgaccaatgtggaagatgagcacctgcagcaccagttccatcggatctacatccatcgctatgagaacgtcagtattctttttgcagatgttaaaggatttaccaacctctccacgaccttgtctgctcaggagctggtcaggatgctcaacgagctctttgccagatttgatcgactggcccatgagcatcactgccttcgtattaaaatcctgggggactgctactactgcgtgtctggacttcctgagccccgccaggaccatgcccactgctgtgttgaaatgggtctcagcatgatcaaaaccatcaggtatgtgcggtcaaggacaaaacacgatgttgacatgaggattggaatccactccggctcggtgctgtgcggtgttttgggactacggaagtggcagtttgatgtctggtcttgggatgtggatattgcaaacaaactcgaatctggaggaatccccgggaggattcacatttccaaagccacgctggactgtctcaacggtgactataacgtggaagagggccatggtaaagagaggaatgaattcctgaggaagcataatatcgaaacttacttaattaagcagcctgaggacagtctgctgtccttgcctgaagatatcgtcaaggagtcagtgagctcctcagaccggagaaacagtggggccacattcactgaaggatcctggagccctgaactgccctttgataatatcgtggggaaacagaatactctggctgccctaacaagaaattcaataaatctgcttccaaaccatcttgcacaagctttgcatgtccagtctgggcctgaggaaattaacaagagaatagaacataccatcgacttgcggagtggcgataaattgagaagagagcatatcaagccattctcactgatgtttaaagactccagcctggagcacaagtattctcaaatgagggatgaagtgttcaagtcaaacttggtctgtgcatttatcgttcttctatttatcacggcaatacaaagtttgcttccttcttcaagagtgatgccaatgaccatccagttctccattctgattatgctgcactcggctctggtcctcatcaccacagcagaggattataaatgtttgcccctcatcctccggaaaacttgctgttggattaatgagacctatttggcccggaacgtcatcatctttgcatccattttgattaatttcctgggtgccatcttaaatatcctgtggtgtgattttgacaagtcgatacccttgaagaacctgactttcaattcctcagctgtgtttacagatatctgctcctacccagagtactttgtcttcacgggggtgttggccatggtgacctgtgcagttttcctccggctgaactccgtcctgaagctggcagtgctgctgatcatgattgccatctatgccctgctcactgagaccgtctacgcaggcctctttctgcgttatgacaacctcaaccacagtggagaagatttcctggggaccaaggaggtatcactgctactgatggccatgttcctcctggctgtgttctaccatggacagcagctggagtacacagcccgcctggacttcctttggcgagtacaggccaaagaggagatcaatgagatgaaggagctgagggaacacaatgagaacatgctccggaatatcttacccagccatgtggcccgccatttcctagagaaggaccgagacaatgaggagctgtattctcaatcctatgatgctgttggggtgatgtttgcctccatcccaggatttgcggacttttactctcagactgaaatgaataaccagggagtggaatgcctgcgcttgctcaatgagatcattgctgacttcgatgagttgcttggtgaagaccgatttcaagacattgaaaagattaagaccattggcagcacctacatggccgtgtcaggcctgtcacctgaaaaacagcaatgtgaagacaagtggggacatttgtgtgctctggctgacttctcactcgccctgacagaaagcatacaggagatcaacaagcattcattcaacaattttgaactccggattggcatcagccacggctcagtggtagctggcgttatcggcgctaagaaaccacagtatgacatttggggcaaaactgtgaacctggcaagccgaatggacagcacgggggttagtggccggatccaagtcccagaggagacctatctcatcctgaaggaccagggctttgcctttgattaccgaggggagatctatgtgaagggtatcagtgaacaggaaggaaaaatcaaaacgtactttcttctgggaagagtccaacccaacccattcatcttgcccccaagaagactgcctgggcagtactccctggccgcggttgtcctgggacttgtccagtccctcaataggcaaaggcagaagcagctactcaatgagaacaacaacacaggaatcatcaagggtcattacaaccggcggactttgttgtcacccagcggcacagagcctggagcccaggctgaaggcaccgacaaatctgatttgccataaaagcattttctttctgtttttttttttttttgtatttcttttatatataaaataaatatactaataaaaaggtttaattttttttagaacaaaaaaaaaaaa

SEQ ID NO: 314633 - DNA, 2300 bp, Homo sapiens
ctggtgaaggggagacagataaggttgtggcccaggcagtgctattcatgtgtatgaacacagctggaatcttcatcagttacctgtcagaccgggcccagcgccaagctttcctggagactcggaggagcggctcgtgctttctgtgctcccccggtttgttgtcctggaaatgatcaacgacatgaccaatgtggaagatgagcacctgcagcaccagttccatcggatctacatccatcgctatgagaacgtcagtattctttttgcagatgttaaaggatttaccaacctctccacgaccttgtctgctcaggagctggtcaggatgctcaacgagctctttgccagatttgatcgactggcccatgagcatcactgccttcgtattaaaatcctgggggactgctactactgcgtgtctggacttcctgagccccgccaggaccatgcccactgctgtgttgaaatgggtctcagcatgatcaaaaccatcaggtatgtgcggtcaaggacaaaacacgatgttgacatgaggattggaatccactccggctcggtgctgtgcggtgttttgggactacggaagtggcagtttgatgtctggtcttgggatgtggatattgcaaacaaactcgaatctggaggaatccccgggaggattcacatttccaaagccacgctggactgtctcaacggtgactataacgtggaagagggccatggtaaagagaggaatgaattcctgaggaagcataatatcgaaacttacttaattaagcagcctgaggacagtctgctgtccttgcctgaagatatcgtcaaggagtcagtgagctcctcagaccggagaaacagtggggccacattcactgaaggatcctggagccctgaactgccctttgataatatcgtggggaaacagaatactctggctgccctaacaagaaattcaataaatctgcttccaaaccatcttgcacaagctttgcatgtccagtctgggcctgaggaaattaacaagagaatagaacataccatcgacttgcggagtggcgataaattgagaagagagcatatcaagccattctcactgatgtttaaagactccagcctggagcacaagtattctcaaatgagggatgaagtgttcaagtcaaacttggtctgtgcatttatcgttcttctatttatcacggcaatacaaagtttgcttccttcttcaagagtgatgccaatgaccatccagttctccattctgattatgctgcactcggctctggtcctcatcaccacagcagaggattataaatgtttgcccctcatcctccggaaaacttgctgttggattaatgagacctatttggcccggaacgtcatcatctttgcatccattttgattaatttcctgggtgccatcttaaatatcctgtggtgtgattttgacaagtcgatacccttgaagaacctgactttcaattcctcagctgtgtttacagatatctgctcctacccagagtactttgtcttcacgggggtgttggccatggtgacctgtgcagttttcctccggctgaactccgtcctgaagctggcagtgctgctgatcatgattgccatctatgccctgctcactgagaccgtctacgcaggcctctttctgcgttatgacaacctcaaccacagtggagaagatttcctggggaccaaggaggtatcactgctactgatggccatgttcctcctggctgtgttctaccatggacagcagctggagtacacagcccgcctggacttcctttggcgagtacaggccaaagaggagatcaatgagatgaaggagctgagggaacacaatgagaacatgctccggaatatcttacccagccatgtggcccgccatttcctagagaaggaccgagacaatgaggagctgtattctcaatcctatgatgctgttggggtgatgtttgcctccatcccaggatttgcggacttttactctcagatactccctggccgcggttgtcctgggacttgtccagtccctcaataggcaaaggcagaagcagctactcaatgagaacaacaacacaggaatcatcaagggtcattacaaccggcggactttgttgtcacccagcggcacagagcctggagcccaggctgaaggcaccgacaaatctgatttgccataaaagcattttctttctgtttttttttttttttgtatttcttttatatataaaataaatatactaataaaaaggtttaattttttttagaacaaaaaaaaaaaa

SEQ ID NO: 314634 - DNA, 3157 bp, Homo sapiens
gactggctgcagccgcagtcttggtggaggaggtggtgaccaccaccgctcctccacctgcatccggctgcgggactgcggcggccgcgtttgccctgcagaccctgcaccccgggacgcggctcatctgtcattagcaccggcactaagctcccaccgctcagcgacttggtccgccgcaagctccgccgcaggctttgtccgctagcgctcggctgagtctgggcgggcgggaaacctgggctagggcgaggcggggcccctggacatgcctttctccacgtccgcctcctcgaccctattgtaagcggagaaacttagtgtgcgaggcaggcaggggacgtccccattttgatgtcccgtaccctccacccccttcggatcgaggtagtaaagaggctcctgtaggaaactgactgcctctatgattgcggcctcttgggggattttgcgtttagcccgaaagttggctttgccaaaagacgcacgggtaggaagggcgaaaaggaaaccctgtattccgtcgcgctgggctctccgagtccgtgcgcaaagcggcctacgagtcctggctccgcacctgcagaggacaagagccaatgcctaaaaaagaacagcggaggaaccggctggcgcggccagctggaacgctggatcgcagtgcgcccagggaaggccgggggcgcccgccggccctagccctcagtggtcctctcccacgccggcccgcgcgtgcctctgcctacaagacctggggcgtcctggccagatctggatggcaggtccctccgccacccccggcccggttccgggggcgtggcttggcgcgggggcgggtttaagtcaccgcgggtgtctgaccactctgacaggtctccaaatttctcccagtcgcctggcgcccgcggtgcgtttcagagctccagggtggcacgcggcggcgcttccctagatccagaggcgtctctgtcgacttccacgcggcctcgggcctcccttctcctccaaaccttcgcctcatccgccaagcttcggttctcagcctcagatatccgcaccggcggcttctcttcgttctcggagctcttggctttggagccctcaccactttttccttcccccgcctctcctgatcctcctagctccgagccaaatggactccaaagaacgaaataaaggggatgagaactgtgtgctgcgacccttcgaaagcacagctgaaagcgttgacctcgtcttatagatcaggctgggaccctggggcgagagtccccacaccccctccgggagggatgcttctggccagagccagcgctgcgctgtcagtccttgctcccgaactaggaaagagcctaggagggagcctcagcataccccttcctccaaattaactatttggtgaattgttagcgccgaggctaccacctctccaaccctgtcgcggggcgcgccgccacctcaccgtgaccccctcctcctccttctttgccaccgcccccagctccgcccctgctccccatcccggcgcaatggagttctccgaagggcgatgattccagccacatctgctaacttcgcacccatcgctgccgccggtcaccgccggccaggccccctgcagccgcggagcagtgggcgtccaaagcccagtgcagcagccaggacccgcccgacgcgcagcagaagcacggcgcccaggcgcttaggcgtctcttggagagcaaaggctgcgccaaaacgctgagcctagaatcaaccaaggagcctgagcccaggaaggggctgcgtggctcacagcgctgcggctcctgaggacaaatagccactgccgctgcgtacccaagctgcgccggctggcgggagagcagcacgcaaggacgccgaggtccgccgcgatcttccaggtgccctttgcccctgggcacagtatgacccgacctacagggagccctagcgcagggctcctgcaacgggtcagcctaggataaaaaggatccttgccaagctcctaccaggccgcctttgagtctttaggaacccctcctccggctgcctccccaaggttctgggcctccttccctgcggcccagagccatggagctctccgatgtgcgctgccttacaggcagcgaggaactctacaccatccacccgacgcccccggccggcgacggcaggagcgcctcccggccgcagcggctgctgtggcagacggcggtgcgacacatcacggagcagcgcttcattcacgggcaccggggaggcagcggcagcgggagtggaggctcgggcaaagcctcggaccctgcgggcggcggccccaaccaccacgcgccgcagctgtcaggcgactcggcgctgcccctctactcgctgggcccgggagagcgagcgcacagcacctgcggcaccaaagtcttcccggaacgcagcgggagcggcagtgccagcggcagcggaggcgggggcgacctgggcttcctgcaccttgactgtgcccctagcaactcggatttctttcttaatgggggctatagctaccgaggggtcattttccccaccctgcgcaactccttcaaatctcgggatttggaacgcctctaccagcgctatttcttgggccaaaggcgcaaatcggaagtggtgatgaacgtgctggacgtgctgaccaaactcactctcttggtcctacacttgagcctggcctcggcccccatggacccgctcaagggcatcctgctgggcttcttcaccggcattgaggtagtgatctgcgccctggtggtggtcaggaaggacaccacctcccacacgtacctgcagtacagcggcgtggtcacctgggtggccatgaccacccagatcctggcagcaggcctcggctacgggctcctgggcgacggcataggctacgtgctcttcacgctcttcgccacctacagtatgctgccgctgccgctcacctgggccatcctggccggcctgggcacctcgctgctgcaggtcatcctccaagtggtcataccccggctggcggtcatttccatcaaccaggtaactcctgcctgccttgcatttgtttcccctctaacttccccgggttattgatcatatagcttccagagagccagggttgcctcactctctttaagtctcc

SEQ ID NO: 314635 - DNA, 2606 bp, Homo sapiens
ctggtgaaggggagacagataaggttgtggcccaggcagtgctattcatgtgtatgaacacagctggaatcttcatcagttacctgtcagaccgggcccagcgccaagctttcctggagactcggaggagcggctcgtgctttctgtgctcccccggtttgttgtcctggaaatgatcaacgacatgaccaatgtggaagatgagcacctgcagcaccagttccatcggatctacatccatcgctatgagaacgtcagtattctttttgcagatgttaaaggatttaccaacctctccacgaccttgtctgctcaggagctggtcaggatgctcaacgagctctttgccagatttgatcgactggcccatgagcatcactgccttcgtattaaaatcctgggggactgctactactgcgtgtctggacttcctgagccccgccaggaccatgcccactgctgtgttgaaatgggtctcagcatgatcaaaaccatcaggtatgtgcggtcaaggacaaaacacgatgttgacatgaggattggaatccactccggctcggtgctgtgcggtgttttgggactacggaagtggcagtttgatgtctggtcttgggatgtggatattgcaaacaaactcgaatctggaggaatccccgggaggattcacatttccaaagccacgctggactgtctcaacggtgactataacgtggaagagggccatggtaaagagaggaatgaattcctgaggaagcataatatcgaaacttacttaattaagcagcctgaggacagtctgctgtccttgcctgaagatatcgtcaaggagtcagtgagctcctcagaccggagaaacagtggggccacattcactgaaggatcctggagccctgaactgccctttgataatatcgtggggaaacagaatactctggctgccctaacaagaaattcaataaatctgcttccaaaccatcttgcacaagctttgcatgtccagtctgggcctgaggaaattaacaagagaatagaacataccatcgacttgcggagtggcgataaattgagaagagagcatatcaagccattctcactgatgtttaaagactccagcctggagcacaagtattctcaaatgagggatgaagtgttcaagtcaaacttggtctgtgcatttatcgttcttctatttatcacggcaatacaaagtttgcttccttcttcaagagtgatgccaatgaccatccagttctccattctgattatgctgcactcggctctggtcctcatcaccacagcagaggattataaatgtttgcccctcatcctccggaaaacttgctgttggattaatgagacctatttggcccggaacgtcatcatctttgcatccattttgattaatttcctgggtgccatcttaaatatcctgtggtgtgattttgacaagtcgatacccttgaagaacctgactttcaattcctcagctgtgtttacagatatctgctcctacccagagtactttgtcttcacgggggtgttggccatggtgacctgtgcagttttcctccggctgaactccgtcctgaagctggcagtgctgctgatcatgattgccatctatgccctgctcactgagaccgtctacgcaggcctctttctgcgttatgacaacctcaaccacagtggagaagatttcctggggaccaaggaggtatcactgctactgatggccatgttcctcctggctgtgttctaccatggacagcagctggagtacacagcccgcctggacttcctttggcgagtacaggccaaagaggagatcaatgagatgaaggagctgagggaacacaatgagaacatgctccggaatatcttacccagccatgtggcccgccatttcctagagaaggaccgagacaatgaggagctgtattctcaatcctatgatgctgacagaaagcatacaggagatcaacaagcattcattcaacaattttgaactccggattggcatcagccacggctcagtggtagctggcgttatcggcgctaagaaaccacagtatgacatttggggcaaaactgtgaacctggcaagccgaatggacagcacgggggttagtggccggatccaagtcccagaggagacctatctcatcctgaaggaccagggctttgcctttgattaccgaggggagatctatgtgaagggtatcagtgaacaggaaggaaaaatcaaaacgtactttcttctgggaagagtccaacccaacccattcatcttgcccccaagaagactgcctgggcagtactccctggccgcggttgtcctgggacttgtccagtccctcaataggcaaaggcagaagcagctactcaatgagaacaacaacacaggaatcatcaagggtcattacaaccggcggactttgttgtcacccagcggcacagagcctggagcccaggctgaaggcaccgacaaatctgatttgccataaaagcattttctttctgtttttttttttttttgtatttcttttatatataaaataaatatactaataaaaaggtttaattttttttagaacaaaaaaaaaaaa

SEQ ID NO: 314636 - DNA, 662 bp, Homo sapiens
agatcttacggaagcattaaccctaccggagatattaatgcattcattcaacaattttgaactccgtgattggcatcagccacggctcagtggtagctggcgttatcggcgctaagaaaccacagtatgacatttggggcaaaactgtgaacctggcaagccgaatggacagcacgggggttagtggccggatccaagtcccagaggagacctatctcatcctgaaggaccagggctttgcctttgattaccgaggggagatctatgtgaagggtatcagtgaacaggaaggaaaaatcaaaacgtactttcttctgggaagagtccaacccaacccattcatcttgcccccaagaagactgcctgggcagtactccctggccgcggttgtcctgggacttgtccagtccctcaataggcaaaggcagaagcagctactcaatgagaacaacaacacaggaatcatcaagggtcattacaaccggcggactttgttgtcacccagcggcacagagcctggagcccaggctgaaggcaccgacaaatctgatttgccataaaagcattttctttctgtttttttttttttttgtatttcttttatatataaaataaatatactaataaaaaggtttaattttttttagaacaaaaaaaaaaaa

SEQ ID NO: 314637 - DNA, 2028 bp, Homo sapiens
  misc_feature (392)..(392): n is a, c, g, or t
  misc_feature (1793)..(1793): n is a, c, g, or t
attatatttgtcatcacttgtttgatagtatcatctttaatgtactctgtctttaatttcttcattatagaatagcacatgtggatatcattttctttccagattgggagcagtgcatgaaaatggtattcctgaattcccttggttggttcttgttcagactctgtatatctttggtccctacagagatcgattggcaaaatgctttctgtgtttagatcatgttaatttactatatattggctttgcttttatgttgacctttatcttgtaagttactttttctttatcctaacagatggctttgtagagttacaggcaaggttcctgcctataattccatttccctcctctcttctctgcatctgtttagttctatatccttttctctnttctttctccttttctttttttttctccctccatttcctctccctccctccttccttttttcccttcctccctccccccttccttccttcttttttattttaattttagcttagttcattaattctatttttaggtcggatgatgagcagagctctgcggataaagagagacttgccaggtaggagaacagtgtcttttagcatgatgaagcagatgatgctgctttttctatcctttttcttactctttcttttcttcccctttctctttgtatttttccttatctgtggcaagagaggacaagattttttagaagtttgagtgtaacaggaactttggcttcccccatcagaaagtgggtgagttgagggaactttgcttagggatttaagaaattgctattagttttaagtttttttttctttttctctttatgtcagtactaagtttcacagaacaaaaagctcttagaaggaatgcaaccgtgccagttggtgctttaacagggaaatactctttttatcagaaaaccaataaatatatctgtatttgtgattagttcccagtatttaggcctcagcatttactccacacctctaggaaactcacacctattttcctatgaagactcacagcctagattattctcacaacagaactagtgttgctttggtgaccgaatcctttcttgcggtagttttctagaaaagttttagtttccttgatgtggctatttaaaagaccaggtttctgtacttacgtgtcagaaatctgtcagatactaggaagatgagtgctttatgtttgagaatagaattttatgtcttaggcaaagtgtaactaaatatgggcctatgtggtgagaccctttttgccatttagaaaggagactctagaattctcttgggagactgttgtttgtaatgtagaaatgctgcagaagaaatatgcatagacttttctgttttctagtatctgtgatttgggggtgacttaggaaatagatcattgatgccaatacccatttttactatattcccccttttttctactatttcctctttaatctgggtcacaaactcattttgctgccagtttaactcgagcttcttactaaccctttcactgttcagaaaatggatttggcatgatgtggtggagaaaacattgtattgggaagagagcagcctggggaaagtcacttacctacttgacctccctttgctcttctcagaaaaaagagatttatgttagatttttaattttcttactttcttttttttttggacaaagaacttttgttcaagtagaattcttaagtggtaacagaaataaataaaagagataaagcaggccgggcgcagtggctcatgcttgtaaccctagcactttgggaggcngaggcaggcagatcacgaggtcaagagatggagaatatcctggccaacttggtgaaaccgcgtctctactaaaaataaaaaaaaaaaaaactgggcgtggtggtgtgcgcctgtagtcccagctacctgggaggctgagatagcagaattgcttgaacccagaaggcggaggttgcagtgagccgagatcccgccactgtactccagcctgggtgacagagcaagactccatctc

SEQ ID NO: 314638 - DNA, 4869 bp, Homo sapiens
aggggctgggatgctgggggctgctgaagccgccatcttggattccgcggtagcggaggcggcggtcaggcgccgcttctggggagtggcctttcttttcccctccctcccggttcggtggcggcggctcctcccactggggggggggtggcgcggcggcggtggcatctgcggccatggcggcgactactgccaaccccgaaatgacatcagatgtaccatcactgggtccagccattgcctctggaaactctggacctggaattcaaggtggaggagccattgtccagagggctattaagcggcgaccagggctggattttgatgatgatggagaagggaacagtaaatttttgaggtgtgatgatgatcagatgtctaacgataaggagcggtttgccaggtcggatgatgagcagagctctgcggataaagagagacttgccagggaaaatcacagtgaaattgaacggcggcgacggaacaagatgacagcctacatcacagaactgtcagatatggtacccacctgtagtgccctggctcgaaaaccagacaagctaaccatcttacgcatggcagtttctcacatgaagtccttgcggggaactggcaacacatccactgatggctcctataagccgtctttcctcactgatcaggaactgaaacatttgatcttggaggcagcagatggctttctgtttattgtctcatgtgagacaggcagggtggtgtatgtgtctgactccgtgactcctgttttgaaccagccacagtctgaatggtttggcagcacactctatgatcaggtgcacccagatgatgtggataaacttcgtgagcagctttccacttcagaaaatgccctgacagggcgtatcctggatctaaagactggaacagtgaaaaaggaaggtcagcagtcttccatgagaatgtgtatgggctcaaggagatcgtttatttgccgaatgaggtgtggcagtagctctgtggacccagtttctgtgaataggctgagctttgtgaggaacagatgcaggaatggacttggctctgtaaaggatggggaacctcacttcgtggtggtccactgcacaggctacatcaaggcctggcccccagcaggtgtttccctcccagatgatgacccagaggctggccagggaagcaagttttgcctagtggccattggcagattgcaggtaactagttctcccaactgtacagacatgagtaatgtttgtcaaccaacagagttcatctcccgacacaacattgagggtatcttcacttttgtggatcaccgctgtgtggctactgttggctaccagccacaggaactcttaggaaagaatattgtagaattctgtcatcctgaagaccagcagcttctaagagacagcttccaacaggtagtgaaattaaaaggccaagtgctgtctgtcatgttccggttccggtctaagaaccaagaatggctctggatgagaaccagctcctttactttccagaacccttactcagatgaaattgagtacatcatctgtaccaacaccaatgtgaagaactctagccaagaaccacggcctacactctccaacacaatccagaggccacaactaggtcccacagctaatttacccctggagatgggctcaggacagctggcacccaggcagcagcaacagcaaacagaattggacatggtaccaggaagagatggactggccagctacaatcattcccaggtggttcagcctgtgacaaccacaggaccagaacacagcaagccccttgagaagtcagatggtttatttgcccaggatagagatccaagattttcagaaatctatcacaacatcaatgcggatcagagtaaaggcatctcctccagcactgtccctgccacccaacagctattctcccagggcaacacattccctcctaccccccggccggcagagaatttcaggaatagtggcctagcccctcctgtaaccattgtccagccatcagcttctgcaggacagatgttggcccagatttcccgccactccaaccccacccaaggagcaaccccaacttggacccctactacccgctcaggcttttctgcccagcaggtggctacccaggctactgctaagactcgtacttcccagtttggtgtgggcagctttcagactccatcctccttcagctccatgtccctccctggtgccccaactgcatcgcctggtgctgctgcctaccctagtctcaccaatcgtggatctaactttgctcctgagactggacagactgcaggacaattccagacacggacagcagagggtgtgggtgtctggccacagtggcagggccagcagcctcatcatcgttcaagttctagtgagcaacatgttcaacaaccgccagcacagcaacctggccagcctgaggtcttccaggagatgctgtccatgctgggagatcagagcaacagctacaacaatgaagaattccctgatctaactatgtttccccccttttcagaatagaactattggggtgaggataaggggtgggggagaaaaaatcactgtttgtttttaaaaagcaaatctttctgtaaacagaataaaagttcctctcccttcccttccctcacccctgacatgtaccccctttcccttctggctgttcccctgctctgttgcctctctaaggtaacatttatagaagaaatggaatgaatctccaaggcttttaggactgtctgaaaatttgaggctgggtgaagttaaaacacctttccttatgtctcctgacctgaaattgtatagtgttgatttgtgctgagatcaagaggcaggttagaagaacctgacatccactgtttgccttggatagtatggcttgtttttggaaagaaattctgaagagagtggaggagaggagaaatgtcctcatatttgaggaccatgaaacattgtaggtatatatggggctttagcaagtttgagcataggctctttttgctgcctgtgagcagtccctctggaaagaaacatgtgagtaagtgagagagagtgtgtgtgtatgtgtgtgtgtgtgtgtgtgtgtgcgcacacatgcttctgtatttcactctttctccctattagggagttatgcaaaatttgtccccgattttacctttgtctttctgtgtacttttcaaagagtcctaaggagttaaatcttccaggtattttccacttagtattgcagccaaagaatatttaaataaacgtctttgctgcgcttgcatccatgcccagccaatatacaactgtaaagcaaatatagaaagtcggctgttgatacgattgtctgttatcgaacacattcagtgataaagctgggttactgctgcttttggtgctctcaccttatctggaagatctgcaaacattacctaaataggctggcaagataaacactttctggaacccgagacttggccataaagataatgctgcatttttctgtcagaatcacatatgatgtgtgttctgtagaggttatttctgcatggaaactcaacttcttggattagccgtcccagtgaaaatcctcattgttggagtgtaaaccaaatacgaagccctcttgcaaagtagcctctttcatcccatactcaaaatacccagtttagcaagcaactgagatttaagtctctctggccctaagaggtttttcctctttgctccctccaatcttgagattgggttttgctttagagtgcaagtatcataattccgtatgatagatggggcctggacacccatctcaacagggtcacttggtaattaacaatagccatataaatgcggatacaggttactaccctcaccctttaccttcctcaggtaacagtcgtagataccagcttttttttttttttttttaaattggctttggccagtagctaaagtgcaagactgaattaatgagaagatatattaaatgtagtcataggggactgaggagcaagggtggccttgaagaggccaaaggaatgtccatttgctgagtttcccttccttatgtctccagtctggtgccaggtagtggagtaaaaaaggagacagtttatttttttattctatgtgcacacttacagtatacatatatatttatatcacaatttacgaaaccaaaaagttgagtttccaatggaacccttgttttttaataatcgactttttaaatgtgatcaggactataatattgtacagttattatagggcttttggggaaggggaggatagcgagaagatgctctgggggttttgtttttgcttttccttcagggttttatttttgactgttttgttttcttgttggccatttctgtattgctggcatctgtgctaagctttacagtggcaaaaataatgacatgtagcaaagattttcaaacaaaatattttttccttttgtaaaatttcttgtgttgtgtgatcttgattgcggctttatcattcctttccagttcataaacaacaggcacccacaaccagaggaatctatagtttaagctccagacatacaaacataaggcacattgtgtctttaatttcaggaatcagaaatcatagggttctgatcacattgcacgcctcccccctcacttgtcctcctgatcctgacacattctgagtaacatcagcaggaatgctctgaccatgaggtgggggttttggggtgggcgttgcctgggttcttgggagagaggggaagagtcgggacttgaaaaccactagggcacatctggatgccttcccccagtatgtccttttctggattaaaatgagtgaaatttaaactgttcaagtc

SEQ ID NO: 314639 - DNA, 4783 bp, Homo sapiens
aggggctgggatgctgggggctgctgaagccgccatcttggattccgcggtagcggaggcggcggtcaggcgccgcttctggggagtggcctttcttttcccctccctcccggttcggtggcggcggctcctcccactggggggggggtggcgcggcggcggtggcatctgcggccatggcggcgactactgccaaccccgaaatgacatcagatgtaccatcactgggtccagccattgcctctggaaactctggacctggaattcaaggtggaggagccattgtccagagggctattaagcggcgaccagggctggattttgatgatgatggagaagggaacagtaaatttttgaggtgtgatgatgatcagatgtctaacgataaggagcggtttgccaggtcggatgatgagcagagctctgcggataaagagagacttgccagggaaaatcacagtgaaattgaacggcggcgacggaacaagatgacagcctacatcacagaactgtcagatatggtacccacctgtagtgccctggctcgaaaaccagacaagctaaccatcttacgcatggcagtttctcacatgaagtccttgcggggaactggcaacacatccactgatggctcctataagccgtctttcctcactgatcaggaactgaaacatttgatcttggaggcagcagatggctttctgtttattgtctcatgtgagacaggcagggtggtgtatgtgtctgactccgtgactcctgttttgaaccagccacagtctgaatggtttggcagcacactctatgatcaggtgcacccagatgatgtggataaacttcgtgagcagctttccacttcagaaaatgccctgacagggcgtatcctggatctaaagactggaacagtgaaaaaggaaggtcagcagtcttccatgagaatgtgtatgggctcaaggagatcgtttatttgccgaatgaggtgtggcagtagctctgtggacccagtttctgtgaataggctgagctttgtgaggaacagatgcaggaatggacttggctctgtaaaggatggggaacctcacttcgtggtggtccactgcacaggctacatcaaggcctggcccccagcaggtgtttccctcccagatgatgacccagaggctggccagggaagcaagttttgcctagtggccattggcagattgcaggtaactagttctcccaactgtacagacatgagtaatgtttgtcaaccaacagagttcatctcccgacacaacattgagggtatcttcacttttgtggatcaccgctgtgtggctactgttggctaccagccacaggaactcttaggaaagaatattgtagaattctgtcatcctgaagaccagcagcttctaagagacagcttccaacaggtagtgaaattaaaaggccaagtgctgtctgtcatgttccggttccggtctaagaaccaagaatggctctggatgagaaccagctcctttactttccagaacccttactcagatgaaattgagtacatcatctgtaccaacaccaatgtgaagaactctagccaagaaccacggcctacactctccaacacaatccagaggccacaactaggtcccacagctaatttacccctggagatgggctcaggacagctggcacccaggcagcagcaacagcaaacagaattggacatggtaccaggaagagatggactggccagctacaatcattcccaggtggttcagcctgtgacaaccacaggaccagaacacagcaagccccttgagaagtcagatggtttatttgcccaggatagagatccaagattttcagaaatctatcacaacatcaatgcggatcagagtaaaggcatctcctccagcactgtccctgccacccaacagctattctcccagggcaacacattccctcctaccccccggccggcagagaatttcaggaatagtggcctagcccctcctgtaaccattgtccagccatcagcttctgcaggacagatgttggcccagatttcccgccactccaaccccacccaaggagcaaccccaacttggacccctactacccgctcaggcttttctgcccagcaggtggctacccaggctactgctaagactcgtacttcccagtttggtgtgggcagctttcagactccatcctccttcagctccatgtccctccctggtgccccaactgcatcgcctggtgctgctgcctaccctagtctcaccaatcgtggatctaactttgctcctgagactggacagactgcaggacaattccagacacggacagcagagggtgtgggtgtctggccacagtggcagggccagcagcctcatcatcgttcaagttctagtgagcaacatgttcaacaaccgccagcacagcaacctggccagcctgaggtcttccaggagatgctgtccatgctgggagatcagagcaacagctacaacaatgaagaattccctgatctaactatgtttccccccttttcagaatagaactattggggtgaggataaggggtgggggagaaaaaatcactgtttgtttttaaaaagcaaatctttctgtaaacagaataaaagttcctctcccttcccttccctcacccctgacatgtaccccctttcccttctggctgttcccctgctctgttgcctctctaaggtaacatttatagaagaaatggaatgaatctccaaggcttttaggactgtctgaaaatttgaggctgggtgaagttaaaacacctttccttatgtctcctgacctgaaattgtatagtgttgatttgtgctgagatcaagaggcaggttagaagaacctgacatccactgtttgccttggatagtatggcttgtttttggaaagaaattctgaagagagtggaggagaggagaaatgtcctcatatttgaggaccatgaaacattgtaggtatatatggggctttagcaagtttgagcataggctctttttgctgcctgtgagcagtccctctggaaagaaacatgtgagtaagtgagagagagtgtgtgtgtatgtgtgtgtgtgtgtgtgtgtgtgcgcacacatgcttctgtatttcactctttctccctattagggagttatgcaaaatttgtccccgattttacctttgtctttctgtgtacttttcaaagagtcctaaggagttaaatcttccaggtattttccacttagtattgcagccaaagaatatttaaataaacgtctttgctgcgcttgcatccatgcccagccaatatacaactgtaaagcaaatatagaaagtcggctgttgatacgattgtctgttatcgaacacattcagtgataaagctgggttactgctgcttttggtgctctcaccttatctggaagatctgcaaacattacctaaataggctggcaagataaacactttctggaacccgagacttggccataaagataatgctgcatttttctgtcagaatcacatatgatgtgtgttctgtagaggttatttctgcatggaaactcaacttcttggattagccgtcccagtgaaaatcctcattgttggagtgtaaaccaaatacgaagccctcttgcaaagtagcctctttcatcccatactcaaaatacccagtttagcaagcaactgagatttaagtctctctggccctaagaggtttttcctctttgctccctccaatcttgagattgggttttgctttagagtgcaagtatcataattccgtatgatagatggggcctggacacccatctcaacagggtcacttggtaattaacaatagccatataaatgcggatacaggttactaccctcaccctttaccttcctcaggtaacagtcgtagataccagcttttttttttttttttttaaattggctttggccagtagctaaagtgcaagactgaattaatgagaagatatattaaatgtagtcataggggactgaggagcaagggtggccttgaagaggccaaaggaatgtccatttgctgagtttcccttccttatgtctccagtctggtgccaggtagtggagtaaaaaaggagacagtttatttttttattctatgtgcacacttacagtatacatatatatttatatcacaatttacgaaaccaaaaagttgagtttccaatggaacccttgttttttaataatcgactttttaaatgtgatcaggactataatattgtacagttattatagggcttttggggaaggggaggatagcgagaagatgctctgggggttttgtttttgcttttccttcagggttttatttttgactgttttgttttcttgttggccatttctgtattgctggcatctgtgctaagctttacagtggcaaaaataatgacatgtagcaaagattttcaaacaaaatattttttccttttgtaaaaaaaaaaaaaaaaaaaaaaacaaaaaaaaaaaaaaaaaagggggggggggccaaaagaaacccagagggggccaaagtacagggacaccgttgcgtgtgacacagggggcccaataagaggcccccaatttaacgtcaacatgcccgcccgtatcacacacgctgtaagctggacaaccgctcaacggggggaaaatttgagaaaagacccctatatacgggcggggcacaacctatggggaacatcccctaagaacttttataacccgagcgaaacaataacatttcaagcgttaagatgggtacg

SEQ ID NO: 314640 - DNA, 4942 bp, Homo sapiens
tccacctcccagattcaagtgattctcctgtctcagcctcccaagtagctgggattacagatgcatgccactgtgccctgctaatttttgtatttttagtagagacaggatttcaccatgttggccaggccggtctcaaactcctggcctcaagtaatccacctgcctccatctcccaaagtgctgggattacaggcatgagccaccatgcctgacctgtcgtttcttaaaacagcttttgttctgagggagtggtaatttacaaaggatgtgaagtttccaggaaatagggggaagggaattacattatcttcttgttctctgtctgccttattagttctgtttcatgcttgctttgcatgagaaggttggcaaaccttattttaactgctgagacttaagcatcactaaatctgaataccacattcttcagcagcacacttggtatccatatcactctccctgctaccaaatgaccagatgtgaccacctggatggggcttctctttctttccatgcagggaaaatcacagtgaaattgaacggcggcgacggaacaagatgacagcctacatcacagaactgtcagatatggtacccacctgtagtgccctggctcgaaaaccagacaagctaaccatcttacgcatggcagtttctcacatgaagtccttgcggggaactggcaacacatccactgatggctcctataagccgtctttcctcactgatcaggaactgaaacatttgatcttggaggcagcagatggctttctgtttattgtctcatgtgagacaggcagggtggtgtatgtgtctgactccgtgactcctgttttgaaccagccacagtctgaatggtttggcagcacactctatgatcaggtgcacccagatgatgtggataaacttcgtgagcagctttccacttcagaaaatgccctgacagggcgtatcctggatctaaagactggaacagtgaaaaaggaaggtcagcagtcttccatgagaatgtgtatgggctcaaggagatcgtttatttgccgaatgaggtgtggcagtagctctgtggacccagtttctgtgaataggctgagctttgtgaggaacagatgcaggaatggacttggctctgtaaaggatggggaacctcacttcgtggtggtccactgcacaggctacatcaaggcctggcccccagcaggtgtttccctcccagatgatgacccagaggctggccagggaagcaagttttgcctagtggccattggcagattgcaggtaactagttctcccaactgtacagacatgagtaatgtttgtcaaccaacagagttcatctcccgacacaacattgagggtatcttcacttttgtggatcaccgctgtgtggctactgttggctaccagccacaggaactcttaggaaagaatattgtagaattctgtcatcctgaagaccagcagcttctaagagacagcttccaacaggtagtgaaattaaaaggccaagtgctgtctgtcatgttccggttccggtctaagaaccaagaatggctctggatgagaaccagctcctttactttccagaacccttactcagatgaaattgagtacatcatctgtaccaacaccaatgtgaagaactctagccaagaaccacggcctacactctccaacacaatccagaggccacaactaggtcccacagctaatttacccctggagatgggctcaggacagctggcacccaggcagcagcaacagcaaacagaattggacatggtaccaggaagagatggactggccagctacaatcattcccaggtggttcagcctgtgacaaccacaggaccagaacacagcaagccccttgagaagtcagatggtttatttgcccaggatagagatccaagattttcagaaatctatcacaacatcaatgcggatcagagtaaaggcatctcctccagcactgtccctgccacccaacagctattctcccagggcaacacattccctcctaccccccggccggcagagaatttcaggaatagtggcctagcccctcctgtaaccattgtccagccatcagcttctgcaggacagatgttggcccagatttcccgccactccaaccccacccaaggagcaaccccaacttggacccctactacccgctcaggcttttctgcccagcaggtggctacccaggctactgctaagactcgtacttcccagtttggtgtgggcagctttcagactccatcctccttcagctccatgtccctccctggtgccccaactgcatcgcctggtgctgctgcctaccctagtctcaccaatcgtggatctaactttgctcctgagactggacagactgcaggacaattccagacacggacagcagagggtgtgggtgtctggccacagtggcagggccagcagcctcatcatcgttcaagttctagtgagcaacatgttcaacaaccgccagcacagcaacctggccagcctgaggtcttccaggagatgctgtccatgctgggagatcagagcaacagctacaacaatgaagaattccctgatctaactatgtttccccccttttcagaatagaactattggggtgaggataaggggtgggggagaaaaaatcactgtttgtttttaaaaagcaaatctttctgtaaacagaataaaagttcctctcccttcccttccctcacccctgacatgtaccccctttcccttctggctgttcccctgctctgttgcctctctaaggtaacatttatagaagaaatggaatgaatctccaaggcttttaggactgtctgaaaatttgaggctgggtgaagttaaaacacctttccttatgtctcctgacctgaaattgtatagtgttgatttgtgctgagatcaagaggcaggttagaagaacctgacatccactgtttgccttggatagtatggcttgtttttggaaagaaattctgaagagagtggaggagaggagaaatgtcctcatatttgaggaccatgaaacattgtaggtatatatggggctttagcaagtttgagcataggctctttttgctgcctgtgagcagtccctctggaaagaaacatgtgagtaagtgagagagagtgtgtgtgtatgtgtgtgtgtgtgtgtgtgtgtgcgcacacatgcttctgtatttcactctttctccctattagggagttatgcaaaatttgtccccgattttacctttgtctttctgtgtacttttcaaagagtcctaaggagttaaatcttccaggtattttccacttagtattgcagccaaagaatatttaaataaacgtctttgctgcgcttgcatccatgcccagccaatatacaactgtaaagcaaatatagaaagtcggctgttgatacgattgtctgttatcgaacacattcagtgataaagctgggttactgctgcttttggtgctctcaccttatctggaagatctgcaaacattacctaaataggctggcaagataaacactttctggaacccgagacttggccataaagataatgctgcatttttctgtcagaatcacatatgatgtgtgttctgtagaggttatttctgcatggaaactcaacttcttggattagccgtcccagtgaaaatcctcattgttggagtgtaaaccaaatacgaagccctcttgcaaagtagcctctttcatcccatactcaaaatacccagtttagcaagcaactgagatttaagtctctctggccctaagaggtttttcctctttgctccctccaatcttgagattgggttttgctttagagtgcaagtatcataattccgtatgatagatggggcctggacacccatctcaacagggtcacttggtaattaacaatagccatataaatgcggatacaggttactaccctcaccctttaccttcctcaggtaacagtcgtagataccagcttttttttttttttttttaaattggctttggccagtagctaaagtgcaagactgaattaatgagaagatatattaaatgtagtcataggggactgaggagcaagggtggccttgaagaggccaaaggaatgtccatttgctgagtttcccttccttatgtctccagtctggtgccaggtagtggagtaaaaaaggagacagtttatttttttattctatgtgcacacttacagtatacatatatatttatatcacaatttacgaaaccaaaaagttgagtttccaatggaacccttgttttttaataatcgactttttaaatgtgatcaggactataatattgtacagttattatagggcttttggggaaggggaggatagcgagaagatgctctgggggttttgtttttgcttttccttcagggttttatttttgactgttttgttttcttgttggccatttctgtattgctggcatctgtgctaagctttacagtggcaaaaataatgacatgtagcaaagattttcaaacaaaatattttttccttttgtaaaatttcttgtgttgtgtgatcttgattgcggctttatcattcctttccagttcataaacaacaggcacccacaaccagaggaatctatagtttaagctccagacatacaaacataaggcacattgtgtctttaatttcaggaatcagaaatcatagggttctgatcacattgcacgcctcccccctcacttgtcctcctgatcctgacacattctgagtaacatcagcaggaatgctctgaccatgaggtgggggttttggggtgggcgttgcctgggttcttgggagagaggggaagagtcgggacttgaaaaccactagggcacatctggatgccttcccccagtatgtccttttctggattaaaatgagtgaaatttaaactgttcaagtc

SEQ ID NO: 314641 - DNA, 4824 bp, Homo sapiens
aggggctgggatgctgggggctgctgaagccgccatcttggattccgcggtagcggaggcggcggtcaggcgccgcttctggggagtggcctttcttttcccctccctcccggttcggtggcggcggctcctcccactggggggggggtggcgcggcggcggtggcatctgcggccatggcggcgactactgccaaccccgaaatgacatcagatgtaccatcactgggtccagccattgcctctggaaactctggacctggaattcaaggtggaggagccattgtccagagggctattaagcggcgaccagggctggattttgatgatgatggagaagggaacagtaaatttttgaggtgtgatgatgatcagatgtctaacgataaggagcggtttgccagggaaaatcacagtgaaattgaacggcggcgacggaacaagatgacagcctacatcacagaactgtcagatatggtacccacctgtagtgccctggctcgaaaaccagacaagctaaccatcttacgcatggcagtttctcacatgaagtccttgcggggaactggcaacacatccactgatggctcctataagccgtctttcctcactgatcaggaactgaaacatttgatcttggaggcagcagatggctttctgtttattgtctcatgtgagacaggcagggtggtgtatgtgtctgactccgtgactcctgttttgaaccagccacagtctgaatggtttggcagcacactctatgatcaggtgcacccagatgatgtggataaacttcgtgagcagctttccacttcagaaaatgccctgacagggcgtatcctggatctaaagactggaacagtgaaaaaggaaggtcagcagtcttccatgagaatgtgtatgggctcaaggagatcgtttatttgccgaatgaggtgtggcagtagctctgtggacccagtttctgtgaataggctgagctttgtgaggaacagatgcaggaatggacttggctctgtaaaggatggggaacctcacttcgtggtggtccactgcacaggctacatcaaggcctggcccccagcaggtgtttccctcccagatgatgacccagaggctggccagggaagcaagttttgcctagtggccattggcagattgcaggtaactagttctcccaactgtacagacatgagtaatgtttgtcaaccaacagagttcatctcccgacacaacattgagggtatcttcacttttgtggatcaccgctgtgtggctactgttggctaccagccacaggaactcttaggaaagaatattgtagaattctgtcatcctgaagaccagcagcttctaagagacagcttccaacaggtagtgaaattaaaaggccaagtgctgtctgtcatgttccggttccggtctaagaaccaagaatggctctggatgagaaccagctcctttactttccagaacccttactcagatgaaattgagtacatcatctgtaccaacaccaatgtgaagaactctagccaagaaccacggcctacactctccaacacaatccagaggccacaactaggtcccacagctaatttacccctggagatgggctcaggacagctggcacccaggcagcagcaacagcaaacagaattggacatggtaccaggaagagatggactggccagctacaatcattcccaggtggttcagcctgtgacaaccacaggaccagaacacagcaagccccttgagaagtcagatggtttatttgcccaggatagagatccaagattttcagaaatctatcacaacatcaatgcggatcagagtaaaggcatctcctccagcactgtccctgccacccaacagctattctcccagggcaacacattccctcctaccccccggccggcagagaatttcaggaatagtggcctagcccctcctgtaaccattgtccagccatcagcttctgcaggacagatgttggcccagatttcccgccactccaaccccacccaaggagcaaccccaacttggacccctactacccgctcaggcttttctgcccagcaggtggctacccaggctactgctaagactcgtacttcccagtttggtgtgggcagctttcagactccatcctccttcagctccatgtccctccctggtgccccaactgcatcgcctggtgctgctgcctaccctagtctcaccaatcgtggatctaactttgctcctgagactggacagactgcaggacaattccagacacggacagcagagggtgtgggtgtctggccacagtggcagggccagcagcctcatcatcgttcaagttctagtgagcaacatgttcaacaaccgccagcacagcaacctggccagcctgaggtcttccaggagatgctgtccatgctgggagatcagagcaacagctacaacaatgaagaattccctgatctaactatgtttccccccttttcagaatagaactattggggtgaggataaggggtgggggagaaaaaatcactgtttgtttttaaaaagcaaatctttctgtaaacagaataaaagttcctctcccttcccttccctcacccctgacatgtaccccctttcccttctggctgttcccctgctctgttgcctctctaaggtaacatttatagaagaaatggaatgaatctccaaggcttttaggactgtctgaaaatttgaggctgggtgaagttaaaacacctttccttatgtctcctgacctgaaattgtatagtgttgatttgtgctgagatcaagaggcaggttagaagaacctgacatccactgtttgccttggatagtatggcttgtttttggaaagaaattctgaagagagtggaggagaggagaaatgtcctcatatttgaggaccatgaaacattgtaggtatatatggggctttagcaagtttgagcataggctctttttgctgcctgtgagcagtccctctggaaagaaacatgtgagtaagtgagagagagtgtgtgtgtatgtgtgtgtgtgtgtgtgtgtgtgcgcacacatgcttctgtatttcactctttctccctattagggagttatgcaaaatttgtccccgattttacctttgtctttctgtgtacttttcaaagagtcctaaggagttaaatcttccaggtattttccacttagtattgcagccaaagaatatttaaataaacgtctttgctgcgcttgcatccatgcccagccaatatacaactgtaaagcaaatatagaaagtcggctgttgatacgattgtctgttatcgaacacattcagtgataaagctgggttactgctgcttttggtgctctcaccttatctggaagatctgcaaacattacctaaataggctggcaagataaacactttctggaacccgagacttggccataaagataatgctgcatttttctgtcagaatcacatatgatgtgtgttctgtagaggttatttctgcatggaaactcaacttcttggattagccgtcccagtgaaaatcctcattgttggagtgtaaaccaaatacgaagccctcttgcaaagtagcctctttcatcccatactcaaaatacccagtttagcaagcaactgagatttaagtctctctggccctaagaggtttttcctctttgctccctccaatcttgagattgggttttgctttagagtgcaagtatcataattccgtatgatagatggggcctggacacccatctcaacagggtcacttggtaattaacaatagccatataaatgcggatacaggttactaccctcaccctttaccttcctcaggtaacagtcgtagataccagcttttttttttttttttttaaattggctttggccagtagctaaagtgcaagactgaattaatgagaagatatattaaatgtagtcataggggactgaggagcaagggtggccttgaagaggccaaaggaatgtccatttgctgagtttcccttccttatgtctccagtctggtgccaggtagtggagtaaaaaaggagacagtttatttttttattctatgtgcacacttacagtatacatatatatttatatcacaatttacgaaaccaaaaagttgagtttccaatggaacccttgttttttaataatcgactttttaaatgtgatcaggactataatattgtacagttattatagggcttttggggaaggggaggatagcgagaagatgctctgggggttttgtttttgcttttccttcagggttttatttttgactgttttgttttcttgttggccatttctgtattgctggcatctgtgctaagctttacagtggcaaaaataatgacatgtagcaaagattttcaaacaaaatattttttccttttgtaaaatttcttgtgttgtgtgatcttgattgcggctttatcattcctttccagttcataaacaacaggcacccacaaccagaggaatctatagtttaagctccagacatacaaacataaggcacattgtgtctttaatttcaggaatcagaaatcatagggttctgatcacattgcacgcctcccccctcacttgtcctcctgatcctgacacattctgagtaacatcagcaggaatgctctgaccatgaggtgggggttttggggtgggcgttgcctgggttcttgggagagaggggaagagtcgggacttgaaaaccactagggcacatctggatgccttcccccagtatgtccttttctggattaaaatgagtgaaatttaaactgttcaagtc

SEQ ID NO: 314642 - DNA, 3389 bp, Homo sapiens
tcccgctggggagtacggaatagagagcatccttggaggctgacctgtccaagttgctcatcccatttaaagggtttggagaacaatggcagatgcatcctaagtttttctatcctggtaaatgagagaagctaagtcaaggtatattgaattagaagcagggaaataaagaattttacaaggctgtcatctgtcccagctgcagcagcaacagcaaacagaattggacatggtaccaggaagagatggactggccagctacaatcattcccaggtggttcagcctgtgacaaccacaggaccagaacacagcaagccccttgagaagtcagatggtttatttgcccaggatagagatccaagattttcagaaatctatcacaacatcaatgcggatcagagtaaaggcatctcctccagcactgtccctgccacccaacagctattctcccagggcaacacattccctcctaccccccggccggcagagaatttcaggaatagtggcctagcccctcctgtaaccattgtccagccatcagcttctgcaggacagatgttggcccagatttcccgccactccaaccccacccaaggagcaaccccaacttggacccctactacccgctcaggcttttctgcccagcaggtggctacccaggctactgctaagactcgtacttcccagtttggtgtgggcagctttcagactccatcctccttcagctccatgtccctccctggtgccccaactgcatcgcctggtgctgctgcctaccctagtctcaccaatcgtggatctaactttgctcctgagactggacagactgcaggacaattccagacacggacagcagagggtgtgggtgtctggccacagtggcagggccagcagcctcatcatcgttcaagttctagtgagcaacatgttcaacaaccgccagcacagcaacctggccagcctgaggtcttccaggagatgctgtccatgctgggagatcagagcaacagctacaacaatgaagaattccctgatctaactatgtttccccccttttcagaatagaactattggggtgaggataaggggtgggggagaaaaaatcactgtttgtttttaaaaagcaaatctttctgtaaacagaataaaagttcctctcccttcccttccctcacccctgacatgtaccccctttcccttctggctgttcccctgctctgttgcctctctaaggtaacatttatagaagaaatggaatgaatctccaaggcttttaggactgtctgaaaatttgaggctgggtgaagttaaaacacctttccttatgtctcctgacctgaaattgtatagtgttgatttgtgctgagatcaagaggcaggttagaagaacctgacatccactgtttgccttggatagtatggcttgtttttggaaagaaattctgaagagagtggaggagaggagaaatgtcctcatatttgaggaccatgaaacattgtaggtatatatggggctttagcaagtttgagcataggctctttttgctgcctgtgagcagtccctctggaaagaaacatgtgagtaagtgagagagagtgtgtgtgtatgtgtgtgtgtgtgtgtgtgtgtgcgcacacatgcttctgtatttcactctttctccctattagggagttatgcaaaatttgtccccgattttacctttgtctttctgtgtacttttcaaagagtcctaaggagttaaatcttccaggtattttccacttagtattgcagccaaagaatatttaaataaacgtctttgctgcgcttgcatccatgcccagccaatatacaactgtaaagcaaatatagaaagtcggctgttgatacgattgtctgttatcgaacacattcagtgataaagctgggttactgctgcttttggtgctctcaccttatctggaagatctgcaaacattacctaaataggctggcaagataaacactttctggaacccgagacttggccataaagataatgctgcatttttctgtcagaatcacatatgatgtgtgttctgtagaggttatttctgcatggaaactcaacttcttggattagccgtcccagtgaaaatcctcattgttggagtgtaaaccaaatacgaagccctcttgcaaagtagcctctttcatcccatactcaaaatacccagtttagcaagcaactgagatttaagtctctctggccctaagaggtttttcctctttgctccctccaatcttgagattgggttttgctttagagtgcaagtatcataattccgtatgatagatggggcctggacacccatctcaacagggtcacttggtaattaacaatagccatataaatgcggatacaggttactaccctcaccctttaccttcctcaggtaacagtcgtagataccagcttttttttttttttttttaaattggctttggccagtagctaaagtgcaagactgaattaatgagaagatatattaaatgtagtcataggggactgaggagcaagggtggccttgaagaggccaaaggaatgtccatttgctgagtttcccttccttatgtctccagtctggtgccaggtagtggagtaaaaaaggagacagtttatttttttattctatgtgcacacttacagtatacatatatatttatatcacaatttacgaaaccaaaaagttgagtttccaatggaacccttgttttttaataatcgactttttaaatgtgatcaggactataatattgtacagttattatagggcttttggggaaggggaggatagcgagaagatgctctgggggttttgtttttgcttttccttcagggttttatttttgactgttttgttttcttgttggccatttctgtattgctggcatctgtgctaagctttacagtggcaaaaataatgacatgtagcaaagattttcaaacaaaatattttttccttttgtaaaatttcttgtgttgtgtgatcttgattgcggctttatcattcctttccagttcataaacaacaggcacccacaaccagaggaatctatagtttaagctccagacatacaaacataaggcacattgtgtctttaatttcaggaatcagaaatcatagggttctgatcacattgcacgcctcccccctcacttgtcctcctgatcctgacacattctgagtaacatcagcaggaatgctctgaccatgaggtgggggttttggggtgggcgttgcctgggttcttgggagagaggggaagagtcgggacttgaaaaccactagggcacatctggatgccttcccccagtatgtccttttctggattaaaatgagtgaaatttaaactgttcaagtc

SEQ ID NO: 314643 - DNA, 3191 bp, Homo sapiens
ccagagtcaagatccaagatgcacaccggctgcaccatgtcagcagcctggactggccagctacaatcattcccaggtggttcagcctgtgacaaccacaggaccagaacacagcaagccccttgagaagtcagatggtttatttgcccaggatagagatccaagattttcagaaatctatcacaacatcaatgcggatcagagtaaaggcatctcctccagcactgtccctgccacccaacagctattctcccagggcaacacattccctcctaccccccggccggcagagaatttcaggaatagtggcctagcccctcctgtaaccattgtccagccatcagcttctgcaggacagatgttggcccagatttcccgccactccaaccccacccaaggagcaaccccaacttggacccctactacccgctcaggcttttctgcccagcaggtggctacccaggctactgctaagactcgtacttcccagtttggtgtgggcagctttcagactccatcctccttcagctccatgtccctccctggtgccccaactgcatcgcctggtgctgctgcctaccctagtctcaccaatcgtggatctaactttgctcctgagactggacagactgcaggacaattccagacacggacagcagagggtgtgggtgtctggccacagtggcagggccagcagcctcatcatcgttcaagttctagtgagcaacatgttcaacaaccgccagcacagcaacctggccagcctgaggtcttccaggagatgctgtccatgctgggagatcagagcaacagctacaacaatgaagaattccctgatctaactatgtttccccccttttcagaatagaactattggggtgaggataaggggtgggggagaaaaaatcactgtttgtttttaaaaagcaaatctttctgtaaacagaataaaagttcctctcccttcccttccctcacccctgacatgtaccccctttcccttctggctgttcccctgctctgttgcctctctaaggtaacatttatagaagaaatggaatgaatctccaaggcttttaggactgtctgaaaatttgaggctgggtgaagttaaaacacctttccttatgtctcctgacctgaaattgtatagtgttgatttgtgctgagatcaagaggcaggttagaagaacctgacatccactgtttgccttggatagtatggcttgtttttggaaagaaattctgaagagagtggaggagaggagaaatgtcctcatatttgaggaccatgaaacattgtaggtatatatggggctttagcaagtttgagcataggctctttttgctgcctgtgagcagtccctctggaaagaaacatgtgagtaagtgagagagagtgtgtgtgtatgtgtgtgtgtgtgtgtgtgtgtgcgcacacatgcttctgtatttcactctttctccctattagggagttatgcaaaatttgtccccgattttacctttgtctttctgtgtacttttcaaagagtcctaaggagttaaatcttccaggtattttccacttagtattgcagccaaagaatatttaaataaacgtctttgctgcgcttgcatccatgcccagccaatatacaactgtaaagcaaatatagaaagtcggctgttgatacgattgtctgttatcgaacacattcagtgataaagctgggttactgctgcttttggtgctctcaccttatctggaagatctgcaaacattacctaaataggctggcaagataaacactttctggaacccgagacttggccataaagataatgctgcatttttctgtcagaatcacatatgatgtgtgttctgtagaggttatttctgcatggaaactcaacttcttggattagccgtcccagtgaaaatcctcattgttggagtgtaaaccaaatacgaagccctcttgcaaagtagcctctttcatcccatactcaaaatacccagtttagcaagcaactgagatttaagtctctctggccctaagaggtttttcctctttgctccctccaatcttgagattgggttttgctttagagtgcaagtatcataattccgtatgatagatggggcctggacacccatctcaacagggtcacttggtaattaacaatagccatataaatgcggatacaggttactaccctcaccctttaccttcctcaggtaacagtcgtagataccagcttttttttttttttttttaaattggctttggccagtagctaaagtgcaagactgaattaatgagaagatatattaaatgtagtcataggggactgaggagcaagggtggccttgaagaggccaaaggaatgtccatttgctgagtttcccttccttatgtctccagtctggtgccaggtagtggagtaaaaaaggagacagtttatttttttattctatgtgcacacttacagtatacatatatatttatatcacaatttacgaaaccaaaaagttgagtttccaatggaacccttgttttttaataatcgactttttaaatgtgatcaggactataatattgtacagttattatagggcttttggggaaggggaggatagcgagaagatgctctgggggttttgtttttgcttttccttcagggttttatttttgactgttttgttttcttgttggccatttctgtattgctggcatctgtgctaagctttacagtggcaaaaataatgacatgtagcaaagattttcaaacaaaatattttttccttttgtaaaatttcttgtgttgtgtgatcttgattgcggctttatcattcctttccagttcataaacaacaggcacccacaaccagaggaatctatagtttaagctccagacatacaaacataaggcacattgtgtctttaatttcaggaatcagaaatcatagggttctgatcacattgcacgcctcccccctcacttgtcctcctgatcctgacacattctgagtaacatcagcaggaatgctctgaccatgaggtgggggttttggggtgggcgttgcctgggttcttgggagagaggggaagagtcgggacttgaaaaccactagggcacatctggatgccttcccccagtatgtccttttctggattaaaatgagtgaaatttaaactgttcaagtc

SEQ ID NO: 314644 - DNA, 1817 bp, Homo sapiens
  misc_feature (1759)..(1759): n is a, c, g, or t
aggggctgggatgctgggggctgctgaagccgccatcttggattccgcggtagcggaggcggcggtcaggcgccgcttctggggagtggcctttcttttcccctccctcccggttcggtggcggcggctcctcccactggggggggggtggcgcggcggcggtggcatctgcggccatggcggcgactactgccaaccccgaaatgacatcagatgtaccatcactgggtccagccattgcctctggaaactctggacctggaattcaaggtggaggagccattgtccagagggctattaagcggcgaccagggctggattttgatgatgatggagaagggaacagtaaatttttgaggtgtgatgatgatcagatgtctaacgataaggagcggtttgccaggtcggatgatgagcagagctctgcggataaagagagacttgccagggaaaatcacagtgaaattgaacggcggcgacggaacaagatgacagcctacatcacagaactgtcagatatggtacccacctgtagtgccctggctcgaaaaccagacaagctaaccatcttacgcatggcagtttctcacatgaagtccttgcggggaactggcaacacatccactgatggctcctataagccgtctttcctcactgatcaggaactgaaacatttgatcttggaggcagcagatggctttctgtttattgtctcatgtgagacaggcagggtggtgtatgtgtctgactccgtgactcctgttttgaaccagccacagtctgaatggtttggcagcacactctatgatcaggtgcacccagatgatgtggataaacttcgtgagcagctttccacttcagaaaatgccctgacagggcgtatcctggatctaaagactggaacagtgaaaaaggaaggtcagcagtcttccatgagaatgtgtatgggctcaaggagatcgtttatttgccgaatgaggtgtggcagtagctctgtggacccagtttctgtgaataggctgagctttgtgaggaacagatgcaggaatggacttggctctgtaaaggatggggaacctcacttcgtggtggtccactgcacaggctacatcaaggcctggcccccagcaggtgtttccctcccagatgatgacccagaggctggccagggaagcaagttttgcctagtggccattggcagattgcaggtaactagttctcccaactgtacagacatgagtaatgtttgtcaaccaacagagttcatctcccgacacaacattgagggtatcttcacttttgtggatcaccgctgtgtggctactgttggctaccagccacaggaactcttaggaaagaatattgtagaattctgtcatcctgaagaccagcagcttctaagagacagcttccaacaggtagtgaaattaaaaggccaagtgctgtctgtcatgttccggttccggtctaagaaccaagaatggctctggatgagaaccagctcctttactttccagaacccttactcagatgaaattgagtacatcatctgtaccaacaccaatgtgaagaactctagccaagaaccacggcctacactctccaacacaatccagaggccacaactaggtcccacagctaatttacccctggagatgggctcaggacagctggcacccaggcagcagcaacagcaaacagaattggacatggtaccaggaagagatggactggccagctacaatcattcccaggtggntcagcctgtgacaaccacagcgactgcctcacagctaatcactagtgaatttgcggcc

SEQ ID NO: 314645 - DNA, 1161 bp, Homo sapiens
aggggctgggatgctgggggctgctgaagccgccatcttggattccgcggtagcggaggcggcggtcaggcgccgcttctggggagtggcctttcttttcccctccctcccggttcggtggcggcggctcctcccactggggggggggtggcgcggcggcggtggcatctgcggccatggcggcgactactgccaaccccgaaatgacatcagatgtaccatcactgggtccagccattgcctctggaaactctggacctggaattcaaggtggaggagccattgtccagagggctattaagcggcgaccagggctggattttgatgatgatggagaagggaacagtaaatttttgaggtgtgatgatgatcagatgtctaacgataaggagcggtttgccaggtcggatgatgagcagagctctgcggataaagagagacttgccagggaaaatcacagtgaaattgaacggcggcgacggaacaagatgacagcctacatcacagaactgtcagatatggtacccacctgtagtgccctggctcgaaaaccagacaagctaaccatcttacgcatggcagtttctcacatgaagtccttgcggggaactggcaacacatccactgatggctcctataagccgtctttcctcactgatcaggaactgaaacatttgatcttggaggcagcagatggctttctgtttattgtctcatgtgagacaggcagggtggtgtatgtgtctgactccgtgactcctgttttgaaccagccacagtctgaatggtttggcagcacactctatgatcaggtgcacccagatgatgtggataaacttcgtgagcagctttccacttcagaaaatgccctgacagggcgtatcctggatctaaagactggaacagtgaaaaaggaaggtcagcagtcttccatgagaatgtgtatgggctcaaggagatcgtttatttgccgaatgaggtgtggcagtagctctgtggacccagtttctgtgaataggctgagctttgtgaggaacagatgcaggaatggacttggctctgtaaaggatggggaacctcacttcgtggtggtccactgcacaggctacatcaaggcctggcccccagcagtaagaaagtgaaatagtaaatatttcccct

SEQ ID NO: 314646 - DNA, 578 bp, Homo sapiens
cggtgcctggcccataaataggtctattttgaatctttacttgtctgagttttgaaggcatttgagttggaggtccccgttaaaccttttaacgtcacgtttctgaaggtgtttccctcccagatgatgacccagaggctggccagggaagcaagttttgcctagtggccattggcagattgcaggcaagtatgaattttccacatctatattcccgttcaattagagcagatcttcaggactcattcctgttaattttcttttactttctgaatacaaatgaagaattccataaaactctcaaaatttgaaggaatatggcatttatagtgaccattgctattcttggatttaagtaaagttgaaaagtatgagaggagggagatctttttccccttgtcttaattttagctttactatgcttaattttctatttccagttaatttcctttgcccctatacaaaagaagaaagatccttttcattgtatcattacctgactaacaatagaaaagtggaattattttgattttttcataagtatagataagtttcttggttacttgtaccatatcaac

SEQ ID NO: 314647 - DNA, 1192 bp, Homo sapiens
tccacctcccagattcaagtgattctcctgtctcagcctcccaagtagctgggattacagatgcatgccactgtgccctgctaatttttgtatttttagtagagacaggatttcaccatgttggccaggccggtctcaaactcctggcctcaagtaatccacctgcctccatctcccaaagtgctgggattacaggcatgagccaccatgcctgacctgtcgtttcttaaaacagcttttgttctgagggagtggtaatttacaaaggatgtgaagtttccaggaaatagggggaagggaattacattatcttcttgttctctgtctgccttattagttctgtttcatgcttgctttgcatgagaaggttggcaaaccttattttaactgctgagacttaagcatcactaaatctgaataccacattcttcagcagcacacttggtatccatatcactctccctgctaccaaatgaccagatgtgaccacctggatggggcttctctttctttccatgcagggaaaatcacagtgaaattgaacggcggcgacggaacaagatgacagcctacatcacagaactgtcagatatggtacccacctgtagtgccctggctcgaaaaccagacaagctaaccatcttacgcatggcagtttctcacatgaagtccttgcggggaactggcaacacatccactgatggctcctataagccgtctttcctcactgatcaggtctctgggacttatagttctgagagagtctggaatctgggtgaatctcttgaaagttttcgttttttggacaagaattcagcttttcaggaagaagtcagacaatgggaaaacgaatttcaatccttggctataacattaattagccattgggacaatgagaagtagagaagagttgaaaactatttaataagctaataagtattaatatttgagaacttgactcatgaatatagcatataggatggaagaagaacagtggaatcacagaggaaatgactatgtccatggaaccaattttctttcttgcctttagggttatagaagatggaagaaatctatttcttatccctgaagcagcttctagttttagtaatagaatgaatctgtccccctttggtgatagaagaactgagagtctaattgttgcttagggatgtgctctgttacatgtgat

SEQ ID NO: 314648 - DNA, 4829 bp, Homo sapiens
aggggctgggatgctgggggctgctgaagccgccatcttggattccgcggtagcggaggcggcggtcaggcgccgcttctggggagtggcctttcttttcccctccctcccggttcggtggcggcggctcctcccactggggggggggtggcgcggcggcggtggcatctgcggccatggcggcgactactgccaaccccgaaatgacatcagatgtaccatcactgggtccagccattgcctctggaaactctggacctggaattcaaggtggaggagccattgtccagagggctattaagcggcgaccagggctggattttgatgatgatggagaagggaacagtaaatttttgaggtgtgatgatgatcagatgtctaacgataaggagcggtttgccaggtcggatgatgagcagagctctgcggataaagagagacttgccagggaaaatcacagtgaaattgaacggcggcgacggaacaagatgacagcctacatcacagaactgtcagatatggtacccacctgtagtgccctggctcgaaaaccagacaagctaaccatcttacgcatggcagtttctcacatgaagtccttgcggggaactggcaacacatccactgatggctcctataagccgtctttcctcactgatcaggaactgaaacatttgatcttggaggcagcagatggctttctgtttattgtctcatgtgagacaggcagggtggtgtatgtgtctgactccgtgactcctgttttgaaccagccacagtctgaatggtttggcagcacactctatgatcaggtgcacccagatgatgtggataaacttcgtgagcagctttccacttcagaaaatgccctgacagggcgtatcctggatctaaagactggaacagtgaaaaaggaaggtcagcagtcttccatgagaatgtgtatgggctcaaggagatcgtttatttgccgaatgaggtgtggcagtagctctgtggacccagtttctgtgaataggctgagctttgtgaggaacagatgcaggaatggacttggctctgtaaaggatggggaacctcacttcgtggtggtccactgcacaggctacatcaaggcctggcccccagcaggtgtttccctcccagatgatgacccagaggctggccagggaagcaagttttgcctagtggccattggcagattgcaggtaactagttctcccaactgtacagacatgagtaatgtttgtcaaccaacagagttcatctcccgacacaacattgagggtatcttcacttttgtggatcaccgctgtgtggctactgttggctaccagccacaggaactcttaggaaagaatattgtagaattctgtcatcctgaagaccagcagcttctaagagacagcttccaacaggtagtgaaattaaaaggccaagtgctgtctgtcatgttccggttccggtctaagaaccaagaatggctctggatgagaaccagctcctttactttccagaacccttactcagatgaaattgagtacatcatctgtaccaacaccaatgtgaagaactctagccaagaaccacggcctacactctccaacacaatccagaggccacaactaggtcccacagctaatttacccctggagatgggctcaggacagctggcacccaggcagcagcaacagcaaacagaattggacatggtaccaggaagagatggactggccagctacaatcattcccaggtggttcagcctgtgacaaccacaggaccagaacacagcaagccccttgagaagtcagatggtttatttgcccaggatagagatccaagattttcagaaatctatcacaacatcaatgcggatcagagtaaaggcatctcctccagcactgtccctgccacccaacagctattctcccagggcaacacattccctcctaccccccggccggcagagaatttcaggaatagtggcctagcccctcctgtaaccattgtccagccatcagcttctgcaggacagatgttggcccagatttcccgccactccaaccccacccaaggagcaaccccaacttggacccctactacccgctcaggcttttctgcccagcaggtggctacccaggctactgctaagactcgtacttcccagtttggtgtgggcagctttcagactccatcctccttcagctccatgtccctccctggtgccccaactgcatcgcctggtgctgctgcctaccctagtctcaccaatcgtggatctaactttgctcctgagactggacagactgcaggacaattccagacacggacagcagagggtgtgggtgtctggccacagtggcagggccagcagcctcatcatcgttcaagttctagtgagcaacatgttcaacaaccgccagcacagcaacctggccagcctgaggtcttccaggagatgctgtccatgctgggagatcagagcaacagctacaacaatgaagaattccctgatctaactatgtttccccccttttcagaatagaactattggggtgaggataaggggtgggggagaaaaaatcactgtttgtttttaaaaagcaaatctttctgtaaacagaataaaagttcctctcccttcccttccctcacccctgacatgtaccccctttcccttctggctgttcccctgctctgttgcctctctaaggtaacatttatagaagaaatggaatgaatctccaaggcttttaggactgtctgaaaatttgaggctgggtgaagttaaaacacctttccttatgtctcctgacctgaaattgtatagtgttgatttgtgctgagatcaagaggcaggttagaagaacctgacatccactgtttgccttggatagtatggcttgtttttggaaagaaattctgaagagagtggaggagaggagaaatgtcctcatatttgaggaccatgaaacattgtaggtatatatggggctttagcaagtttgagcataggctctttttgctgcctgtgagcagtccctctggaaagaaacatgtgagtaagtgagagagagtgtgtgtgtatgtgtgtgtgtgtgtgtgtgtgtgcgcacacatgcttctgtatttcactctttctccctattagggagttatgcaaaatttgtccccgattttacctttgtctttctgtgtacttttcaaagagtcctaaggagttaaatcttccaggtattttccacttagtattgcagccaaagaatatttaaataaacgtctttgctgcgcttgcatccatgcccagccaatatacaatctgttatcgaacacattcagtgataaagctgggttactgctgcttttggtgctctcaccttatctggaagatctgcaaacattacctaaataggctggcaagataaacactttctggaacccgagacttggccataaagataatgctgcatttttctgtcagaatcacatatgatgtgtgttctgtagaggttatttctgcatggaaactcaacttcttggattagccgtcccagtgaaaatcctcattgttggagtgtaaaccaaatacgaagccctcttgcaaagtagcctctttcatcccatactcaaaatacccagtttagcaagcaactgagatttaagtctctctggccctaagaggtttttcctctttgctccctccaatcttgagattgggttttgctttagagtgcaagtatcataattccgtatgatagatggggcctggacacccatctcaacagggtcacttggtaattaacaatagccatataaatgcggatacaggttactaccctcaccctttaccttcctcaggtaacagtcgtagataccagcttttttttttttttttttaaattggctttggccagtagctaaagtgcaagactgaattaatgagaagatatattaaatgtagtcataggggactgaggagcaagggtggccttgaagaggccaaaggaatgtccatttgctgagtttcccttccttatgtctccagtctggtgccaggtagtggagtaaaaaaggagacagtttatttttttattctatgtgcacacttacagtatacatatatatttatatcacaatttacgaaaccaaaaagttgagtttccaatggaacccttgttttttaataatcgactttttaaatgtgatcaggactataatattgtacagttattatagggcttttggggaaggggaggatagcgagaagatgctctgggggttttgtttttgcttttccttcagggttttatttttgactgttttgttttcttgttggccatttctgtattgctggcatctgtgctaagctttacagtggcaaaaataatgacatgtagcaaagattttcaaacaaaatattttttccttttgtaaaatttcttgtgttgtgtgatcttgattgcggctttatcattcctttccagttcataaacaacaggcacccacaaccagaggaatctatagtttaagctccagacatacaaacataaggcacattgtgtctttaatttcaggaatcagaaatcatagggttctgatcacattgcacgcctcccccctcacttgtcctcctgatcctgacacattctgagtaacatcagcaggaatgctctgaccatgaggtgggggttttggggtgggcgttgcctgggttcttgggagagaggggaagagtcgggacttgaaaaccactagggcacatctggatgccttcccccagtatgtccttttctggattaaaatgagtgaaatttaaactgttcaagtc

SEQ ID NO: 314649 - DNA, 3584 bp, Homo sapiens
aggggctgggatgctgggggctgctgaagccgccatcttggattccgcggtagcggaggcggcggtcaggcgccgcttctggggagtggcctttcttttcccctccctcccggttcggtggcggcggctcctcccactggggggggggtggcgcggcggcggtggcatctgcggccatggcggcgactactgccaaccccgaaatgacatcagatgtaccatcactgggtccagccattgcctctggaaactctggacctggaattcaaggtggaggagccattgtccagagggctattaagcggcgaccagggctggattttgatgatgatggagaagggaacagtaaatttttgaggtgtgatgatgatcagatgtctaacgataaggagcggtttgccaggtcggatgatgagcagagctctgcggataaagagagacttgccagggaaaatcacagtgaaattgaacggcggcgacggaacaagatgacagcctacatcacagaactgtcagatatggtacccacctgtagtgccctggctcgaaaaccagacaagctaaccatcttacgcatggcagtttctcacatgaagtccttgcggggaactggcaacacatccactgatggctcctataagccgtctttcctcactgatcaggaactgaaacatttgatcttggaggcagcagatggctttctgtttattgtctcatgtgagacaggcagggtggtgtatgtgtctgactccgtgactcctgttttgaaccagccacagtctgaatggtttggcagcacactctatgatcaggtgcacccagatgatgtggataaacttcgtgagcagctttccacttcagaaaatgccctgacagggcgtatcctggatctaaagactggaacagtgaaaaaggaaggtcagcagtcttccatgagaatgtgtatgggctcaaggagatcgtttatttgccgaatgaggtgtggcagtagctctgtggacccagtttctgtgaataggctgagctttgtgaggaacagatgcaggaatggacttggctctgtaaaggatggggaacctcacttcgtggtggtccactgcacaggctacatcaaggcctggcccccagcaggtttccctcccagatgatgacccagcctgaggtcttccaggagatgctgtccatgctgggagatcagagcaacagctacaacaatgaagaattccctgatctaactatgtttccccccttttcagaatagaactattggggtgaggataaggggtgggggagaaaaaatcactgtttgtttttaaaaagcaaatctttctgtaaacagaataaaagttcctctcccttcccttccctcacccctgacatgtaccccctttcccttctggctgttcccctgctctgttgcctctctaaggtaacatttatagaagaaatggaatgaatctccaaggcttttaggactgtctgaaaatttgaggctgggtgaagttaaaacacctttccttatgtctcctgacctgaaattgtatagtgttgatttgtgctgagatcaagaggcaggttagaagaacctgacatccactgtttgccttggatagtatggcttgtttttggaaagaaattctgaagagagtggaggagaggagaaatgtcctcatatttgaggaccatgaaacattgtaggtatatatggggctttagcaagtttgagcataggctctttttgctgcctgtgagcagtccctctggaaagaaacatgtgagtaagtgagagagagtgtgtgtgtatgtgtgtgtgtgtgtgtgtgtgtgcgcacacatgcttctgtatttcactctttctccctattagggagttatgcaaaatttgtccccgattttacctttgtctttctgtgtacttttcaaagagtcctaaggagttaaatcttccaggtattttccacttagtattgcagccaaagaatatttaaataaacgtctttgctgcgcttgcatccatgcccagccaatatacaactgtaaagcaaatatagaaagtcggctgttgatacgattgtctgttatcgaacacattcagtgataaagctgggttactgctgcttttggtgctctcaccttatctggaagatctgcaaacattacctaaataggctggcaagataaacactttctggaacccgagacttggccataaagataatgctgcatttttctgtcagaatcacatatgatgtgtgttctgtagaggttatttctgcatggaaactcaacttcttggattagccgtcccagtgaaaatcctcattgttggagtgtaaaccaaatacgaagccctcttgcaaagtagcctctttcatcccatactcaaaatacccagtttagcaagcaactgagatttaagtctctctggccctaagaggtttttcctctttgctccctccaatcttgagattgggttttgctttagagtgcaagtatcataattccgtatgatagatggggcctggacacccatctcaacagggtcacttggtaattaacaatagccatataaatgcggatacaggttactaccctcaccctttaccttcctcaggtaacagtcgtagataccagcttttttttttttttttttaaattggctttggccagtagctaaagtgcaagactgaattaatgagaagatatattaaatgtagtcataggggactgaggagcaagggtggccttgaagaggccaaaggaatgtccatttgctgagtttcccttccttatgtctccagtctggtgccaggtagtggagtaaaaaaggagacagtttatttttttattctatgtgcacacttacagtatacatatatatttatatcacaatttacgaaaccaaaaagttgagtttccaatggaacccttgttttttaataatcgactttttaaatgtgatcaggactataatattgtacagttattatagggcttttggggaaggggaggatagcgagaagatgctctgggggttttgtttttgcttttccttcagggttttatttttgactgttttgttttcttgttggccatttctgtattgctggcatctgtgctaagctttacagtggcaaaaataatgacatgtagcaaagattttcaaacaaaatattttttccttttgtaaaatttcttgtgttgtgtgatcttgattgcggctttatcattcctttccagttcataaacaacaggcacccacaaccagaggaatctatagtttaagctccagacatacaaacataaggcacattgtgtctttaatttcaggaatcagaaatcatagggttctgatcacattgcacgcctcccccctcacttgtcctcctgatcctgacacattctgagtaacatcagcaggaatgctctgaccatgaggtgggggttttggggtgggcgttgcctgggttcttgggagagaggggaagagtcgggacttgaaaaccactagggcacatctggatgccttcccccagtatgtccttttctggattaaaatgagtgaaatttaaactgttcaagtc

SEQ ID NO: 314650 - DNA, 4925 bp, Homo sapiens
aggggctgggatgctgggggctgctgaagccgccatcttggattccgcggtagcggaggcggcggtcaggcgccgcttctggggagtggcctttcttttcccctccctcccggttcggtggcggcggctcctcccactggggggggggtggcgcggcggcggtggcatctgcggccatggcggcgactactgccaaccccgcctgatcttggactcaagattctcctgcctcagaccccgagtagctgggactacagaaatgacatcagatgtaccatcactgggtccagccattgcctctggaaactctggacctggaattcaaggtggaggagccattgtccagagggctattaagcggcgaccagggctggattttgatgatgatggagaagggaacagtaaatttttgaggtgtgatgatgatcagatgtctaacgataaggagcggtttgccaggtcggatgatgagcagagctctgcggataaagagagacttgccagggaaaatcacagtgaaattgaacggcggcgacggaacaagatgacagcctacatcacagaactgtcagatatggtacccacctgtagtgccctggctcgaaaaccagacaagctaaccatcttacgcatggcagtttctcacatgaagtccttgcggggaactggcaacacatccactgatggctcctataagccgtctttcctcactgatcaggaactgaaacatttgatcttggaggcagcagatggctttctgtttattgtctcatgtgagacaggcagggtggtgtatgtgtctgactccgtgactcctgttttgaaccagccacagtctgaatggtttggcagcacactctatgatcaggtgcacccagatgatgtggataaacttcgtgagcagctttccacttcagaaaatgccctgacagggcgtatcctggatctaaagactggaacagtgaaaaaggaaggtcagcagtcttccatgagaatgtgtatgggctcaaggagatcgtttatttgccgaatgaggtgtggcagtagctctgtggacccagtttctgtgaataggctgagctttgtgaggaacagatgcaggaatggacttggctctgtaaaggatggggaacctcacttcgtggtggtccactgcacaggctacatcaaggcctggcccccagcaggtgtttccctcccagatgatgacccagaggctggccagggaagcaagttttgcctagtggccattggcagattgcaggtaactagttctcccaactgtacagacatgagtaatgtttgtcaaccaacagagttcatctcccgacacaacattgagggtatcttcacttttgtggatcaccgctgtgtggctactgttggctaccagccacaggaactcttaggaaagaatattgtagaattctgtcatcctgaagaccagcagcttctaagagacagcttccaacaggtagtgaaattaaaaggccaagtgctgtctgtcatgttccggttccggtctaagaaccaagaatggctctggatgagaaccagctcctttactttccagaacccttactcagatgaaattgagtacatcatctgtaccaacaccaatgtgaagaactctagccaagaaccacggcctacactctccaacacaatccagaggccacaactaggtcccacagctaatttacccctggagatgggctcaggacagctggcacccaggcagcagcaacagcaaacagaattggacatggtaccaggaagagatggactggccagctacaatcattcccaggtggttcagcctgtgacaaccacaggaccagaacacagcaagccccttgagaagtcagatggtttatttgcccaggatagagatccaagattttcagaaatctatcacaacatcaatgcggatcagagtaaaggcatctcctccagcactgtccctgccacccaacagctattctcccagggcaacacattccctcctaccccccggccggcagagaatttcaggaatagtggcctagcccctcctgtaaccattgtccagccatcagcttctgcaggacagatgttggcccagatttcccgccactccaaccccacccaaggagcaaccccaacttggacccctactacccgctcaggcttttctgcccagcaggtggctacccaggctactgctaagactcgtacttcccagtttggtgtgggcagctttcagactccatcctccttcagctccatgtccctccctggtgccccaactgcatcgcctggtgctgctgcctaccctagtctcaccaatcgtggatctaactttgctcctgagactggacagactgcaggacaattccagacacggacagcagagggtgtgggtgtctggccacagtggcagggccagcagcctcatcatcgttcaagttctagtgagcaacatgttcaacaaccgccagcacagcaacctggccagcctgaggtcttccaggagatgctgtccatgctgggagatcagagcaacagctacaacaatgaagaattccctgatctaactatgtttccccccttttcagaatagaactattggggtgaggataaggggtgggggagaaaaaatcactgtttgtttttaaaaagcaaatctttctgtaaacagaataaaagttcctctcccttcccttccctcacccctgacatgtaccccctttcccttctggctgttcccctgctctgttgcctctctaaggtaacatttatagaagaaatggaatgaatctccaaggcttttaggactgtctgaaaatttgaggctgggtgaagttaaaacacctttccttatgtctcctgacctgaaattgtatagtgttgatttgtgctgagatcaagaggcaggttagaagaacctgacatccactgtttgccttggatagtatggcttgtttttggaaagaaattctgaagagagtggaggagaggagaaatgtcctcatatttgaggaccatgaaacattgtaggtatatatggggctttagcaagtttgagcataggctctttttgctgcctgtgagcagtccctctggaaagaaacatgtgagtaagtgagagagagtgtgtgtgtatgtgtgtgtgtgtgtgtgtgtgtgcgcacacatgcttctgtatttcactctttctccctattagggagttatgcaaaatttgtccccgattttacctttgtctttctgtgtacttttcaaagagtcctaaggagttaaatcttccaggtattttccacttagtattgcagccaaagaatatttaaataaacgtctttgctgcgcttgcatccatgcccagccaatatacaactgtaaagcaaatatagaaagtcggctgttgatacgattgtctgttatcgaacacattcagtgataaagctgggttactgctgcttttggtgctctcaccttatctggaagatctgcaaacattacctaaataggctggcaagataaacactttctggaacccgagacttggccataaagataatgctgcatttttctgtcagaatcacatatgatgtgtgttctgtagaggttatttctgcatggaaactcaacttcttggattagccgtcccagtgaaaatcctcattgttggagtgtaaaccaaatacgaagccctcttgcaaagtagcctctttcatcccatactcaaaatacccagtttagcaagcaactgagatttaagtctctctggccctaagaggtttttcctctttgctccctccaatcttgagattgggttttgctttagagtgcaagtatcataattccgtatgatagatggggcctggacacccatctcaacagggtcacttggtaattaacaatagccatataaatgcggatacaggttactaccctcaccctttaccttcctcaggtaacagtcgtagataccagcttttttttttttttttttaaattggctttggccagtagctaaagtgcaagactgaattaatgagaagatatattaaatgtagtcataggggactgaggagcaagggtggccttgaagaggccaaaggaatgtccatttgctgagtttcccttccttatgtctccagtctggtgccaggtagtggagtaaaaaaggagacagtttatttttttattctatgtgcacacttacagtatacatatatatttatatcacaatttacgaaaccaaaaagttgagtttccaatggaacccttgttttttaataatcgactttttaaatgtgatcaggactataatattgtacagttattatagggcttttggggaaggggaggatagcgagaagatgctctgggggttttgtttttgcttttccttcagggttttatttttgactgttttgttttcttgttggccatttctgtattgctggcatctgtgctaagctttacagtggcaaaaataatgacatgtagcaaagattttcaaacaaaatattttttccttttgtaaaatttcttgtgttgtgtgatcttgattgcggctttatcattcctttccagttcataaacaacaggcacccacaaccagaggaatctatagtttaagctccagacatacaaacataaggcacattgtgtctttaatttcaggaatcagaaatcatagggttctgatcacattgcacgcctcccccctcacttgtcctcctgatcctgacacattctgagtaacatcagcaggaatgctctgaccatgaggtgggggttttggggtgggcgttgcctgggttcttgggagagaggggaagagtcgggacttgaaaaccactagggcacatctggatgccttcccccagtatgtccttttctggattaaaatgagtgaaatttaaactgttcaagtc

SEQ ID NO: 314651 - DNA, 2832 bp, Homo sapiens
  misc_feature (1)..(1): n is a, c, g, or t
  misc_feature (13)..(13): n is a, c, g, or t
nacaaagctaggnagagcctgggtccaaccccacccaaggagcaaccccaacttggacccctactacccgctcaggcttttctgcccagcaggtggctacccaggctactgctaagactcgtacttcccagtttggtgtgggcagctttcagactccatcctccttcagctccatgtccctccctggtgccccaactgcatcgcctggtgctgctgcctaccctagtctcaccaatcgtggatctaactttgctcctgagactggacagactgcaggacaattccagacacggacagcagagggtgtgggtgtctggccacagtggcagggccagcagcctcatcatcgttcaagttctagtgagcaacatgttcaacaaccgccagcacagcaacctggccagcctgaggtcttccaggagatgctgtccatgctgggagatcagagcaacagctacaacaatgaagaattccctgatctaactatgtttccccccttttcagaatagaactattggggtgaggataaggggtgggggagaaaaaatcactgtttgtttttaaaaagcaaatctttctgtaaacagaataaaagttcctctcccttcccttccctcacccctgacatgtaccccctttcccttctggctgttcccctgctctgttgcctctctaaggtaacatttatagaagaaatggaatgaatctccaaggcttttaggactgtctgaaaatttgaggctgggtgaagttaaaacacctttccttatgtctcctgacctgaaattgtatagtgttgatttgtgctgagatcaagaggcaggttagaagaacctgacatccactgtttgccttggatagtatggcttgtttttggaaagaaattctgaagagagtggaggagaggagaaatgtcctcatatttgaggaccatgaaacattgtaggtatatatggggctttagcaagtttgagcataggctctttttgctgcctgtgagcagtccctctggaaagaaacatgtgagtaagtgagagagagtgtgtgtgtatgtgtgtgtgtgtgtgtgtgtgtgcgcacacatgcttctgtatttcactctttctccctattagggagttatgcaaaatttgtccccgattttacctttgtctttctgtgtacttttcaaagagtcctaaggagttaaatcttccaggtattttccacttagtattgcagccaaagaatatttaaataaacgtctttgctgcgcttgcatccatgcccagccaatatacaactgtaaagcaaatatagaaagtcggctgttgatacgattgtctgttatcgaacacattcagtgataaagctgggttactgctgcttttggtgctctcaccttatctggaagatctgcaaacattacctaaataggctggcaagataaacactttctggaacccgagacttggccataaagataatgctgcatttttctgtcagaatcacatatgatgtgtgttctgtagaggttatttctgcatggaaactcaacttcttggattagccgtcccagtgaaaatcctcattgttggagtgtaaaccaaatacgaagccctcttgcaaagtagcctctttcatcccatactcaaaatacccagtttagcaagcaactgagatttaagtctctctggccctaagaggtttttcctctttgctccctccaatcttgagattgggttttgctttagagtgcaagtatcataattccgtatgatagatggggcctggacacccatctcaacagggtcacttggtaattaacaatagccatataaatgcggatacaggttactaccctcaccctttaccttcctcaggtaacagtcgtagataccagcttttttttttttttttttaaattggctttggccagtagctaaagtgcaagactgaattaatgagaagatatattaaatgtagtcataggggactgaggagcaagggtggccttgaagaggccaaaggaatgtccatttgctgagtttcccttccttatgtctccagtctggtgccaggtagtggagtaaaaaaggagacagtttatttttttattctatgtgcacacttacagtatacatatatatttatatcacaatttacgaaaccaaaaagttgagtttccaatggaacccttgttttttaataatcgactttttaaatgtgatcaggactataatattgtacagttattatagggcttttggggaaggggaggatagcgagaagatgctctgggggttttgtttttgcttttccttcagggttttatttttgactgttttgttttcttgttggccatttctgtattgctggcatctgtgctaagctttacagtggcaaaaataatgacatgtagcaaagattttcaaacaaaatattttttccttttgtaaaatttcttgtgttgtgtgatcttgattgcggctttatcattcctttccagttcataaacaacaggcacccacaaccagaggaatctatagtttaagctccagacatacaaacataaggcacattgtgtctttaatttcaggaatcagaaatcatagggttctgatcacattgcacgcctcccccctcacttgtcctcctgatcctgacacattctgagtaacatcagcaggaatgctctgaccatgaggtgggggttttggggtgggcgttgcctgggttcttgggagagaggggaagagtcgggacttgaaaaccactagggcacatctggatgccttcccccagtatgtccttttctggattaaaatgagtgaaatttaaactgttcaagtc

SEQ ID NO: 314652 - DNA, 3138 bp, Homo sapiens
aggggctgggatgctgggggctgctgaagccgccatcttggattccgcggtagcggaggcggcggtcaggcgccgcttctggggagtggcctttcttttcccctccctcccggttcggtggcggcggctcctcccactggggggggggtggcgcggcggcggtggcatctgcggccatggcggcgactactgccaaccccgaaatgacatcagatgtaccatcactgggtccagccattgcctctggaaactctggacctggaattcaaggtggaggagccattgtccagagggctattaagcggcgaccagggctggattttgatgatgatggagaagggaacagtaaatttttgaggtgtgatgatgatcagatgtctaacgataaggagcggtttgccaggtcggatgatgagcagagctctgcggataaagagagacttgccagggaaaatcacagtgaaattgaacggcggcgacggaacaagatgacagcctacatcacagaactgtcagatatggtacccacctgtagtgccctggctcgaaaaccagacaagctaaccatcttacgcatggcagtttctcacatgaagtccttgcggggaactggcaacacatccactgatggctcctataagccgtctttcctcactgatcaggaactgaaacatttgatcttggaggcagcagatggctttctgtttattgtctcatgtgagacaggcagggtggtgtatgtgtctgactccgtgactcctgttttgaaccagccacagtctgaatggtttggcagcacactctatgatcaggtgcacccagatgatgtggataaacttcgtgagcagctttccacttcagaaaatgccctgacagggcgtatcctggatctaaagactggaacagtgaaaaaggaaggtcagcagtcttccatgagaatgtgtatgggctcaaggagatcgtttatttgccgaatgaggtgtggcagtagctctgtggacccagtttctgtgaataggctgagctttgtgaggaacagatgcaggaatggacttggctctgtaaaggatggggaacctcacttcgtggtggtccactgcacaggctacatcaaggcctggcccccagcaggtgtttccctcccagatgatgacccagaggctggccagggaagcaagttttgcctagtggccattggcagattgcaggtaactagttctcccaactgtacagacatgagtaatgtttgtcaaccaacagagttcatctcccgacacaacattgagggtatcttcacttttgtggatcaccgctgtgtggctactgttggctaccagccacaggaactcttaggaaagaatattgtagaattctgtcatcctgaagaccagcagcttctaagagacagcttccaacaggtagtgaaattaaaaggccaagtgctgtctgtcatgttccggttccggtctaagaaccaagaatggctctggatgagaaccagctcctttactttccagaacccttactcagatgaaattgagtacatcatctgtaccaacaccaatgtgaagaactctagccaagaaccacggcctacactctccaacacaatccagaggccacaactaggtcccacagctaatttacccctggagatgggctcaggacagctggcacccaggcagcagcaacagcaaacagaattggacatggtaccaggaagagatggactggccagctacaatcattcccaggtggttcagcctgtgacaaccacaggaccagaacacagcaagccccttgagaagtcagatggtttatttgcccaggatagagatccaagattttcagaaatctatcacaacatcaatgcggatcagagtaaaggcatctcctccagcactgtccctgccacccaacagctattctcccagggcaacacattccctcctaccccccggccggcagagaatttcaggaatagtggcctagcccctcctgtaaccattgtccagccatcagcttctgcaggacagatgttggcccagatttcccgccactccaaccccacccaaggagcaaccccaacttggacccctactacccgctcaggcttttctgcccagcaggtggctacccaggctactgctaagactcgtacttcccagtttggtgtgggcagctttcagactccatcctccttcagctccatgtccctccctggtgccccaactgcatcgcctggtgctgctgcctaccctagtctcaccaatcgtggatctaactttgctcctgagactggacagactgcaggacaattccagacacggacagcagagggtgtgggtgtctggccacagtggcagggccagcagcctcatcatcgttcaagttctagtgagcaacatgttcaacaaccgccagcacagcaacctggccagcctgaggtcttccaggagatgctgtccatgctgggagatcagagcaacagctacaacaatgaagaattccctgatctaactatgtttccccccttttcagaatagaactattggggtgaggataaggggtgggggagaaaaaatcactgtttgtttttgcttttccttcagggttttatttttgactgttttgttttcttgttggccatttctgtattgctggcatctgtgctaagctttacagtggcaaaaataatgacatgtagcaaagattttcaaacaaaatattttttccttttgtaaaatttcttgtgttgtgtgatcttgattgcggctttatcattcctttccagttcataaacaacaggcacccacaaccagaggaatctatagtttaagctccagacatacaaacataaggcacattgtgtctttaatttcaggaatcagaaatcatagggttctgatcacattgcacgcctcccccctcacttgtcctcctgatcctgacacattctgagtaacatcagcaggaatgctctgaccatgaggtgggggttttggggtgggcgttgcctgggttcttgggagagaggggaagagtcgggacttgaaaaccactagggcacatctggatgccttcccccagtatgtccttttctggattaaaatgagtgaaatttaaactgttcaagtc

SEQ ID NO: 314653 - DNA, 2168 bp, Homo sapiens
cggcccagtgatcttgaaccccaaaggccagaactggagcctcagtccagagaattctgagaaaattaaagcagagaggaggggagagatcactgggaccaggccgtgatctctatgcccgagtctcaaccctcaactgtcaccccaaggcacttgggacgtcctggacagaccgagtcccgggaagccccagcactgccgctgccacactgccctgagcccaaatgggggagtgagaggccatagctgtctggcatgggcctctccaccgtgcctgacctgctgctgccactggtgctcctggagctgttggtgggaatatacccctcaggggttattggactggtccctcacctaggggacagggagaagagagatagtgtgtgtccccaaggaaaatatatccaccctcaaaataattcgatttgctgtaccaagtgccacaaaggaacctacttgtacaatgactgtccaggcccggggcaggatacggactgcagggagtgtgagagcggctccttcaccgcttcagaaaaccacctcagacactgcctcagctgctccaaatgccgaaaggaaatgggtcaggtggagatctcttcttgcacagtggaccgggacaccgtgtgtggctgcaggaagaaccagtaccggcattattggagtgaaaaccttttccagtgcttcaattgcagcctctgcctcaatgggaccgtgcacctctcctgccaggagaaacagaacaccgtgtgcacctgccatgcaggtttctttctaagagaaaacgagtgtgtctcctgtagtaactgtaagaaaagcctggagtgcacgaagttgtgcctaccccagattgagaatgttaagggcactgaggactcaggcaccacagtgctgttgcccctggtcattttctttggtctttgccttttatccctcctcttcattggtttaatgtatcgctaccaacggtggaagtccaagctctactccattgtttgtgggaaatcgacacctgaaaaagagggggagcttgaaggaactactactaagcccctggccccaaacccaagcttcagtcccactccaggcttcacccccaccctgggcttcagtcccgtgcccagttccaccttcacctccagctccacctatacccccggtgactgtcccaactttgcggctccccgcagagaggtggcaccaccctatcagggggctgaccccatccttgcgacagccctcgcctccgaccccatccccaacccccttcagaagtgggaggacagcgcccacaagccacagagcctagacactgatgaccccgcgacgctgtacgccgtggtggagaacgtgcccccgttgcgctggaaggaattcgtgcggcgcctagggctgagcgaccacgagatcgatcggctggagctgcagaacgggcgctgcctgcgcgaggcgcaatacagcatgctggcgacctggaggcggcgcacgccgcggcgcgaggccacgctggagctgctgggacgcgtgctccgcgacatggacctgctgggctgcctggaggacatcgaggaggcgctttgcggccccgccgccctcccgcccgcgcccagtcttctcagatgaggctgcgcccctgcgggcagctctaaggaccgtcctgcgagatcgccttccaaccccacttttttctggaaaggaggggtcctgcaggggcaagcaggagctagcagccgcctacttggtgctaacccctcgatgtacatagcttttctcagctgcctgcgcgccgccgacagtcagcgctgtgcgcgcggagagaggtgcgccgtgggctcaagagcctgagtgggtggtttgcgaggatgagggacgctatgcctcatgcccgttttgggtgtcctcaccagcaaggctgctcgggggcccctggttcgtccctgagcctttttcacagtgcataagcagttttttttgtttttgttttgttttgttttgtttttaaatcaatcatgttacactaatagaaacttggcactcctgtgccctctgcctggacaagcacatagcaagctgaactgtcctaaggcaggggcgagcacggaacaatggggccttcagctggagctgtggacttttgtacatacactaaaattctgaagttaaagctc

SEQ ID NO: 314654 - DNA, 2027 bp, Homo sapiens
gctgttgcaacactgcctcactcttcccctcccaccttctctcccctcctctctgctttaattttctcagaattctctggactgaggctccagttctggcctttggggttcaagatcactgggaccaggccgtgatctctatgcccgagtctcaaccctcaactgtcaccccaaggcacttgggacgtcctggacagaccgagtcccgggaagccccagcactgccgctgccacactgccctgagcccaaatgggggagtgagaggccatagctgtctggcatgggcctctccaccgtgcctgacctgctgctgccactggtgctcctggagctgttggtgggaatatacccctcaggggttattggactggtccctcacctaggggacagggagaagagagatagtgtgtgtccccaaggaaaatatatccaccctcaaaataattcgatttgctgtaccaagtgccacaaaggaacctacttgtacaatgactgtccaggcccggggcaggatacggactgcagggagtgtgagagcggctccttcaccgcttcagaaaaccacctcagacactgcctcagctgctccaaatgccgaaaggaaatgggtcaggtggagatctcttcttgcacagtggaccgggacaccgtgtgtggctgcaggaagaaccagtaccggcattattggagtgaaaaccttttccagtgcttcaattgcagcctctgcctcaatgggaccgtgcacctctcctgccaggagaaacagaacaccgtgtgcacctgccatgcaggtttctttctaagagaaaacgagtgtgtctcctgtagtaactgtaagaaaagcctggagtgcacgaagttgtgcctaccccagattgagaatgttaagggcactgaggactcaggcaccacagtgctgttgcccctggtcattttctttggtctttgccttttatccctcctcttcattggtttaatgtatcgctaccaacggtggaagtccaagctctactccattgtttgtgggaaatcgacacctgaaaaagagagaggtggcaccaccctatcagggggctgaccccatccttgcgacagccctcgcctccgaccccatccccaacccccttcagaagtgggaggacagcgcccacaagccacagagcctagacactgatgaccccgcgacgctgtacgccgtggtggagaacgtgcccccgttgcgctggaaggaattcgtgcggcgcctagggctgagcgaccacgagatcgatcggctggagctgcagaacgggcgctgcctgcgcgaggcgcaatacagcatgctggcgacctggaggcggcgcacgccgcggcgcgaggccacgctggagctgctgggacgcgtgctccgcgacatggacctgctgggctgcctggaggacatcgaggaggcgctttgcggccccgccgccctcccgcccgcgcccagtcttctcagatgaggctgcgcccctgcgggcagctctaaggaccgtcctgcgagatcgccttccaaccccacttttttctggaaaggaggggtcctgcaggggcaagcaggagctagcagccgcctacttggtgctaacccctcgatgtacatagcttttctcagctgcctgcgcgccgccgacagtcagcgctgtgcgcgcggagagaggtgcgccgtgggctcaagagcctgagtgggtggtttgcgaggatgagggacgctatgcctcatgcccgttttgggtgtcctcaccagcaaggctgctcgggggcccctggttcgtccctgagcctttttcacagtgcataagcagttttttttgtttttgttttgttttgttttgtttttaaatcaatcatgttacactaatagaaacttggcactcctgtgccctctgcctggacaagcacatagcaagctgaactgtcctaaggcaggggcgagcacggaacaatggggccttcagctggagctgtggacttttgtacatacactaaaattctgaagttaaagctc

SEQ ID NO: 314655 - DNA, 2239 bp, Homo sapiens
gctgttgcaacactgcctcactcttcccctcccaccttctctcccctcctctctgctttaattttctcagaattctctggactgaggctccagttctggcctttggggttcaagatcactgggaccaggccgtgatctctatgcccgagtctcaaccctcaactgtcaccccaaggcacttgggacgtcctggacagaccgagtcccgggaagccccagcactgccgctgccacactgccctgagcccaaatgggggagtgagaggccatagctgtctggcatgggcctctccaccgtgcctgacctgctgctgccactggtgctcctggagctgttggtgggaatatacccctcaggggttattggactggtccctcacctaggggacagggagaagagagatagtgtgtgtccccaaggaaaatatatccaccctcaaaataattcgatttgctgtaccaagtgccacaaaggaacctacttgtacaatgactgtccaggcccggggcaggatacggactgcagggagtgtgagagcggctccttcaccgcttcagaaaaccacctcagacactgcctcagctgctccaaatgccgaaaggaaatgggtcaggtggagatctcttcttgcacagtggaccgggacaccgtgtgtggctgcaggaagaaccagtaccggcattattggagtgaaaaccttttccagtgcttcaattgcagcctctgcctcaatgggaccgtgcacctctcctgccaggagaaacagaacaccgtgtgcacctgccatgcaggtttctttctaagagaaaacgagtgtgtctcctgtagtaaagtcctgctctgtcgcccaggctggaatgcagtggcgcgatctcggctcactgcaacctctgcctcccagattcaagcaattctcctgcttcagcctcccaagtagctgggattacagggcaccacagtgctgttgcccctggtcattttctttggtctttgccttttatccctcctcttcattggtttaatgtatcgctaccaacggtggaagtccaagctctactccattgtttgtgggaaatcgacacctgaaaaagagggggagcttgaaggaactactactaagcccctggccccaaacccaagcttcagtcccactccaggcttcacccccaccctgggcttcagtcccgtgcccagttccaccttcacctccagctccacctatacccccggtgactgtcccaactttgcggctccccgcagagaggtggcaccaccctatcagggggctgaccccatccttgcgacagccctcgcctccgaccccatccccaacccccttcagaagtgggaggacagcgcccacaagccacagagcctagacactgatgaccccgcgacgctgtacgccgtggtggagaacgtgcccccgttgcgctggaaggaattcgtgcggcgcctagggctgagcgaccacgagatcgatcggctggagctgcagaacgggcgctgcctgcgcgaggcgcaatacagcatgctggcgacctggaggcggcgcacgccgcggcgcgaggccacgctggagctgctgggacgcgtgctccgcgacatggacctgctgggctgcctggaggacatcgaggaggcgctttgcggccccgccgccctcccgcccgcgcccagtcttctcagatgaggctgcgcccctgcgggcagctctaaggaccgtcctgcgagatcgccttccaaccccacttttttctggaaaggaggggtcctgcaggggcaagcaggagctagcagccgcctacttggtgctaacccctcgatgtacatagcttttctcagctgcctgcgcgccgccgacagtcagcgctgtgcgcgcggagagaggtgcgccgtgggctcaagagcctgagtgggtggtttgcgaggatgagggacgctatgcctcatgcccgttttgggtgtcctcaccagcaaggctgctcgggggcccctggttcgtccctgagcctttttcacagtgcataagcagttttttttgtttttgttttgttttgttttgtttttaaatcaatcatgttacactaatagaaacttggcactcctgtgccctctgcctggacaagcacatagcaagctgaactgtcctaaggcaggggcgagcacggaacaatggggccttcagctggagctgtggacttttgtacatacactaaaattctgaagttaaagctc

SEQ ID NO: 314656 - DNA, 3113 bp, Homo sapiens
gctgttgcaacactgcctcactcttcccctcccaccttctctcccctcctctctgctttaattttctcagaattctctggactgaggctccagttctggcctttggggttcaagatcactgggaccaggccgtgatctctatgcccgagtctcaaccctcaactgtcaccccaaggcacttgggacgtcctggacagaccgagtcccgggaagccccagcactgccgctgccacactgccctgagcccaaatgggggagtgagaggccatagctgtctggcatgggcctctccaccgtgcctgacctgctgctgccactggtgctcctggagctgttggtgggaatatacccctcaggggttattggactggtccctcacctaggggacagggagaagagagatagtgtgtgtccccaaggaaaatatatccaccctcaaaataattcgatttgctgtaccaagtgccacaaaggaacctacttgtacaatgactgtccaggcccggggcaggatacggactgcagggagtgtgagagcggctccttcaccgcttcagaaaaccacctcagacactgcctcagctgctccaaatgccgaaaggaaatgggtcaggtggagatctcttcttgcacagtggaccgggacaccgtgtgtggctgcaggaagaaccagtaccggcattattggagtgaaaaccttttccagtgcttcaattgcagcctctgcctcaatgggaccgtgcacctctcctgccaggagaaacagaacaccgtgtgcacctgccatgcaggtttctttctaagagaaaacgagtgtgtctcctgtagtaactgtaagaaaagcctggagtgcacgaagttgtgcctaccccagattgagaatgttaagggcactgaggactcaggcaccacagtgctgttgcccctggtcattttctttggtctttgccttttatccctcctcttcattggtttaatgtatcgctaccaacggtggaagtccaagctctactccattgtttgtgggaaatcgacacctgaaaaagagggggagcttgaaggaactactactaagcccctggccccaaacccaagcttcagtcccactccaggcttcacccccaccctgggcttcagtcccgtgcccagttccaccttcacctccagctccacctatacccccggtgactgtcccaactttgcggctccccgcagagaggtggcaccaccctatcagggggctgaccccatccttgcgacagccctcgcctccgaccccatccccaacccccttcagaagtgggaggacagcgcccacaagccacagagcctagacactgatgaccccgcgacgctgtacgccgtggtggagaacgtgcccccgttgcgctggaaggaattcgtgcggcgcctagggctgagcgaccacgagatcgatcggctggagctgcagaacgggcgctgcctgcgcgaggcgcaatacagcatgctggcgacctggaggcggcgcacgccgcggcgcgaggccacgctggagctgctgggacgcgtgctccgcgacatggacctgctgggctgcctggaggacatcgaggaggcgctttgcggccccgccgccctcccgcccgcgcccagtcttctcagatgaggctgcgcccctgcgggcagctctaaggaccgtcctgcgagatcgccttccaaccccacttttttctggaaaggaggggtcctgcaggggcaagcaggagctagcagccgcctacttggtgctaacccctcgatgtacatagcttttctcagctgcctgcgcgccgccgacagtcagcgctgtgcgcgcggagagaggtgcgccgtgggctcaagagcctgagtgggtggtttgcgaggatgagggacgctatgcctcatgcccgttttgggtgtcctcaccagcaaggctgctcgggggcccctggttcgtccctgagcctttttcacagtgcataagcagttttttttgtttttgttttgttttgttttgtttttaaatcaatcatgttacactaatagaaacttggcactcctgtgccctctgcctggacaagcacatagcaagctgaactgtcctaaggcaggggcgagcacggaacaatggggccttcagctggagctgtggacttttgtacatacactaaaattctgaagttaaagctcaaaaacacaagagaaaaaaaaacatacaaaacagaacagagagaaacaaaataacaaaaataacagaacacgagacgaaaagagacacacagagaacgaggaacccatgataagaacgacagaaaagaacggaaagcagcagaactgatgagaccagagcggatggacacgctgcagaggggacggcggctgagcagtgaccgggcaccagatgtgccatgttggaggaagtgcagagaggaccggagagacaggcctggtgacccacagagccatgtgaaggcataccatggaagcgtaatcagaataatccatagatctccaaatagctgcatagatcaaccccattatacttatgggaaggcataaatggcctgatcactgcagagacggtgtagaggacaaagaactctgagacatttacatgtgaaagggccccagacccttgatgaacaaaagcgcagctcggtgcacagaaaatgggaagaaacacgaggtacgggcgggactccaggatgggatggaaaccggtggatcatatcccagttagcaaagaagccttcacaaggttcgaaatcttaacttgggagattccaggatccgtatagcaaagtggttcaagtctaaaaaacaagacgcatatggcctaggaggcccatggaacacaaaggaagaccacttgagtcgcattaagagacgcctcggtgccccccataagggagaaaaccaattttaagagggtttgaacagcgtggccctaaggcgacccatggggaacaattcgaattccaaggcaacattaagacagtttcacaaggcccatgcgaacttggcctacactgggaacattgggagaccaaaaagtgcgataacaagagtaaggaaaataggaccaatatgaacacagaaaacccccctg

SEQ ID NO: 314657 - DNA, 2229 bp, Homo sapiens
gctgttgcaacactgcctcactcttcccctcccaccttctctcccctcctctctgctttaattttctcagaattctctggactgaggctccagttctggcctttggggttcaagatcactgggaccaggccgtgatctctatgcccgagtctcaaccctcaactgtcaccccaaggcacttgggacgtcctggacagaccgagtcccgggaagccccagcactgccgctgccacactgccctgagcccaaatgggggagtgagaggccatagctgtctggcatgggcctctccaccgtgcctgacctgctgctgccactggtgctcctggagctgttggtgggaatatacccctcaggggttattggactggtccctcacctaggggacagggagaagagagatagtgtgtgtccccaaggaaaatatatccaccctcaaaataattcgatttgctgtaccaagtgccacaaaggaacctacttgtacaatgactgtccaggcccggggcaggatacggactgcagggagtgtgagagcggctccttcaccgcttcagaaaaccacctcagacactgcctcagctgctccaaatgccgaaaggaaatgggtcaggtggagatctcttcttgcacagtggaccgggacaccgtgtgtggctgcaggaagaaccagtaccggcattattggagtgaaaaccttttccagtgcttcaattgcagcctctgcctcaatgggaccgtgcacctctcctgccaggagaaacagaacaccgtgtgcacctgccatgcaggtttctttctaagagaaaacgagtgtgtctcctgtagtaactgtaagaaaagcctggagtgcacgaagttgtgcctaccccagattgagaatgttaagggcactgaggactcaggcaccacagtgctgttgcccctggtcattttctttggtctttgccttttatccctcctcttcattggtttaatgtatcgctaccaacggtggaagtccaagctctactccattgtttgtgggaaatcgacacctgaaaaagagggggagcttgaaggaactactactaagcccctggccccaaacccaagcttcagtcccactccaggcttcacccccaccctgggcttcagtcccgtgcccagttccaccttcacctccagctccacctatacccccggtgactgtcccaactttgcggctccccgcagagaggtggcaccaccctatcagggggctgaccccatccttgcgacagccctcgcctccgaccccatccccaacccccttcagaagtgggaggacagcgcccacaagccacagagcctagacactgatgaccccgcgacgctgtacgccgtggtggagaacgtgcccccgttgcgctggaaggaattcgtgcggcgcctagggctgagcgaccacgagatcgatcggctggagctgcagaacgggcgctgcctgcgcgaggcgcaatacagcatgctggcgacctggaggcggcgcacgccgcggcgcgaggccacgctggagctgctgggacgcgtgctccgcgacatggacctgctgggctgcctggaggacatcgaggaggcgctttgcggccccgccgccctcccgcccgcgcccagtcttctcagatgaggctgcgcccctgcgggcagctctaaggaccgtcctgcgagatcgccttccaaccccacttttttctggaaaggaggggtcctgcaggggcaagcaggagctagcagccgcctacttggtgctaacccctcgatgtacatagcttttctcagctgcctgcgcgccgccgacagtcagcgctgtgcgcgcggagagaggtgcgccgtgggctcaagagcctgagtgggtggtttgcgaggatgagggacgctatgcctcatgcccgttttgggtgtcctcaccagcaaggctgctcgggggcccctggttcgtccctgagcctttttcacagtgcataagcagttttttttgtttttgttttgttttgttttgtttttaaatcaatcatgttacactaatagaaacttggcactcctgtgccctctgcctggacaagcacatagcaagctgaactgtcctaaggcaggggcgagcacggaacaatggggccttcagctggagctgtggacttttgtacatacactaaaattctgaagttaaagctcaaacaacacacaaacaaaaaaaaaaaaaaaacaaa

SEQ ID NO: 314658 - DNA, 2317 bp, Homo sapiens
gctgttgcaacactgcctcactcttcccctcccaccttctctcccctcctctctgctttaattttctcagaattctctggactgaggctccagttctggcctttggggttcaagatcactgggaccaggccgtgatctctatgcccgagtctcaaccctcaactgtcaccccaaggcacttgggacgtcctggacagaccgagtcccgggaagccccagcactgccgctgccacactgccctgagcccaaatgggggagtgagaggccatagctgtctggcatgggcctctccaccgtgcctgacctgctgctgccactggtgctcctggagctgttggtgggaatatacccctcaggggttattggactggtccctcacctaggggacagggagaagagagatagtgtgtgtccccaaggaaaatatatccaccctcaaaataattcgatttgctgtaccaagtgccacaaaggaacctacttgtacaatgactgtccaggcccggggcaggatacggactgcagggagtgtgagagcggctccttcaccgcttcagaaaaccacctcagacactgcctcagctgctccaaatgccgaaaggaaatgggtcaggtggagatctcttcttgcacagtggaccgggacaccgtgtgtggctgcaggaagaaccagtaccggcattattggagtgaaaaccttttccagtgcttcaattgcagcctctgcctcaatgggaccgtgcacctctcctgccaggagaaacagaacaccgtgtgcacctgccatgcaggtttctttctaagagaaaacgagtgtgtctcctgtagtaactgtaagaaaagcctggagtgcacgaagttgtgcctaccccagattgagaatgttaagggcactgaggactcaggcaccacagtgctgttgcccctggtcattttctttggtctttgccttttatccctcctcttcattggtttaatgtatcgctaccaacggtggaagtccaagctctactccattgtttgtgggaaatcgacacctgaaaaagagggggagcttgaaggaactactactaagcccctggccccaaacccaagcttcagtcccactccaggcttcacccccaccctgggcttcagtcccgtgcccagttccaccttcacctccagctccacctatacccccggtgactgtcccaactttgcggctccccgcagagaggtggcaccaccctatcagggggctgaccccatccttgcgacagccctcgcctccgaccccatccccaacccccttcagaagtgggaggacagcgcccacaagccacagagcctagacactgatgaccccgcgacgctgtacgccgtggtggagaacgtgcccccgttgcgctggaaggaattcgtgcggcgcctagggctgagcgaccacgagatcgatcggctggagctgcagaacgggcgctgcctgcgcgaggcgcaatacagcatgctggcgacctggaggcggcgcacgccgcggcgcgaggccacgctggagctgctgggacgcgtgctccgcgacatggacctgctgggctgcctggaggacatcgaggaggcgctttgcggccccgccgccctcccgcccgcgcccagtcttctcagatgaggctgcgcccctgcgggcagctctaaggaccgtcctgcgagatcgccttccaaccccacttttttctggaaaggaggggtcctgcaggggcaagcaggagctagcagccgcctacttggtgctaacccctcgatgtacatagcttttctcagctgcctgcgcgccgccgacagtcagcgctgtgcgcgcggagagaggtgcgccgtgggctcaagagcctgagtgggtggtttgcgaggatgagggacgctatgcctcatgcccgttttgggtgtcctcaccagcaaggctgctcgggggcccctggttcgtccctgagcctttttcacagtgcataagcagttttttttgtttttgttttgttttgttttgtttttaaatcaatcatgttacactaatagaaacttggcactcctgtgccctctgcctggacaagcacatagcaagctgaactgtcctaaggcaggggcgagcacggaacaatggggccttcagctggagctgtggacttttgtacatacactaaaattctgaagttaaagctcaaaaaaaaaaaaaaaagatatgcggccgcctatcttttttttttttttttttttttttttttttcccccccggaattttcccttcttattattttgcttttttaaagggggtttttttcaggg

SEQ ID NO: 314659 - DNA, 2106 bp, Homo sapiens
gctgttgcaacactgcctcactcttcccctcccaccttctctcccctcctctctgctttaattttctcagaattctctggactgaggctccagttctggcctttggggttcaagatcactgggaccaggccgtgatctctatgcccgagtctcaaccctcaactgtcaccccaaggcacttgggacgtcctggacagaccgagtcccgggaagccccagcactgccgctgccacactgccctgagcccaaatgggggagtgagaggccatagctgtctggcatgggcctctccaccgtgcctgacctgctgctgccactggtgctcctggagctgttggtgggaatatacccctcaggggttattggactggtccctcacctaggggacagggagaagagagatagtgtgtgtccccaaggaaaatatatccaccctcaaaataattcgatttgctgtaccaagtgccacaaaggaacctacttgtacaatgactgtccaggcccggggcaggatacggactgcagggagtgtgagagcggctccttcaccgcttcagaaaaccacctcagacactgcctcagctgctccaaatgccgaaaggaaatgggtcaggtggagatctcttcttgcacagtggaccgggacaccgtgtgtggctgcaggaagaaccagtaccggcattattggagtgaaaaccttttccagtgcttcaattgcagcctctgcctcaatgggaccgtgcacctctcctgccaggagaaacagaacaccgtgtgcacctgccatgcaggtttctttctaagagaaaacgagtgtgtctcctgtagtaactgtaagaaaagcctggagtgcacgaagttgtgcctaccccagattgagaatgttaagggcactgaggactcaggcaccacagtgctgttgcccctggtcattttctttggtctttgccttttatccctcctcttcattggtttaatgtatcgctaccaacggtggaagtccaagctctactccattgtttgtgggaaatcgacacctgaaaaagagggggagcttgaaggaactactactaagcccctggccccaaacccaagcttcagtcccactccaggcttcacccccaccctgggcttcagtcccgtgcccagttccaccttcacctccagctccacctatacccccggtgactgtcccaactttgcggctccccgcagagaggtggcaccaccctatcagggggctgaccccatccttgcgacagccctcgcctccgaccccatccccaacccccttcagaagtgggaggacagcgcccacaagccacagagcctagacactgatgaccccgcgacgctgtacgccgtggtggagaacgtgcccccgttgcgctggaaggaattcgtgcggcgcctagggctgagcgaccacgagatcgatcggctggagctgcagaacgggcgctgcctgcgcgaggcgcaatacagcatgctggcgacctggaggcggcgcacgccgcggcgcgaggccacgctggagctgctgggacgcgtgctccgcgacatggacctgctgggctgcctggaggacatcgaggaggcgctttgcggccccgccgccctcccgcccgcgcccagtcttctcagatgaggctgcgcccctgcgggcagctctaaggaccgtcctgcgagatcgccttccaaccccacttttttctggaaaggaggggtcctgcaggggcaagcaggagctagcagccgcctacttggtgctaacccctcgatgtacatagcttttctcagctgcctgcgcgccgccgacagtcagcgctgtgcgcgcggagagaggtgcgccgtgggctcaagagcctgagtgggtggtttgcgaggatgagggacgctatgcctcatgcccgttttgggtgtcctcaccagcaaggctgctcgggggcccctggttcgtccctgagcctttttcacagtgcataagcagttttttttgtttttgttttgttttgttttgtttttaaatcaatcatggaacaatggggccttcagctggagctgtggacttttgtacatacactaaaattctgaagttaaagctc

SEQ ID NO: 314660 - DNA, 1828 bp, Homo sapiens
  misc_feature (1759)..(1759): n is a, c, g, or t
  misc_feature (1782)..(1782): n is a, c, g, or t
  misc_feature (1823)..(1823): n is a, c, g, or t
gctgttgcaacactgcctcactcttcccctcccaccttctctcccctcctctctgctttaattttctcagaattctctggactgaggctccagttctggcctttggggttcaagatcactgggaccaggccgtgatctctatgcccgagtctcaaccctcaactgtcaccccaaggcacttgggacgtcctggacagaccgagtcccgggaagccccagcactgccgctgccacactgccctgagcccaaatgggggagtgagaggccatagctgtctggcatgggcctctccaccgtgcctgacctgctgctgccactggtgctcctggagctgttggtgggaatatacccctcaggggttattggactggtccctcacctaggggacagggagaagagagatagtgtgtgtccccaaggaaaatatatccaccctcaaaataattcgatttgctgtaccaagtgccacaaaggaacctacttgtacaatgactgtccaggcccggggcaggatacggactgcagggagtgtgagagcggctccttcaccgcttcagaaaaccacctcagacactgcctcagctgctccaaatgccgaaaggaaatgggtcaggtggagatctcttcttgcacagtggaccgggacaccgtgtgtggctgcaggaagaaccagtaccggcattattggagtgaaaaccttttccagtgcttcaattgcagcctctgcctcaatgggaccgtgcacctctcctgccaggagaaacagaacaccgtgtgcacctgccatgcaggtttctttctaagagaaaacgagtgtgtctcctgtagtaactgtaagaaaagcctggagtgcacgaagttgtgcctaccccagattgagaatgttaagggcactgaggactcaggcaccacagtgctgttgcccctggtcattttctttggtctttgccttttatccctcctcttcattggtttaatgtatcgctaccaacggtggaagtccaagctctactccattgtttgtgggaaatcgacacctgaaaaagagggggagcttgaaggaactactactaagcccctggccccaaacccaagcttcagtcccactccaggcttcacccccaccctgggcttcagtcccgtgcccagttccaccttcacctccagctccacctatacccccggtgactgtcccaactttgcggctccccgcagagaggtggcaccaccctatcagggggctgaccccatccttgcgacagccctcgcctccgaccccatccccaacccccttcagaagtgggaggacagcgcccacaagccacagagcctagacactgatgaccccgcgacgctgtacgccgtggtggagaacgtgcccccgttgcgctggaaggaattcgtgcggcgcctagggctgagcgaccacgagatcgatcggctggagctgcagaacgggcgctgcctgcgcgaggcgcaatacagcatgctggcgacctggaggcggcgcacgccgcggcgcgaggccacgctggagctgctgggacgcgtgctccgcgacatggacctgctgggctgcctggaggacatcgaggaggcgctttgcggccccgccgccctcccgcccgcgcccagtcttctcagatgaggctgcgcccctgcgggcagctctaaggaccgtcctgcgagatcgccttccaaccccacttttttctggggaaaagggaaggggttccttggcaagggggccaaagccanggaaaccttagccaagccccggnccttaactttgggggggccttaaacccccctttggaatggnaccca

SEQ ID NO: 314661 - DNA, 1338 bp, Homo sapiens
gctgttgcaacactgcctcactcttcccctcccaccttctctcccctcctctctgctttaattttctcagaattctctggactgaggctccagttctggcctttggggttcaagatcactgggaccaggccgtgatctctatgcccgagtctcaaccctcaactgtcaccccaaggcacttgggacgtcctggacagaccgagtcccgggaagccccagcactgccgctgccacactgccctgagcccaaatgggggagtgagaggccatagctgtctggcatgggcctctccaccgtgccttcacctccagctccacctatacccccggtgactgtcccaactttgcggctccccgcagagaggtggcaccaccctatcagggggctgaccccatccttgcgacagccctcgcctccgaccccatccccaacccccttcagaagtgggaggacagcgcccacaagccacagagcctagacactgatgaccccgcgacgctgtacgccgtggtggagaacgtgcccccgttgcgctggaaggaattcgtgcggcgcctagggctgagcgaccacgagatcgatcggctggagctgcagaacgggcgctgcctgcgcgaggcgcaatacagcatgctggcgacctggaggcggcgcacgccgcggcgcgaggccacgctggagctgctgggacgcgtgctccgcgacatggacctgctgggctgcctggaggacatcgaggaggcgctttgcggccccgccgccctcccgcccgcgcccagtcttctcagatgaggctgcgcccctgcgggcagctctaaggaccgtcctgcgagatcgccttccaaccccacttttttctggaaaggaggggtcctgcaggggcaagcaggagctagcagccgcctacttggtgctaacccctcgatgtacatagcttttctcagctgcctgcgcgccgccgacagtcagcgctgtgcgcgcggagagaggtgcgccgtgggctcaagagcctgagtgggtggtttgcgaggatgagggacgctatgcctcatgcccgttttgggtgtcctcaccagcaaggctgctcgggggcccctggttcgtccctgagcctttttcacagtgcataagcagttttttttgtttttgttttgttttgttttgtttttaaatcaatcatgttacactaatagaaacttggcactcctgtgccctctgcctggacaagcacatagcaagctgaactgtcctaaggcaggggcgagcacggaacaatggggccttcagctggagctgtggacttttgtacatacactaaaattctgaagttaaagctc

SEQ ID NO: 314662 - DNA, 1175 bp, Homo sapiens
gctgttgcaacactgcctcactcttcccctcccaccttctctcccctcctctctgctttaattttctcagaattctctggactgaggctccagttctggcctttggggttcaagatcactgggaccaggccgtgatctctatgcccgagtctcaaccctcaactgtcaccccaaggcacttgggacgtcctggacagaccgagtcccgggaagccccagcactgccgctgccacactgccctgagcccaaatgggggagtgagaggccatagctgtctggcatgggcctctccaccgtgcctgacctgctgctgccactggtgctcctggagctgttggtgggaatatacccctcaggggttattggactggtccctcacctaggggacagggagaagagagatagtgtgtgtccccaaggaaaatatatccaccctcaaaataattcgatttgctgtaccaagtgccacaaaggaacctacttgtacaatgactgtccaggcccggggcaggatacggactgcagggagtgtgagagcggctccttcaccgcttcagaaaaccacctcagacactgcctcagctgctccaaatgccgaaaggaaatgggtcaggtggagatctcttcttgcacagtggaccgggacaccgtgtgtggctgcaggaagaaccagtaccggcattattggagtgaaaaccttttccagtgcttcaattgcagcctctgcctcaatgggaccgtgcacctctcctgccaggagaaacagaacaccgtgtgcacctgccatgcaggtttctttctaagagaaaacgagtgtgtctcctgtagtaactgtaagaaaagcctggagtgcacgaagttgtgcctaccccagattgagaatgttaagggcactgaggactcaggcaccacagtgctgttgcccctggtcattttctttggtctttgcctttttcacagtgcataagcagttttttttgtttttgttttgttttgttttgtttttaaatcaatcatgttacactaatagaaacttggcactcctgtgccctctgcctggacaagcacatagcaagctgaactgtcctaaggcaggggcgagcacggaacaatggggccttcagctggagctgtggacttttgtacatacactaaaattctgaagttaaagctc

SEQ ID NO: 314663 - DNA, 2094 bp, Homo sapiens
gctgttgcaacactgcctcactcttcccctcccaccttctctcccctcctctctgctttaattttctcagaattctctggactgaggctccagttctggcctttggggttcaagatcactgggaccaggccgtgatctctatgcccgagtctcaaccctcaactgtcaccccaaggcacttgggacgtcctggacagaccgagtcccgggaagccccagcactgccgctgccacactgccctgagcccaaatgggggagtgagaggccatagctgtctggcatgggcctctccaccgtgcctgacctgctgctgccactggtgctcctggagctgttggtgggaatatacccctcaggggttattggactggtccctcacctaggggacagggagaagagagatagtgtgtgtccccaaggaaaatatatccaccctcaaaataattcgatttgctgtaccaagtgccacaaaggaacctacttgtacaatgactgtccaggcccggggcaggatacggactgcagggagtgtgagagcggctccttcaccgcttcagaaaaccacctcagacactgcctcagctgctccaaatgccgaaaggaaatgggtcaggtggagatctcttcttgcacagtggaccgggacaccgtgtgtggctgcaggaagaaccagtaccggcattattggagtgaaaaccttttccagtgcttcaattgcagcctctgcctcaatgggaccgtgcacctctcctgccaggagaaacagaacaccgtgtgcacctgccatgcaggtttctttctaagagaaaacgagtgtgtctcctgtagtaactgtaagaaaagcctggagtgcacgaagttgtgcctaccccagattgagaatgttaagggcactgaggactcaggcaccacagtgctgttgcccctggtcattttctttggtctttgcctttttcacagtgcataagcagttttttttgtttttgttttgttttgttttgtttttaaatcaatcatgttacactaatagaaacttggcactcctgtgccctctgcctggacaagcacatagcaagctgaactgtcctaaggcaggggcgagcacggaacaatggggccttcagctggagctgtggacttttgtacatacactaaaattctgaagttaaagctcaaaaacacaagagaaaaaaaaacatacaaaacagaacagagagaaacaaaataacaaaaataacagaacacgagacgaaaagagacacacagagaacgaggaacccatgataagaacgacagaaaagaacggaaagcagcagaactgatgagaccagagcggatggacacgctgcagaggggacggcggctgagcagtgaccgggcaccagatgtgccatgttggaggaagtgcagagaggaccggagagacaggcctggtgacccacagagccatgtgaaggcataccatggaagcgtaatcagaataatccatagatctccaaatagctgcatagatcaaccccattatacttatgggaaggcataaatggcctgatcactgcagagacggtgtagaggacaaagaactctgagacatttacatgtgaaagggccccagacccttgatgaacaaaagcgcagctcggtgcacagaaaatgggaagaaacacgaggtacgggcgggactccaggatgggatggaaaccggtggatcatatcccagttagcaaagaagccttcacaaggttcgaaatcttaacttgggagattccaggatccgtatagcaaagtggttcaagtctaaaaaacaagacgcatatggcctaggaggcccatggaacacaaaggaagaccacttgagtcgcattaagagacgcctcggtgccccccataagggagaaaaccaattttaagagggtttgaacagcgtggccctaaggcgacccatggggaacaattcgaattccaaggcaacattaagacagtttcacaaggcccatgcgaacttggcctacactgggaacattgggagaccaaaaagtgcgataacaagagtaaggaaaataggaccaatatgaacacagaaaacccccctg

SEQ ID NO: 314664 - DNA, 175 bp, Homo sapiens
attggagtgaaaaccttttccagtgcttcaattgcagcctctgcctcaatgggaccgtgcacctctcctgtgagcgcagctctcctgaggccaagccctctccccaccccaggggttggccccttccccatgcggtggcacttcctttccttccccctcctgtattctgtgggtc

SEQ ID NO: 314665 - DNA, 371 bp, Homo sapiens
cattttctacacagccttttcaagatccctgccaattctaaaattaaatgattctatgattaactgtgtttcattcttctgcatcagttcccaaaacaaattatatcaagagacagcaaaaatatttgtaaagaaaggatgtccaacaatctgtgtggttgtttttctgtgttcctccaatggtagggcctctgttcaccagtgccgtctcttcttttagctgtaagaaaagcctggagtgcacgaagttgtgcctaccccagattgagaatgttaagggcactgaggactcaggtgaggagaagtgacctggtgcccatgctcacctgccctctccctcttcttgcccccacccgtccatccatcccacc

SEQ ID NO: 314666 - DNA, 2194 bp, Homo sapiens
gctgttgcaacactgcctcactcttcccctcccaccttctctcccctcctctctgctttaattttctcagaattctctggactgaggctccagttctggcctttggggttcaagatcactgggaccaggccgtgatctctatgcccgagtctcaaccctcaactgtcaccccaaggcacttgggacgtcctggacagaccgagtcccgggaagccccagcactgccgctgccacactgccctgagcccaaatgggggagtgagaggccatagctgtctggcatgggcctctccaccgtgcctgacctgctgctgccactggtgctcctggagctgttggtgggaatatacccctcaggggttattggactggtccctcacctaggggacagggagaagagagatagtgtgtgtccccaaggaaaatatatccaccctcaaaataattcgatttgctgtaccaagtgccacaaaggaacctacttgtacaatgactgtccaggcccggggcaggatacggactgcagggagtgtgagagcggctccttcaccgcttcagaaaaccacctcagacactgcctcagctgctccaaatgccgaaaggaaatgggtcaggtggagatctcttcttgcacagtggaccgggacaccgtgtgtggctgcaggaagaaccagtaccggcattattggagtgaaaaccttttccagtgcttcaattgcagcctctgcctcaatgggaccgtgcacctctcctgccaggagaaacagaacaccgtgtgcacctgccatgcaggtttctttctaagagaaaacgagtgtgtctcctgtagtaactgtaagaaaagcctggagtgcacgaagttgtgcctaccccagattgagaatgttaagggcactgaggactcaggcaccacagtgctgttgcccctggtcattttctttggtctttgccttttatccctcctcttcattggtttaatgtatcgctaccaacggtggaagtccaagctctactccattgtttgtgggaaatcgacacctgaaaaagagggggagcttgaaggaactactactaagcccctggccccaaacccaagcttcagtcccactccaggcttcacccccaccctgggcttcagtcccgtgcccagttccaccttcacctccagctccacctatacccccggtgactgtcccaactttgcggctccccgcagagaggtggcaccaccctatcagggggctgaccccatccttgcgacagccctcgcctccgaccccatccccaacccccttcagaagtgggaggacagcgcccacaagccacagagcctagacactgatgaccccgcgacgctgtacgccgtggtggagaacgtgcccccgttgcgctggaaggaattcgtgcggcgcctagggctgagcgaccacgagatcgatcggctggagctgcagaacgggcgctgcctgcgcgaggcgcaatacagcatgctggcgacctggaggcggcgcacgccgcggcgcgaggccacgctggagctgctgggacgcgtgctccgcgacatggacctgctgggctgcctggaggacatcgaggaggcgctttgcggccccgccgccctcccgcccgcgcccagtcttctcagatgaggctgcgcccctgcgggcagctctaaggaccgtcctgcgagatcgccttccaaccccacttttttctggaaaggaggggtcctgcaggggcaagcaggagctagcagccgcctacttggtgctaacccctcgatgtacatagcttttctcagctgcctgcgcgccgccgacagtcagcgctgtgcgcgcggagagaggtgcgccgtgggctcaagagcctgagtgggtggtttgcgaggatgagggacgctatgcctcatgcccgttttgggtgtcctcaccagcaaggctgctcgggggcccctggttcgtccctgagcctttttcacagtgcataagcagttttttttgtttttgttttgttttgttttgtttttaaatcaatcatgttacactaatagaaacttggcactcctgtgccctctgcctggacaagcacatagcaagctgaactgtcctaaggcaggggcgagcacggaacaatggggccttcagctggagctgtggacttttgtacatacactaaaattctgaagttaaagctc

SEQ ID NO: 314667 - DNA, 2331 bp, Homo sapiens
ctggcaggggagataccatgatcacgaaggtggttttcccagggcgaggcttatccattgcactccggatgtgctgacccctgcgatttccccaaatgtgggaaactcgactgcataatttgtggtagtgggggactgcgttcgcgctttcccctgactcttcccctcccaccttctctcccctcctctctgctttaattttctcagaattctctggactgaggctccagttctggcctttggggttcaagatcactgggaccaggccgtgatctctatgcccgagtctcaaccctcaactgtcaccccaaggcacttgggacgtcctggacagaccgagtcccgggaagccccagcactgccgctgccacactgccctgagcccaaatgggggagtgagaggccatagctgtctggcatgggcctctccaccgtgcctgacctgctgctgccactggtgctcctggagctgttggtgggaatatacccctcaggggttattggactggtccctcacctaggggacagggagaagagagatagtgtgtgtccccaaggaaaatatatccaccctcaaaataattcgatttgctgtaccaagtgccacaaaggaacctacttgtacaatgactgtccaggcccggggcaggatacggactgcagggagtgtgagagcggctccttcaccgcttcagaaaaccacctcagacactgcctcagctgctccaaatgccgaaaggaaatgggtcaggtggagatctcttcttgcacagtggaccgggacaccgtgtgtggctgcaggaagaaccagtaccggcattattggagtgaaaaccttttccagtgcttcaattgcagcctctgcctcaatgggaccgtgcacctctcctgccaggagaaacagaacaccgtgtgcacctgccatgcaggtttctttctaagagaaaacgagtgtgtctcctgtagtaactgtaagaaaagcctggagtgcacgaagttgtgcctaccccagattgagaatgttaagggcactgaggactcaggcaccacagtgctgttgcccctggtcattttctttggtctttgccttttatccctcctcttcattggtttaatgtatcgctaccaacggtggaagtccaagctctactccattgtttgtgggaaatcgacacctgaaaaagagggggagcttgaaggaactactactaagcccctggccccaaacccaagcttcagtcccactccaggcttcacccccaccctgggcttcagtcccgtgcccagttccaccttcacctccagctccacctatacccccggtgactgtcccaactttgcggctccccgcagagaggtggcaccaccctatcagggggctgaccccatccttgcgacagccctcgcctccgaccccatccccaacccccttcagaagtgggaggacagcgcccacaagccacagagcctagacactgatgaccccgcgacgctgtacgccgtggtggagaacgtgcccccgttgcgctggaaggaattcgtgcggcgcctagggctgagcgaccacgagatcgatcggctggagctgcagaacgggcgctgcctgcgcgaggcgcaatacagcatgctggcgacctggaggcggcgcacgccgcggcgcgaggccacgctggagctgctgggacgcgtgctccgcgacatggacctgctgggctgcctggaggacatcgaggaggcgctttgcggccccgccgccctcccgcccgcgcccagtcttctcagatgaggctgcgcccctgcgggcagctctaaggaccgtcctgcgagatcgccttccaaccccacttttttctggaaaggaggggtcctgcaggggcaagcaggagctagcagccgcctacttggtgctaacccctcgatgtacatagcttttctcagctgcctgcgcgccgccgacagtcagcgctgtgcgcgcggagagaggtgcgccgtgggctcaagagcctgagtgggtggtttgcgaggatgagggacgctatgcctcatgcccgttttgggtgtcctcaccagcaaggctgctcgggggcccctggttcgtccctgagcctttttcacagtgcataagcagttttttttgtttttgttttgttttgttttgtttttaaatcaatcatgttacactaatagaaacttggcactcctgtgccctctgcctggacaagcacatagcaagctgaactgtcctaaggcaggggcgagcacggaacaatggggccttcagctggagctgtggacttttgtacatacactaaaattctgaagttaaagctc

SEQ ID NO: 314668 - DNA, 2174 bp, Homo sapiens
  misc_feature (3)..(3): n is a, c, g, or t
aantaaaaaaaatttgtaaaaaaagaggtggtacggtccggaattcccgggatgacctggactgaggctccagttctggcctttggggttcaagatcactgggaccaggccgtgatctctatgcccgagtctcaaccctcaactgtcaccccaaggcacttgggacgtcctggacagaccgagtcccgggaagccccagcactgccgctgccacactgccctgagcccaaatgggggagtgagaggccatagctgtctggcatgggcctctccaccgtgcctgacctgctgctgccactggtgctcctggagctgttggtgggaatatacccctcaggggttattggactggtccctcacctaggggacagggagaagagagatagtgtgtgtccccaaggaaaatatatccaccctcaaaataattcgatttgctgtaccaagtgccacaaaggaacctacttgtacaatgactgtccaggcccggggcaggatacggactgcagggagtgtgagagcggctccttcaccgcttcagaaaaccacctcagacactgcctcagctgctccaaatgccgaaaggaaatgggtcaggtggagatctcttcttgcacagtggaccgggacaccgtgtgtggctgcaggaagaaccagtaccggcattattggagtgaaaaccttttccagtgcttcaattgcagcctctgcctcaatgggaccgtgcacctctcctgccaggagaaacagaacaccgtgtgcacctgccatgcaggtttctttctaagagaaaacgagtgtgtctcctgtagtaactgtaagaaaagcctggagtgcacgaagttgtgcctaccccagattgagaatgttaagggcactgaggactcaggcaccacagtgctgttgcccctggtcattttctttggtctttgccttttatccctcctcttcattggtttaatgtatcgctaccaacggtggaagtccaagctctactccattgtttgtgggaaatcgacacctgaaaaagagggggagcttgaaggaactactactaagcccctggccccaaacccaagcttcagtcccactccaggcttcacccccaccctgggcttcagtcccgtgcccagttccaccttcacctccagctccacctatacccccggtgactgtcccaactttgcggctccccgcagagaggtggcaccaccctatcagggggctgaccccatccttgcgacagccctcgcctccgaccccatccccaacccccttcagaagtgggaggacagcgcccacaagccacagagcctagacactgatgaccccgcgacgctgtacgccgtggtggagaacgtgcccccgttgcgctggaaggaattcgtgcggcgcctagggctgagcgaccacgagatcgatcggctggagctgcagaacgggcgctgcctgcgcgaggcgcaatacagcatgctggcgacctggaggcggcgcacgccgcggcgcgaggccacgctggagctgctgggacgcgtgctccgcgacatggacctgctgggctgcctggaggacatcgaggaggcgctttgcggccccgccgccctcccgcccgcgcccagtcttctcagatgaggctgcgcccctgcgggcagctctaaggaccgtcctgcgagatcgccttccaaccccacttttttctggaaaggaggggtcctgcaggggcaagcaggagctagcagccgcctacttggtgctaacccctcgatgtacatagcttttctcagctgcctgcgcgccgccgacagtcagcgctgtgcgcgcggagagaggtgcgccgtgggctcaagagcctgagtgggtggtttgcgaggatgagggacgctatgcctcatgcccgttttgggtgtcctcaccagcaaggctgctcgggggcccctggttcgtccctgagcctttttcacagtgcataagcagttttttttgtttttgttttgttttgttttgtttttaaatcaatcatgttacactaatagaaacttggcactcctgtgccctctgcctggacaagcacatagcaagctgaactgtcctaaggcaggggcgagcacggaacaatggggccttcagctggagctgtggacttttgtacatacactaaaattctgaagttaaagctc

SEQ ID NO: 314669 - DNA, 2313 bp, Homo sapiens
gctgttgcaacactgcctcactcttcccctcccaccttctctcccctcctctctgctttaattttctcagaattctctggactgaggctccagttctggcctttggggttcaagatcactgggaccaggccgtgatctctatgcccgagtctcaaccctcaactgtcaccccaaggcacttgggacgtcctggacagaccgagtcccgggaagccccagcactgccgctgccacactgccctgagcccaaatgggggagtgagaggccatagctgtctggcatgggcctctccaccgtgcctgacctgctgctgccactggtgctcctggagctgttggtgggaatatacccctcaggggttattggactggtccctcacctaggggacagggagaagagagatagtgtgtgtccccaaggaaaatatatccaccctcaaaataattcgatttgctgtaccaagtgccacaaaggaacctacttgtacaatgactgtccaggcccggggcaggatacggactgcagggagtgtgagagcggctccttcaccgcttcagaaaaccacctcagacactgcctcagctgctccaaatgccgaaaggaaatgggtcaggtggagatctcttcttgcacagtggaccgggacaccgtgtgtggctgcaggaagaaccagtaccggcattattggagtgaaaaccttttccagtgcttcaattgcagcctctgcctcaatgggaccgtgcacctctcctgccaggagaaacagaacaccgtgtgcacctgccatgcaggtttctttctaagagaaaacgagtgtgtctcctgtagtaaagtcctgctctgtcgcccaggctggaatgcagtggcgcgatctcggctcactgcaacctctgcctcccagattcaagcaattctcctgcttcagcctcccaagtagctgggattacaggctgtaagaaaagcctggagtgcacgaagttgtgcctaccccagattgagaatgttaagggcactgaggactcaggcaccacagtgctgttgcccctggtcattttctttggtctttgccttttatccctcctcttcattggtttaatgtatcgctaccaacggtggaagtccaagctctactccattgtttgtgggaaatcgacacctgaaaaagagggggagcttgaaggaactactactaagcccctggccccaaacccaagcttcagtcccactccaggcttcacccccaccctgggcttcagtcccgtgcccagttccaccttcacctccagctccacctatacccccggtgactgtcccaactttgcggctccccgcagagaggtggcaccaccctatcagggggctgaccccatccttgcgacagccctcgcctccgaccccatccccaacccccttcagaagtgggaggacagcgcccacaagccacagagcctagacactgatgaccccgcgacgctgtacgccgtggtggagaacgtgcccccgttgcgctggaaggaattcgtgcggcgcctagggctgagcgaccacgagatcgatcggctggagctgcagaacgggcgctgcctgcgcgaggcgcaatacagcatgctggcgacctggaggcggcgcacgccgcggcgcgaggccacgctggagctgctgggacgcgtgctccgcgacatggacctgctgggctgcctggaggacatcgaggaggcgctttgcggccccgccgccctcccgcccgcgcccagtcttctcagatgaggctgcgcccctgcgggcagctctaaggaccgtcctgcgagatcgccttccaaccccacttttttctggaaaggaggggtcctgcaggggcaagcaggagctagcagccgcctacttggtgctaacccctcgatgtacatagcttttctcagctgcctgcgcgccgccgacagtcagcgctgtgcgcgcggagagaggtgcgccgtgggctcaagagcctgagtgggtggtttgcgaggatgagggacgctatgcctcatgcccgttttgggtgtcctcaccagcaaggctgctcgggggcccctggttcgtccctgagcctttttcacagtgcataagcagttttttttgtttttgttttgttttgttttgtttttaaatcaatcatgttacactaatagaaacttggcactcctgtgccctctgcctggacaagcacatagcaagctgaactgtcctaaggcaggggcgagcacggaacaatggggccttcagctggagctgtggacttttgtacatacactaaaattctgaagttaaagctc

SEQ ID NO: 314670 - DNA, 2227 bp, Homo sapiens
acgccattctcctgcttcagcctcccgagtagctgggactacaggtgaccgccaccacgcctggctaatttttttgtatttttagtagagacggggtttcactgtgttagccaggatggtctcaatctcctgacctggtgatccatcagcctcggcctcccaaagtgctgggactacaggcatgagccaccgtgcccagaatgggaactcggtcagaggtgcacactctgaccgagtcccgggaagccccagcactgccgctgccacactgccctgagcccaaatgggggagtgagaggccatagctgtctggcatgggcctctccaccgtgcctgacctgctgctgccactggtgctcctggagctgttggtgggaatatacccctcaggggttattggactggtccctcacctaggggacagggagaagagagatagtgtgtgtccccaaggaaaatatatccaccctcaaaataattcgatttgctgtaccaagtgccacaaaggaacctacttgtacaatgactgtccaggcccggggcaggatacggactgcagggagtgtgagagcggctccttcaccgcttcagaaaaccacctcagacactgcctcagctgctccaaatgccgaaaggaaatgggtcaggtggagatctcttcttgcacagtggaccgggacaccgtgtgtggctgcaggaagaaccagtaccggcattattggagtgaaaaccttttccagtgcttcaattgcagcctctgcctcaatgggaccgtgcacctctcctgccaggagaaacagaacaccgtgtgcacctgccatgcaggtttctttctaagagaaaacgagtgtgtctcctgtagtaactgtaagaaaagcctggagtgcacgaagttgtgcctaccccagattgagaatgttaagggcactgaggactcaggcaccacagtgctgttgcccctggtcattttctttggtctttgccttttatccctcctcttcattggtttaatgtatcgctaccaacggtggaagtccaagctctactccattgtttgtgggaaatcgacacctgaaaaagagggggagcttgaaggaactactactaagcccctggccccaaacccaagcttcagtcccactccaggcttcacccccaccctgggcttcagtcccgtgcccagttccaccttcacctccagctccacctatacccccggtgactgtcccaactttgcggctccccgcagagaggtggcaccaccctatcagggggctgaccccatccttgcgacagccctcgcctccgaccccatccccaacccccttcagaagtgggaggacagcgcccacaagccacagagcctagacactgatgaccccgcgacgctgtacgccgtggtggagaacgtgcccccgttgcgctggaaggaattcgtgcggcgcctagggctgagcgaccacgagatcgatcggctggagctgcagaacgggcgctgcctgcgcgaggcgcaatacagcatgctggcgacctggaggcggcgcacgccgcggcgcgaggccacgctggagctgctgggacgcgtgctccgcgacatggacctgctgggctgcctggaggacatcgaggaggcgctttgcggccccgccgccctcccgcccgcgcccagtcttctcagatgaggctgcgcccctgcgggcagctctaaggaccgtcctgcgagatcgccttccaaccccacttttttctggaaaggaggggtcctgcaggggcaagcaggagctagcagccgcctacttggtgctaacccctcgatgtacatagcttttctcagctgcctgcgcgccgccgacagtcagcgctgtgcgcgcggagagaggtgcgccgtgggctcaagagcctgagtgggtggtttgcgaggatgagggacgctatgcctcatgcccgttttgggtgtcctcaccagcaaggctgctcgggggcccctggttcgtccctgagcctttttcacagtgcataagcagttttttttgtttttgttttgttttgttttgtttttaaatcaatcatgttacactaatagaaacttggcactcctgtgccctctgcctggacaagcacatagcaagctgaactgtcctaaggcaggggcgagcacggaacaatggggccttcagctggagctgtggacttttgtacatacactaaaattctgaagttaaagctc

SEQ ID NO: 314671 - DNA, 2859 bp, Homo sapiens
gctgttgcaacactgcctcactcttcccctcccaccttctctcccctcctctctgctttaattttctcagaattctctggactgaggctccagttctggcctttggggttcaagatcactgggaccaggccgtgatctctatgcccgagtctcaaccctcaactgtcaccccaaggcacttgggacgtcctggacagaccgagtcccgggaagccccagcactgccgctgccacactgccctgagcccaaatgggggagtgagaggccatagctgtctggcatgggcctctccaccgtgcctgacctgctgctgccactggtgctcctggagctgttggtgggaatatacccctcaggggttattggactggtccctcacctaggggacagggagaagagagatagtgtgtgtccccaaggaaaatatatccaccctcaaaataattcgatttgctgtaccaagtgccacaaaggaacctacttgtacaatgactgtccaggcccggggcaggatacggactgcagggagtgtgagagcggctccttcaccgcttcagaaaaccacctcagacactgcctcagctgctccaaatgccgaaaggaaatgggtcaggtggagatctcttcttgcacagtggaccgggacaccgtgtgtggctgcaggaagaaccagtaccggcattattggagtgaaaaccttttccagtgcttcaattgcagcctctgcctcaatgggaccgtgcacctctcctgccaggagaaacagaacaccgtgtgcacctgccatgcaggtttctttctaagagaaaacgagtgtgtctcctgtagtaactgtaagaaaagcctggagtgcacgaagttgtgcctaccccagattgagaatgttaagggcactgaggactcaggcaccacagtgctgttgcccctggtcattttctttggtctttgccttttatccctcctcttcattggtttaatgtatcgctaccaacggtggaagtccaagctctactccattgtttgtgggaaatcgacacctgaaaaagagggggagcttgaaggaactactactaagcccctggccccaaacccaagcttcagtcccactccaggcttcacccccaccctgggcttcagtcccgtgcccagttccaccttcacctccagctccacctatacccccggtgactgtcccaactttgcggctccccgcagagaggtggcaccaccctatcagggggctgaccccatccttgcgacagccctcgcctccgaccccatccccaacccccttcagaagtgggaggacagcgcccacaagccacagagcctagacactgatgaccccgcgacgctgtacgccgtggtggagaacgtgcccccgttgcgctggaaggaattcgtgcggcgcctagggctgagcgaccacgagatcgatcggctggagctgcagaacgggcgctgcctgcgcgaggcgcaatacagcatgctggcgacctggaggcggcgcacgccgcggcgcgaggccacgctggagctgctgggacgcgtgctccgcgacatggacctgctgggctgcctggaggacatcgaggaggcgctttgcggccccgccgccctcccgcccgcgcccagtcttctcagatgaggctgcgcccctgcgggcagctctaaggaccgtcctgcgagatcgccttccaaccccacttttttctggaaaggaggggtcctgcaggggcaagcaggagctagcagccgcctacttggtgctaacccctcgatgtacatagcttttctcagctgcctgcgcgccgccgacagtcagcgctgtgcgcgcggagagaggtgcgccgtgggctcaagagcctgagtgggtggtttgcgaggatgagggacgctatgcctcatgcccgttttgggtgtcctcaccagcaaggctgctcgggggcccctggttcgtccctgagcctttttcacagtgcataagcagttttttttgtttttgttttgttttgttttgtttttaaatcaatcatgttacactaatagaaacttggcactcctgtgccctctgcctggacaagcacatagcaagctgaactgtcctaaggcaggggcgagcacggaacaatggggccttcagctggagctgtggacttttgtacatacactaaaattctgaagttaaagctcaaaaaaaaaaaaaaaaaaaaaaaaaaactgtgttgtgggccgcgccccgcgcgccccctggaaaaagttttttaaacccttctgcgttgtggggcgcgcgcgggcgccccagttgggttagtgtgtgaacactgtgttggccccaagcgcggcgtgtttccccaggaggagaaaaccgcgggccgagaattggtgtggcgttgggtttctccccccacttaaaaaaacgcgcgcggggggacacccgagccgcggtcctggaacccaatcttccaggagggaggtctccgaggagggacagatacgcgggagtctctacccaacaacggtgagaggccccaacgcaaagcgcccaagaaatatctataaatttaaacggccccccgccccgtgggaggaaaaaaccaagcacagaagagagacacaagaaacgaagacaagacgaacgacaccagacagagaagaagcagaacagacaacgagagaagagcaaaacacaaagaacacgaaagaacgaaagcaacgaaggagcgaagaacgaacaaagagaccagaaggaaaacaacagagaaaggaaggagaagagaagagaagaaggaagcaagaaagaaggacaaaaaaaacaagaacaaacaacacacaaacaaaaaaaaaaaaaaaacaaa

SEQ ID NO: 314672 - DNA, 2419 bp, Homo sapiens
gctgttgcaacactgcctcactcttcccctcccaccttctctcccctcctctctgctttaattttctcagaattctctggactgaggctccagttctggcctttggggttcaagatcactgggaccaggccgtgatctctatgcccgagtctcaaccctcaactgtcaccccaaggcacttgggacgtcctggacagaccgagtcccgggaagccccagcactgccgctgccacactgccctgagcccaaatgggggagtgagaggccatagctgtctggcatgggcctctccaccgtgcctgacctgctgctgccactggtgctcctggagctgttggtgggaatatacccctcaggggttattggactggtccctcacctaggggacagggagaagagagatagtgtgtgtccccaaggaaaatatatccaccctcaaaataattcgatttgctgtaccaagtgccacaaaggtaggggcaagtggaaacggtgaatgccctcaggtctggggtgctgcttctttctctgcttcttccagttgttcttccctaactttgctgtctctcctgggctgggattttctccctccctcctctcctagagacttcagggaatcggccctggctgttgtccctagcatggggctccttccttgtgttctcacccgcagcctaactctgcggccccattcacaggaacctacttgtacaatgactgtccaggcccggggcaggatacggactgcagggagtgtgagagcggctccttcaccgcttcagaaaaccacctcagacactgcctcagctgctccaaatgccgaaaggaaatgggtcaggtggagatctcttcttgcacagtggaccgggacaccgtgtgtggctgcaggaagaaccagtaccggcattattggagtgaaaaccttttccagtgcttcaattgcagcctctgcctcaatgggaccgtgcacctctcctgccaggagaaacagaacaccgtgtgcacctgccatgcaggtttctttctaagagaaaacgagtgtgtctcctgtagtaactgtaagaaaagcctggagtgcacgaagttgtgcctaccccagattgagaatgttaagggcactgaggactcaggcaccacagtgctgttgcccctggtcattttctttggtctttgccttttatccctcctcttcattggtttaatgtatcgctaccaacggtggaagtccaagctctactccattgtttgtgggaaatcgacacctgaaaaagagggggagcttgaaggaactactactaagcccctggccccaaacccaagcttcagtcccactccaggcttcacccccaccctgggcttcagtcccgtgcccagttccaccttcacctccagctccacctatacccccggtgactgtcccaactttgcggctccccgcagagaggtggcaccaccctatcagggggctgaccccatccttgcgacagccctcgcctccgaccccatccccaacccccttcagaagtgggaggacagcgcccacaagccacagagcctagacactgatgaccccgcgacgctgtacgccgtggtggagaacgtgcccccgttgcgctggaaggaattcgtgcggcgcctagggctgagcgaccacgagatcgatcggctggagctgcagaacgggcgctgcctgcgcgaggcgcaatacagcatgctggcgacctggaggcggcgcacgccgcggcgcgaggccacgctggagctgctgggacgcgtgctccgcgacatggacctgctgggctgcctggaggacatcgaggaggcgctttgcggccccgccgccctcccgcccgcgcccagtcttctcagatgaggctgcgcccctgcgggcagctctaaggaccgtcctgcgagatcgccttccaaccccacttttttctggaaaggaggggtcctgcaggggcaagcaggagctagcagccgcctacttggtgctaacccctcgatgtacatagcttttctcagctgcctgcgcgccgccgacagtcagcgctgtgcgcgcggagagaggtgcgccgtgggctcaagagcctgagtgggtggtttgcgaggatgagggacgctatgcctcatgcccgttttgggtgtcctcaccagcaaggctgctcgggggcccctggttcgtccctgagcctttttcacagtgcataagcagttttttttgtttttgttttgttttgttttgtttttaaatcaatcatgttacactaatagaaacttggcactcctgtgccctctgcctggacaagcacatagcaagctgaactgtcctaaggcaggggcgagcacggaacaatggggccttcagctggagctgtggacttttgtacatacactaaaattctgaagttaaagctc

SEQ ID NO: 314673 - DNA, 2345 bp, Homo sapiens
gctgttgcaacactgcctcactcttcccctcccaccttctctcccctcctctctgctttaattttctcagaattctctggactgaggctccagttctggcctttggggttcaagatcactgggaccaggccgtgatctctatgcccgagtctcaaccctcaactgtcaccccaaggcacttgggacgtcctggacagaccgagtcccgggaagccccagcactgccgctgccacactgccctgagcccaaatgggggagtgagaggccatagctgtctggcatgggcctctccaccgtgcctgacctgctgctgccactggtgctcctggagctgttggtgggaatatacccctcaggggttattggactggtccctcacctaggggacagggagaagagagatagtgtgtgtccccaaggaaaatatatccaccctcaaaataattcgatttgctgtaccaagtgccacaaaggtaggggcaagtggaaacggtgaatgccctcaggtctggggtgctgcttctttctctgcttcttccagttgttcttccctaactttgctgtctctcctgggctgggattttctccctccctcctctcctagagacttcagggaatcggccctggctgttgtccctagcatggggctccttccttgtgttctcacccgcagcctaactctgcggccccattcacaggaacctacttgtacaatgactgtccaggcccggggcaggatacggactgcagggagtgtgagagcggctccttcaccgcttcagaaaaccacctcagacactgcctcagctgctccaaatgccgaaaggaaatgggtcaggtggagatctcttcttgcacagtggaccgggacaccgtgtgtggctgcaggaagaaccagtaccggcattattggagtgaaaaccttttccagtgcttcaattgcagcctctgcctcaatgggaccgtgcacctctcctgccaggagaaacagaacaccgtgtgcacctgccatgcaggtttctttctaagagaaaacgagtgtgtctcctgtagtaagcaccacagtgctgttgcccctggtcattttctttggtctttgccttttatccctcctcttcattggtttaatgtatcgctaccaacggtggaagtccaagctctactccattgtttgtgggaaatcgacacctgaaaaagagggggagcttgaaggaactactactaagcccctggccccaaacccaagcttcagtcccactccaggcttcacccccaccctgggcttcagtcccgtgcccagttccaccttcacctccagctccacctatacccccggtgactgtcccaactttgcggctccccgcagagaggtggcaccaccctatcagggggctgaccccatccttgcgacagccctcgcctccgaccccatccccaacccccttcagaagtgggaggacagcgcccacaagccacagagcctagacactgatgaccccgcgacgctgtacgccgtggtggagaacgtgcccccgttgcgctggaaggaattcgtgcggcgcctagggctgagcgaccacgagatcgatcggctggagctgcagaacgggcgctgcctgcgcgaggcgcaatacagcatgctggcgacctggaggcggcgcacgccgcggcgcgaggccacgctggagctgctgggacgcgtgctccgcgacatggacctgctgggctgcctggaggacatcgaggaggcgctttgcggccccgccgccctcccgcccgcgcccagtcttctcagatgaggctgcgcccctgcgggcagctctaaggaccgtcctgcgagatcgccttccaaccccacttttttctggaaaggaggggtcctgcaggggcaagcaggagctagcagccgcctacttggtgctaacccctcgatgtacatagcttttctcagctgcctgcgcgccgccgacagtcagcgctgtgcgcgcggagagaggtgcgccgtgggctcaagagcctgagtgggtggtttgcgaggatgagggacgctatgcctcatgcccgttttgggtgtcctcaccagcaaggctgctcgggggcccctggttcgtccctgagcctttttcacagtgcataagcagttttttttgtttttgttttgttttgttttgtttttaaatcaatcatgttacactaatagaaacttggcactcctgtgccctctgcctggacaagcacatagcaagctgaactgtcctaaggcaggggcgagcacggaacaatggggccttcagctggagctgtggacttttgtacatacactaaaattctgaagttaaagctc

SEQ ID NO: 314674 - DNA, 1043 bp, Homo sapiens
gctgttgcaacactgcctcactcttcccctcccaccttctctcccctcctctctgctttaattttctcagaattctctggactgaggctccagttctggcctttggggttcaagatcactgggaccaggccgtgatctctatgcccgagtctcaaccctcaactgtcaccccaaggcacttgggacgtcctggacagaccgagtcccgggaagccccagcactgccgctgccacactgccctgagcccaaatgggggagtgagaggccatagctgtctggcatgggcctctccaccgtgcctgacctgctgctgccactggtgctcctggagctgttggtgggaatatacccctcaggggttattggactggtccctcacctaggggacagggagaagagagatagtgtgtgtccccaaggaaaatatatccaccctcaaaataattcgatttgctgtaccaagtgccacaaaggaacctacttgtacaatgactgtccaggcccggggcaggatacggactgcagggagtgtgagagcggctccttcaccgcttcagaaaaccacctcagacactgcctcagctgctccaaatgccgaaaggaaatgggtcaggtggagatctcttcttgcacagtggaccgggacaccgtgtgtggctgcaggaagaaccagtaccggcattattggagtgaaaaccttttccagtgcttcaattgcagcctctgcctcaatgggaccgtgcacctctcctgccaggagaaacagaacaccgtgtgcacctgccatgcaggtttctttctaagagaaaacgagtgtgtctcctgtagtaactgtaagaaaagcctggagtgcacgaagttgtgcctaccccagattgagaatgttaagggcactgaggactcaggcaccacagtgctgttgcccctggtcattttctttggtctttgccttttatccctcctcttcattggtttaatgtatcgctaccaacggtggaagtccaagctctactccattggtgagtgggggctttgggaggga

SEQ ID NO: 314675 - DNA, 1740 bp, Homo sapiens
gctgttgcaacactgcctcactcttcccctcccaccttctctcccctcctctctgctttaattttctcagaattctctggactgaggctccagttctggcctttggggttcaagatcactgggaccaggccgtgatctctatgcccgagtctcaaccctcaactgtcaccccaaggcacttgggacgtcctggacagaccgagtcccgggaagccccagcactgccgctgccacactgccctgagcccaaatgggggagtgagaggccatagctgtctggcatgggcctctccaccgtgcctgacctgctgctgccactggtgctcctggagctgttggtgggaatatacccctcaggggttattggactggtccctcacctaggggacagggagaagagagatagtgtgtgtccccaaggaaaatatatccaccctcaaaataattcgatttgctgtaccaagtgccacaaaggaacctacttgtacaatgactgtccaggcccggggcaggatacggactgcagggagtgtgagagcggctccttcaccgcttcagaaaaccacctcagacactgcctcagctgctccaaatgccgaaaggaaatgggtcaggtggagatctcttcttgcacagtggaccgggacaccgtgtgtggctgcaggaagaaccagtaccggcattattggagtgaaaaccttttccagtgcttcaattgcagcctctgcctcaatgggaccgtgcacctctcctgccaggagaaacagaacaccgtgtgcacctgccatgcaggtttctttctaagagaaaacgagtgtgtctcctgtagtaaagtcctgctctgtcgcccaggctggaatgcagtggcgcgatctcggctcactgcaacctctgcctcccagattcaagcaattctcctgcttcagcctcccaagtagctgggattacaggacgtgccaccatgcctggctaatttttgtatttttagtagagatggggtttcaccatcttggtcaggctggtctcaaactcctggtgatccacctgcctctgcctcccaaagtgctgggattacagccgtgagccactgcacccagccggcttcatctcttcttgaaatcacttttataccattctatgtggttctcaccatgagcttgagtggtgggctaaagtgcctctccctgctttcagcttcctgctgggaactcactctctcaagttccttccagcaccaccccatagagttcccatcactccacactgtccagtgacaactcccaacatggaagatctgctagttctacagggtgctctctggctgccccagtaacatgtgtttttaaatttttcacatgcatgtttgaccccgactccccgaagtcaggtactgtaactagcagtgtcatttaagaaaaagccctttaacctctctttgccaaaggattcttatcagcaaaacagtgatgaaacaacaatcccataacagctagctggctaccttctcaagcacttattaaatgaggcataatgattttgcttaatcctcaatcctgagaggtgggcgatccctgtggtgatgaggaaaccgaggcttgggggttaatggcttgcctagattcacactgctagccaaggaatgaactggaatttacaccctgaccctgactgcttttcacattttctacacagccttttcaagatccctgccaattctaaaattaaatgattctatgatta

SEQ ID NO: 314676 - DNA, 351 bp, Homo sapiens
cgtcgacggaaatagtgtgtttgcttaggagtgtttactgtctggtaactactgtgctaagccctttcctgttgcctgccatccctgctgcgagcagggacaagctgggtgctcactcatggcatcttatctgttgcagatagtccactgtgtgcagaggcatgggagttgtcatgttgggaacatgctagacctcagtatccttgaggtaagatctctggttcattctctggaatgttggttccttgtatctagtacagttctgtacatgttcccaggggctttggggttggtgtaggggagctgagaggtgagatgagaatggcactgtgggtcgacgcggccgcgtgt

SEQ ID NO: 314677 - DNA, 709 bp, Homo sapiens
cgtcgacggaaatagtgtgtttgcttaggagtgtttactgtctggtaactactgtgctaagccctttcctgttgcctgccatccctgctgcgagcagggacaagctgggtgctcactcatggcatcttatctgttgcagatagtccactgtgtgcagaggcatgggagttgtcatgttgggaacatgctagacctcagtatccttgagggatgctgccttgggtctggaaactgttagaggaaaccccaagaggtgcaggcactgagcctctcaggacaatgacctggggtcccagctcccctggaggggcctcctcatgattgtttgggggttgatcacagaccaagagtgacgagtgatgtcaccctgtgactcatggccggaccttcttgcccctattgtctcagcacaacattattcgacttttccctcagcgtgggtgggcagaggaaaagccctgtggctctggggacttgggatccagagttgaagacccttcagctggctctgccctgccagtgccacagagtgccatggcccaggaagacaggttttcttccatctaggccaggccatccagtggccatcctccgtgtcctcccgcctcctcctggtgtgacttctgaaaaccaagaatttgttcctgttgactttttctgtgctatggaccattgtcctctcacccactcaataaatcttgaaacatgc

SEQ ID NO: 314678 - DNA, 1524 bp, Homo sapiens
gtatttccgcgggcgctgagcactagagagagcgtcttgtggctgcggcctgcccctcagcctcctccgcgcggttacccctgtacccgccgccatccgtcctggcgctccggatgagtcaatgaggggcagggcccgaggagtggtcttcccaagaacccctggtggcctcccaaggccggtgctgtgtacctcctccccgacaaaaggggaaactgaggccccgaggggagtgggaagagccggctggacgtcaggcccagccgctggtgcagtggtccgtcccctctgccggggtgggcccctcgggtttcgcgtgtcctcgggaaagagactggcgggtgagccgcgccctcggccttcgctgggctaagccgaccccatgcagacgtcaaacccccctaggtcggcacagcctctctgcggggaggcttagtgcccccttgagaaacggcttggcaacgctgtgcccggggccttgcacgcgggctgaggggggctagagacctcgcgacttttactcccccgaccccgatctccgactcctgactttggaagcccccaaagctgcttttcggttgcctacaaagtgtcggtcattgtgccacgtccttggaaccgtgaactcattttctcctcaataacctttaaaaagtagctgtaaaacctccattttacagaccagttggctgaggtttaaatggaggacgctcccagggccccagaggggcgaatttccagactcctttgccaggaccttgtactaagccccttccctacgcttttccctgcctaggcctcgtgggctgtgcggctatcctggagacagatgacagctctcccttggatggctttgctggttccgcaccagccagcgcccccatttttcctgcagcaccctgatctgcactccctgaggggctcccactgtccgcggtgtgaggatgtccctggatagtccactgtgtgcagaggcatgggagttgtcatgttgggaacatgctagacctcagtatccttgagggatgctgccttgggtctggaaactgttagaggaaaccccaagaggtgcaggcactgagcctctcaggacaatgacctggggtcccagctcccctggaggggcctcctcatgattgtttgggggttgatcacagaccaagagtgacgagtgatgtcaccctgtgactcatggccggaccttcttgcccctattgtctcagcacaacattattcgacttttccctcagcgtgggtgggcagaggaaaagccctgtggctctggggacttgggatccagagttgaagacccttcagctggctctgccctgccagtgccacagagtgccatggcccaggaagacaggttttcttccatctaggccaggccatccagtggccatcctccgtgtcctcccgcctcctcctggtgtgacttctgaaaaccaagaatttgttcctgttgactttttctgtgctatggaccattgtcctctcacccactcaataaatcttgaaacatgc

SEQ ID NO: 314679 - DNA, 1688 bp, Homo sapiens
gtatttccgcgggcgctgagcactagagagagcgtcttgtggctgcggcctgcccctcagcctcctccgcgcggttacccctgtacccgccgccatccgtcctggcgctccggatgagtcaatgaggggcagggcccgaggagtggtcttcccaagaacccctggtggcctcccaaggccggtgctgtgtacctcctccccgacaaaaggggaaactgaggccccgaggggagtgggaagagccggctggacgtcaggcccagccgctggtgcagtggtccgtcccctctgccggggtgggcccctcgggtttcgcgtgtcctcgggaaagagactggcgggtgagccgcgccctcggccttcgctgggctaagccgaccccatgcagacgtcaaacccccctaggtcggcacagcctctctgcggggaggcttagtgcccccttgagaaacggcttggcaacgctgtgcccggggccttgcacgcgggctgaggggggctagagacctcgcgacttttactcccccgaccccgatctccgactcctgactttggaagcccccaaagctgcttttcggttgcctacaaagtgtcggtcattgtgccacgtccttggaaccgtgaactcattttctcctcaataacctttaaaaagtagctgtaaaacctccattttacagaccagttggctgaggtttaaatggaggacgctcccagggccccagaggggcgaatttccagactcctttgccaggaccttgtactaagccccttccctacgcttttccctgcctaggcctcgtgggctgtgcggctatcctggagacagatgacagctctcccttggatggctttgctggttccgcaccagccagcgcccccatttttcctgcagcaccctgatctgcactccctgaggggctcccactgtccgcggtgtgaggatgtccctggaaattggtcttctgtgactttcttgatgggggcagatgagatctttgtactgcattaagtggatagcgctcaggtcctttgggcttggcgctttggcaatctccaggcagctcactttggcctctgttcctggatcccctttgctcttttctgcgcctgcattcatagtccactgtgtgcagaggcatgggagttgtcatgttgggaacatgctagacctcagtatccttgagggatgctgccttgggtctggaaactgttagaggaaaccccaagaggtgcaggcactgagcctctcaggacaatgacctggggtcccagctcccctggaggggcctcctcatgattgtttgggggttgatcacagaccaagagtgacgagtgatgtcaccctgtgactcatggccggaccttcttgcccctattgtctcagcacaacattattcgacttttccctcagcgtgggtgggcagaggaaaagccctgtggctctggggacttgggatccagagttgaagacccttcagctggctctgccctgccagtgccacagagtgccatggcccaggaagacaggttttcttccatctaggccaggccatccagtggccatcctccgtgtcctcccgcctcctcctggtgtgacttctgaaaaccaagaatttgttcctgttgactttttctgtgctatggaccattgtcctctcacccactcaataaatcttgaaacatgc

SEQ ID NO: 314680 - DNA, 1233 bp, Homo sapiens
gtatttccgcgggcgctgagcactagagagagcgtcttgtggctgcggcctgcccctcagcctcctccgcgcggttacccctgtacccgccgccatccgtcctggcgctccggatgagtcaatgaggggcagggcccgaggagtggtcttcccaagaacccctggtggcctcccaaggccggtgctgtgtacctcctccccgacaaaaggggaaactgaggccccgaggggagtgggaagagccggctggacgtcaggcccagccgctggtgcagtggtccgtcccctctgccggggtgggcccctcgggtttcgcgtgtcctcgggaaagagactggcgggcctcgtgggctgtgcggctatcctggagacagatgacagctctcccttggatggctttgctggttccgcaccagccagcgcccccatttttcctgcagcaccctgatctgcactccctgaggggctcccactgtccgcggtgtgaggatgtccctggaaattggtcttctgtgactttcttgatgggggcagatgagatctttgtactgcattaagtggatagcgctcaggtcctttgggcttggcgctttggcaatctccaggcagctcactttggcctctgttcctggatcccctttgctcttttctgcgcctgcattcatagtccactgtgtgcagaggcatgggagttgtcatgttgggaacatgctagacctcagtatccttgagggatgctgccttgggtctggaaactgttagaggaaaccccaagaggtgcaggcactgagcctctcaggacaatgacctggggtcccagctcccctggaggggcctcctcatgattgtttgggggttgatcacagaccaagagtgacgagtgatgtcaccctgtgactcatggccggaccttcttgcccctattgtctcagcacaacattattcgacttttccctcagcgtgggtgggcagaggaaaagccctgtggctctggggacttgggatccagagttgaagacccttcagctggctctgccctgccagtgccacagagtgccatggcccaggaagacaggttttcttccatctaggccaggccatccagtggccatcctccgtgtcctcccgcctcctcctggtgtgacttctgaaaaccaagaatttgttcctgttgactttttctgtgctatggaccattgtcctctcacccactcaataaatcttgaaacatgc

SEQ ID NO: 314681 - DNA, 1598 bp, Homo sapiens
gtatttccgcgggcgctgagcactagagagagcgtcttgtggctgcggcctgcccctcagcctcctccgcgcggttacccctgtacccgccgccatccgtcctggcgctccggatgagtcaatgaggggcagggcccgaggagtggtcttcccaagaacccctggtggcctcccaaggccggtgctgtgtacctcctccccgacaaaaggggaaactgaggccccgaggggagtgggaagagccggctggacgtcaggcccagccgctggtgcagtggtccgtcccctctgccggggtgggcccctcgggtttcgcgtgtcctcgggaaagagactggcgggtgagccgcgccctcggccttcgctgggctaagccgaccccatgcagacgtcaaacccccctaggtcggcacagcctctctgcggggaggcttagtgcccccttgagaaacggcttggcaacgctgtgcccggggccttgcacgcgggctgaggggggctagagacctcgcgacttttactcccccgaccccgatctccgactcctgactttggaagcccccaaagctgcttttcggttgcctacaaagtgtcggtcattgtgccacgtccttggaaccgtgaactcattttctcctcaataacctttaaaaagtagctgtaaaacctccattttacagaccagttggctgaggtttaaatggaggacgctcccagggccccagaggggcgaatttccagactcctttgccaggaccttgtactaagccccttccctacgcttttccctgcctaggcctcgtgggctgtgcggctatcctggagacagatgacagctctcccttggatggctttgctggttccgcaccagccagcgcccccatttttcctgcagcaccctgatctgcactccctgaggggctcccactgtccgcggtgtgaggatgtccctggatagtccactgtgtgcagaggcatgggagttgtcatgttgggaacatgctagacctcagtatccttgagcttgaagaaagacgacagaacactggagaccaagtacttacagccttctgctctgtggcccctcctcactccagggatgctgccttgggtctggaaactgttagaggaaaccccaagaggtgcaggcactgagcctctcaggacaatgacctggggtcccagctcccctggaggggcctcctcatgattgtttgggggttgatcacagaccaagagtgacgagtgatgtcaccctgtgactcatggccggaccttcttgcccctattgtctcagcacaacattattcgacttttccctcagcgtgggtgggcagaggaaaagccctgtggctctggggacttgggatccagagttgaagacccttcagctggctctgccctgccagtgccacagagtgccatggcccaggaagacaggttttcttccatctaggccaggccatccagtggccatcctccgtgtcctcccgcctcctcctggtgtgacttctgaaaaccaagaatttgttcctgttgactttttctgtgctatggaccattgtcctctcacccactcaataaatcttgaaacatgc

SEQ ID NO: 314682 - DNA, 1609 bp, Homo sapiens
gtatttccgcgggcgctgagcactagagagagcgtcttgtggctgcggcctgcccctcagcctcctccgcgcggttacccctgtacccgccgccatccgtcctggcgctccggatgagtcaatgaggggcagggcccgaggagtggtcttcccaagaacccctggtggcctcccaaggccggtgctgtgtacctcctccccgacaaaaggggaaactgaggccccgaggggagtgggaagagccggctggacgtcaggcccagccgctggtgcagtggtccgtcccctctgccggggtgggcccctcgggtttcgcgtgtcctcgggaaagagactggcgggtgagccgcgccctcggccttcgctgggctaagccgaccccatgcagacgtcaaacccccctaggtcggcacagcctctctgcggggaggcttagtgcccccttgagaaacggcttggcaacgctgtgcccggggccttgcacgcgggctgaggggggctagagacctcgcgacttttactcccccgaccccgatctccgactcctgactttggaagcccccaaagctgcttttcggttgcctacaaagtgtcggtcattgtgccacgtccttggaaccgtgaactcattttctcctcaataacctttaaaaagtagctgtaaaacctccattttacagaccagttggctgaggtttaaatggaggacgctcccagggccccagaggggcgaatttccagactcctttgccaggaccttgtactaagccccttccctacgcttttccctgcctaggcctcgtgggctgtgcggctatcctggagacagatgacagctctcccttggatggctttgctggttccgcaccagccagcgcccccatttttcctgcagcaccctgatctgcactccctgaggggctcccactgtccgcggtgtgaggatgtccctggatagtccactgtgtgcagaggcatgggagttgtcatgttgggaacatgctagacctcagtatccttgagggatgctgccttgggtctggaaactgttagaggaaaccccaagaggtgcaggcactgagcctctcaggacaatgacctggggtcccagctcccctggaggggcctcctcatggtaagtgaatgccaagaggttaagttggcctgtgtttccgaggtggaaattccaggtcgctggcttcatttgtcttctcttttagattgtttgggggttgatcacagaccaagagtgacgagtgatgtcaccctgtgactcatggccggaccttcttgcccctattgtctcagcacaacattattcgacttttccctcagcgtgggtgggcagaggaaaagccctgtggctctggggacttgggatccagagttgaagacccttcagctggctctgccctgccagtgccacagagtgccatggcccaggaagacaggttttcttccatctaggccaggccatccagtggccatcctccgtgtcctcccgcctcctcctggtgtgacttctgaaaaccaagaatttgttcctgttgactttttctgtgctatggaccattgtcctctcacccactcaataaatcttgaaacatgc

SEQ ID NO: 314683 - DNA, 983 bp, Homo sapiens
gtatttccgcgggcgctgagcactagagagagcgtcttgtggctgcggcctgcccctcagcctcctccgcgcggttacccctgtacccgccgccatccgtcctggcgctccggatgagtcaatgaggggcagggcccgaggagtggtcttcccaagaacccctggtggcctcccaaggccggcctcgtgggctgtgcggctatcctggagacagatgacagctctcccttggatggctttgctggttccgcaccagccagcgcccccatttttcctgcagcaccctgatctgcactccctgaggggctcccactgtccgcggtgtgaggatgtccctggatagtccactgtgtgcagaggcatgggagttgtcatgttgggaacatgctagacctcagtatccttgagcttgaagaaagacgacagaacactggagaccaagtacttacagccttctgctctgtggcccctcctcactccagggatgctgccttgggtctggaaactgttagaggaaaccccaagaggtgcaggcactgagcctctcaggacaatgacctggggtcccagctcccctggaggggcctcctcatgattgtttgggggttgatcacagaccaagagtgacgagtgatgtcaccctgtgactcatggccggaccttcttgcccctattgtctcagcacaacattattcgacttttccctcagcgtgggtgggcagaggaaaagccctgtggctctggggacttgggatccagagttgaagacccttcagctggctctgccctgccagtgccacagagtgccatggcccaggaagacaggttttcttccatctaggccaggccatccagtggccatcctccgtgtcctcccgcctcctcctggtgtgacttctgaaaaccaagaatttgttcctgttgactttttctgtgctatggaccattgtcctctcacccactcaataaatcttgaaacatgc

SEQ ID NO: 314684 - DNA, 612 bp, Homo sapiens
ctgattgattaactgggggcattcccattgacatcagcttgaagaaagacgacagaacactggagaccaagtacttacagccttctgctctgtggcccctcctcactccagggatgctgccttgggtctggaaactgttagaggaaaccccaagaggtgcaggcactgagcctctcaggacaatgacctggggtcccagctcccctggaggggcctcctcatgattgtttgggggttgatcacagaccaagagtgacgagtgatgtcaccctgtgactcatggccggaccttcttgcccctattgtctcagcacaacattattcgacttttccctcagcgtgggtgggcagaggaaaagccctgtggctctggggacttgggatccagagttgaagacccttcagctggctctgccctgccagtgccacagagtgccatggcccaggaagacaggttttcttccatctaggccaggccatccagtggccatcctccgtgtcctcccgcctcctcctggtgtgacttctgaaaaccaagaatttgttcctgttgactttttctgtgctatggaccattgtcctctcacccactcaataaatcttgaaacatgc

SEQ ID NO: 314685 - DNA, 1228 bp, Homo sapiens
gtatttccgcgggcgctgagcactagagagagcgtcttgtggctgcggcctgcccctcagcctcctccgcgcggttacccctgtacccgccgccatccgtcctggcgctccggatgagtcaatgaggggcagggcccgaggagtggtcttcccaagaacccctggtggcctcccaaggccggtgctgtgtacctcctccccgacaaaaggggaaactgaggccccgaggggagtgggaagagccggctggacgtcaggcccagccgctggtgcagtggtccgtcccctctgccggggtgggcccctcgggtttcgcgtgtcctcgggaaagagactggcgggcctcgtgggctgtgcggctatcctggagacagatgacagctctcccttggatggctttgctggttccgcaccagccagcgcccccatttttcctgcagcaccctgatctgcactccctgaggggctcccactgtccgcggtgtgaggatgtccctggatagtccactgtgtgcagaggcatgggagttgtcatgttgggaacatgctagacctcagtatccttgagcttgaagaaagacgacagaacactggagaccaagtacttacagccttctgctctgtggcccctcctcactccagggatgctgccttgggtctggaaactgttagaggaaaccccaagaggtgcaggcactgagcctctcaggacaatgacctggggtcccagctcccctggaggggcctcctcatggtaagtgaatgccaagaggttaagttggcctgtgtttccgaggtggaaattccaggtcgctggcttcatttgtcttctcttttagattgtttgggggttgatcacagaccaagagtgacgagtgatgtcaccctgtgactcatggccggaccttcttgcccctattgtctcagcacaacattattcgacttttccctcagcgtgggtgggcagaggaaaagccctgtggctctggggacttgggatccagagttgaagacccttcagctggctctgccctgccagtgccacagagtgccatggcccaggaagacaggttttcttccatctaggccaggccatccagtggccatcctccgtgtcctcccgcctcctcctggtgtgacttctgaaaaccaagaatttgttcctgttgactttttctgtgctatggaccattgtcctctcacccactcaataaatcttgaaacatgc

SEQ ID NO: 314686 - DNA, 1069 bp, Homo sapiens
gtatttccgcgggcgctgagcactagagagagcgtcttgtggctgcggcctgcccctcagcctcctccgcgcggttacccctgtacccgccgccatccgtcctggcgctccggatgagtcaatgaggggcagggcccgaggagtggtcttcccaagaacccctggtggcctcccaaggccggtgctgtgtacctcctccccgacaaaaggggaaactgaggccccgaggggagtgggaagagccggctggacgtcaggcccagccgctggtgcagtggtccgtcccctctgccggggtgggcccctcgggtttcgcgtgtcctcgggaaagagactggcgggcctcgtgggctgtgcggctatcctggagacagatgacagctctcccttggatggctttgctggttccgcaccagccagcgcccccatttttcctgcagcaccctgatctgcactccctgaggggctcccactgtccgcggtgtgaggatgtccctggatagtccactgtgtgcagaggcatgggagttgtcatgttgggaacatgctagacctcagtatccttgagggatgctgccttgggtctggaaactgttagaggaaaccccaagaggtgcaggcactgagcctctcaggacaatgacctggggtcccagctcccctggaggggcctcctcatgattgtttgggggttgatcacagaccaagagtgacgagtgatgtcaccctgtgactcatggccggaccttcttgcccctattgtctcagcacaacattattcgacttttccctcagcgtgggtgggcagaggaaaagccctgtggctctggggacttgggatccagagttgaagacccttcagctggctctgccctgccagtgccacagagtgccatggcccaggaagacaggttttcttccatctaggccaggccatccagtggccatcctccgtgtcctcccgcctcctcctggtgtgacttctgaaaaccaagaatttgttcctgttgactttttctgtgctatggaccattgtcctctcacccactcaataaatcttgaaacatgc

SEQ ID NO: 314687 - DNA, 1143 bp, Homo sapiens
gtatttccgcgggcgctgagcactagagagagcgtcttgtggctgcggcctgcccctcagcctcctccgcgcggttacccctgtacccgccgccatccgtcctggcgctccggatgagtcaatgaggggcagggcccgaggagtggtcttcccaagaacccctggtggcctcccaaggccggtgctgtgtacctcctccccgacaaaaggggaaactgaggccccgaggggagtgggaagagccggctggacgtcaggcccagccgctggtgcagtggtccgtcccctctgccggggtgggcccctcgggtttcgcgtgtcctcgggaaagagactggcgggcctcgtgggctgtgcggctatcctggagacagatgacagctctcccttggatggctttgctggttccgcaccagccagcgcccccatttttcctgcagcaccctgatctgcactccctgaggggctcccactgtccgcggtgtgaggatgtccctggatagtccactgtgtgcagaggcatgggagttgtcatgttgggaacatgctagacctcagtatccttgagcttgaagaaagacgacagaacactggagaccaagtacttacagccttctgctctgtggcccctcctcactccagggatgctgccttgggtctggaaactgttagaggaaaccccaagaggtgcaggcactgagcctctcaggacaatgacctggggtcccagctcccctggaggggcctcctcatgattgtttgggggttgatcacagaccaagagtgacgagtgatgtcaccctgtgactcatggccggaccttcttgcccctattgtctcagcacaacattattcgacttttccctcagcgtgggtgggcagaggaaaagccctgtggctctggggacttgggatccagagttgaagacccttcagctggctctgccctgccagtgccacagagtgccatggcccaggaagacaggttttcttccatctaggccaggccatccagtggccatcctccgtgtcctcccgcctcctcctggtgtgacttctgaaaaccaagaatttgttcctgttgactttttctgtgctatggaccattgtcctctcacccactcaataaatcttgaaacatgc

SEQ ID NO: 314688 - DNA, 826 bp, Homo sapiens
gtatttccgcgggcgctgagcactagagagagcgtcttgtggctgcggcctgcccctcagcctcctccgcgcggttacccctgtacccgccgccatccgtcctggcgctccggatgagtcaatgaggggcagggcccgaggagtggtcttcccaagaacccctggtggcctcccaaggccggtgctgtgtacctcctccccgacaaaaggggaaactgaggccccgaggggagtgggaagagccggctggacgtcaggcccagccgctggtgcagtggtccgtcccctctgccggggtgggcccctcgggtttcgcgtgtcctcgggaaagagactggcgggcctcgtgggctgtgcggctatcctggagacagatgacagctctcccttggatggctttgctggttccgcaccagccagcgcccccatttttcctgcagcaccctgatctgcactccctgaggggctcccactgtccgcggtgtgaggatgtccctggatagtccactgtgtgcagaggcatgggagttgtcatgttgggaacatgctagacctcagtatccttgagggatgctgccttgggtctggaaactgttagaggaaaccccaagaggtgcaggcactgagcctctcaggacaatgacctggggtcccagctcccctggaggggcctcctcatgctaggccaggccatccagtggccatcctccgtgtcctcccgcctcctcctggtgtgacttctgaaaaccaagaatttgttcctgttgactttttctgtgctatggaccattgtcctctcacccactcaataaatcttgaaacatgc

SEQ ID NO: 314689 - DNA, 494 bp, Homo sapiens
cagcctgggccagccccgcttcggcccctcccgggagatccgtgcgcccgaccagcaccagcatcgcggaccgcaaaggccgcccgtcccgtcaaacaagtttcttcttaggctaagaaacgcagtatatacgagtatctctatatatagtactaatggatttggtgtgcttcccccttagcgtccccctccctctgctcctcctccttcagcctggtctccccctcttctctgccctccacccccgtctctgcactgagatacataagaaacaagggtagtttactgtctgttttgttttctgggttttcagtgtcctagcggaatgcaagtaggcagccagcccgtctgttccctctccgccccgccccgccccgcccccgtcactgcgcttctgttataccatctttgcctgactctctccggcttctccattgaatggctaatgtgtatgtgaaataaagaaataaagaaaaacaaacgcgaaaaaaaaa

SEQ ID NO: 314690 - DNA, 454 bp, Homo sapiens
tgcccaggcccgcgcccgcacgcacgcacgcacacggccccgcacacagccccgccccaccccgcaaccagccctgtcgactgccttatacacccgcccccgcgctggccggccgacctagtgccttgttctcacccccgtgctggcggagcggacgccgcgctctgggtcccagaggggccgggtggctcagacgacccacccccgtctctgcactgagatacataagaaacaagggtagtttactgtctgttttgttttctgggttttcagtgtcctagcggaatgcaagtaggcagccagcccgtctgttccctctccgccccgccccgccccgcccccgtcactgcgcttctgttataccatctttgcctgactctctccggcttctccattgaatggctaatgtgtatgtgaaataaagaaataaagaaaaacaaacgcgaaaaaaaaa

SEQ ID NO: 314691 - DNA, 436 bp, Homo sapiens
gcggccgccgcctgccgggcctcccctcgccgcggccggccgccgcgctcccgcccgggcgcccagctatgtactccccgtactgcctcacccaggatgagttccacccgttcatcgaggcactgctgcctcacgtccgcgctttctcctacacctggttcaacctgcaggcgcggaagcgcaagtacttcaagaagcatgaaaagcggatgtcgaaggacgaggagcgggcggtgaaggacgagctgctgggcgagaagcccgagatcaagcagaagcagccagcccgtctgttccctctccgccccgccccgccccgcccccgtcactgcgcttctgttataccatctttgcctgactctctccggcttctccattgaatggctaatgtgtatgtgaaataaagaaataaagaaaaacaaacgcgaaaaaaaaa

SEQ ID NO: 314692 - DNA, 332 bp, Homo sapiens
tgcccaggcccgcgcccgcacgcacgcacgcacacggccccgcacacagccccgccccaccccgcaaccagccctgtcgactgccttatacacccgcccccgcgctggccggccgacctagtgccttgttctcacccccgtgctggcggagcggacgccgcgctctgggtcccagaggggccgggtggctcagacgacccaccactcccccaccctgaccgtgctgaacagacccccccacacgagagaaaataaaggagcaataaagtcacgagaactttcgtcccccaatcgagagcccgaggggcaccccagccccgcctctgctcccc

SEQ ID NO: 314693 - DNA, 2950 bp, Homo sapiens
  misc_feature (53)..(53): n is a, c, g, or t
tggttttataaggggctgcctccaccacgtcgctcttctttctgctctcatcncgtcttcccctcctcccgtcctccctcgccccgcatgtactccccgtactgcctcacccagggatgagttccacccgttcatcgaggcactgctgcctcacgtccgcgctttctcctacacctggttcaacctgcaggcgcggaagcgcaagtacttcaagaagcatgaaaagcggatgtcgaaggacgaggagcgggcggtgaaggacgagctgctgggcgagaagcccgagatcaagcagaagtgggcatcccggctgctggccaagctgcgcaaggacatccggcccgagttccgcgaggacttcgtgctgaccatcacgggcaagaagcccccctgctgcgtgctctccaaccccgaccagaagggcaagatccggcggattgactgcctgcgccaggctgacaaggtgtggcggctggacctggtcatggtgattttgtttaaggggatccccctggaaagtactgatggggagcggctctacaagtcgcctcagtgctcgaaccccggcctgtgcgtccagccacatcacattggagtcacaatcaaagaactggatctttatctggcttactttgtccacactccggaatccggacaatcagatagttcaaaccagcaaggagatgcggacatcaaaccactgcccaacgggcacttaagtttccaggactgttttgtgacttccggggtctggaatgtgacggagctggtgagagtatcacagactcctgttgcaacagcatcagggcccaacttctccctggcggacctggagagtcccagctactacaacatcaaccaggtgaccctggggcggcggtccatcacctcccctccttccaccagcaccaccaagcgccccaagtccatcgatgacagtgagatggagagccctgttgatgacgtgttctatcccgggacaggccgttccccagcagctggcagcagccagtccagcgggtggcccaacgatgtggatgcaggcccggcttctctaaagaagtcaggaaagctggacttctgcagtgccctctcctctcagggcagctccccgcgcatggctttcacccaccacccgctgcctgtgcttgctggagtcagaccagggagcccccgggccacagcatcagccctgcacttcccctccacgtccatcatccagcagtcgagcccgtatttcacgcacccgaccatccgctaccaccaccaccacgggcaggactcactgaaggagtttgtgcagtttgtgtgctcggatggctcgggccaggccaccggacagcattcgcaacgacaggcgcctcctctgccaaccggtttgtcagcatcggaccccgggacggcaactttctgaacatcccacagcagtctcagtcctggttcctctgataagatcgacaaaagaaacaacaaaatgagaagaagaggttcctcgaaaggggggagaagaaattttgagaatggaaaaatcccccagcccagcccagccccaccgaaaagcaaaaattacacgtcgtcagccactcagcccttctctcctccagcccggggacccccgcgggccccagaagcagcccagttctcagagagcccttggaaggggtctcggtggagctgtgcaccagcagccaagcagaaagaaacacgcgacatggactctgtcaagtagaggacagaaagcaagaaaggatgcagaactgccttcctccccctgaccccgccccggccttctggggaaggaacaaagtccccaaacaaagcaaccagcacaattctgaaggggcctggcctccaccctcaccccttcctaggggaagggccgggcgtgacgcgcggtcaaagtgcaatgatttttcagttcggttggctaaacagggtcagagctgagagcgaagcagaaggggctccctgtccggcccacgtgccctttccctcgacgacagtcgagggctcgggctctgtgggactgtgggagctagggtctgcggggcgcctgcccgggcgaggtcggaagctgcaggccagctgggcccgggccggagcgtgcccggcggggctgcccgggcgggcagggggtgggggctgctcctttcccaagtggtgttgtgaggggcaatgagggcaacaggagatgtggggacgtgttaggagagaaaaaaaaaaaaacaaaaatatatatgggggaaattaacttttttttttcattgaaccaagtgcaatgcatcagagagttttcctatctttgtatgttaagagattaagaaaaaaaaattctatttttgttgtaatgtcctcgcggctctggggacgctaaaagaaccgggcctgccccgccctgcgcggggataacgaaagctgagtgtttttcccttttttttgttcgtttttagtttttttttttttaagtcgttttcctgcgttgacgaggatgatctggggtttttatttgtttcgtcgttcgttctgtttcggtgggagggctgaaggaaacgttcacattttagagtttaaaaaaaacacctcgacatttaaaaaatcaaccaacacaagatcaaaaaggaaaaggacgagagaaaaattatttttaagataattaaacataaaaccctggtgcttcttacattataaagtacgttttaaagaacccacaaactattatacataaaaacaagggtagtttactgtctgttttgttttctgggttttcagtgtcctagcggaatgcaagtaggcagccagcccgtctgttccctctccgccccgccccgccccgcccccgtcactgcgcttctgttataccatctttgcctgactctctccggcttctccattgaatggctaatgtgtatgtgaaataaagaaataaagaaaaacaaacgcgaaaaaaaaa

SEQ ID NO: 314694 - DNA, 2779 bp, Homo sapiens
  misc_feature (53)..(53): n is a, c, g, or t
  misc_feature (2759)..(2759): n is a, c, g, or t
tggttttataaggggctgcctccaccacgtcgctcttctttctgctctcatcncgtcttcccctcctcccgtcctccctcgccccgcatgtactccccgtactgcctcacccagggatgagttccacccgttcatcgaggcactgctgcctcacgtccgcgctttctcctacacctggttcaacctgcaggcgcggaagcgcaagtacttcaagaagcatgaaaagcggatgtcgaaggacgaggagcgggcggtgaaggacgagctgctgggcgagaagcccgagatcaagcagaagtgggcatcccggctgctggccaagctgcgcaaggacatccggcccgagttccgcgaggacttcgtgctgaccatcacgggcaagaagcccccctgctgcgtgctctccaaccccgaccagaagggcaagatccggcggattgactgcctgcgccaggctgacaaggtgtggcggctggacctggtcatggtgattttgtttaaggggatccccctggaaagtactgatggggagcggctctacaagtcgcctcagtgctcgaaccccggcctgtgcgtccagccacatcacattggagtcacaatcaaagaactggatctttatctggcttactttgtccacactccggaatccggacaatcagatagttcaaaccagcaaggagatgcggacatcaaaccactgcccaacgggcacttaagtttccaggactgttttgtgacttccggggtctggaatgtgacggagctggtgagagtatcacagactcctgttgcaacagcatcagggcccaacttctccctggcggacctggagagtcccagctactacaacatcaaccaggtgaccctggggcggcggtccatcacctcccctccttccaccagcaccaccaagcgccccaagtccatcgatgacagtgagatggagagccctgttgatgacgtgttctatcccgggacaggccgttccccagcagctggcagcagccagtccagcgggtggcccaacgatgtggatgcaggcccggcttctctaaagaagtcaggaaagctggacttctgcagtgccctctcctctcagggcagctccccgcgcatggctttcacccaccacccgctgcctgtgcttgctggagtcagaccagggagcccccgggccacagcatcagccctgcacttcccctccacgtccatcatccagcagtcgagcccgtatttcacgcacccgaccatccgctaccaccaccaccacgggcaggactcactgaaggagtttgtgcagtttgtgtgctcggatggctcgggccaggccaccggacagcattcgcaacgacaggcgcctcctctgccaaccggtttgtcagcatcggaccccgggacggcaactttctgaacatcccacagcagtctcagtcctggttcctctgataagatcgacaaaagaaacaacaaaatgagaagaagaggttcctcgaaaggggggagaagaaattttgagaatggaaaaatcccccagcccagcccagccccaccgaaaagcaaaaattacacgtcgtcagccactcagcccttctctcctccagcccggggacccccgcgggccccagaagcagcccagttctcagagagcccttggaaggggtctcggtggagctgtgcaccagcagccaagcagaaagaaacacgcgacatggactctgtcaagtagaggacagaaagcaagaaaggatgcagaactgccttcctccccctgaccccgccccggccttctggggaaggaacaaagtccccaaacaaagcaaccagcacaattctgaaggggcctggcctccaccctcaccccttcctaggggaactcctttcccaagtggtgttgtgaggggcaatgagggcaacaggagatgtggggacgtgttaggagagaaaaaaaaaaaaacaaaaatatatatgggggaaattaacttttttttttcattgaaccaagtgcaatgcatcagagagttttcctatctttgtatgttaagagattaagaaaaaaaaattctatttttgttgtaatgtcctcgcggctctggggacgctaaaagaaccgggcctgccccgccctgcgcggggataacgaaagctgagtgtttttcccttttttttgttcgtttttagtttttttttttttaagtcgttttcctgcgttgacgaggatgatctggggtttttatttgtttcgtcgttcgttctgtttcggtgggagggctgaaggaaacgttcacattttagagtttaaaaaaaacacctcgacatttaaaaaatcaaccaacacaagatcaaaaaggaaaaggacgagagaaaaattatttttaagataattaaacataaaaccctggtgcttcttacattataaagtacgttttaaagaacccacaaactattatacataagtttatgaatcaattaaatatcctgcacttgttaggaatacgcatatcccttctttgttgagtttaacggaacgggacagcggcgtgcccccggcggctggactgctccggccgcgggtctccccgggcgcccctccctggggcccagcacccctcctcgccccatccccgtccgggtacgggggcgcggcaggggtccccggcccctcccccgcagaggtcaatgccaacgaacaaacgtcccctccctccgtcgggctccgttcccaattgatattctacgggaccatgagggcaacaggnggtgttaggttttgttaggg

SEQ ID NO: 314695 - DNA, 2125 bp, Homo sapiens
  misc_feature (53)..(53): n is a, c, g, or t
tggttttataaggggctgcctccaccacgtcgctcttctttctgctctcatcncgtcttcccctcctcccgtcctccctcgccccgcatgtactccccgtactgcctcacccagggatgagttccacccgttcatcgaggcactgctgcctcacgtccgcgctttctcctacacctggttcaacctgcaggcgcggaagcgcaagtacttcaagaagcatgaaaagcggatgtcgaaggacgaggagcgggcggtgaaggacgagctgctgggcgagaagcccgagatcaagcagaagtgggcatcccggctgctggccaagctgcgcaaggacatccggcccgagttccgcgaggacttcgtgctgaccatcacgggcaagaagcccccctgctgcgtgctctccaaccccgaccagaagggcaagatccggcggattgactgcctgcgccaggctgacaaggtgtggcggctggacctggtcatggtgattttgtttaaggggatccccctggaaagtactgatggggagcggctctacaagtcgcctcagtgctcgaaccccggcctgtgcgtccagccacatcacattggagtcacaatcaaagaactggatctttatctggcttactttgtccacactccggaatccggacaatcagatagttcaaaccagcaaggagatgcggacatcaaaccactgcccaacgggcacttaagtttccaggactgttttgtgacttccggggtctggaatgtgacggagctggtgagagtatcacagactcctgttgcaacagcatcagggcccaacttctccctggcggacctggagagtcccagctactacaacatcaaccaggtgaccctggggcggcggtccatcacctcccctccttccaccagcaccaccaagcgccccaagtccatcgatgacagtgagatggagagccctgttgatgacgtgttctatcccgggacaggccgttccccagcagctggcagcagccagtccagcgggtggcccaacgatgtggatgcaggcccggcttctctaaagaagtcaggaaagctggacttctgcagtgccctctcctctcagggcagctccccgcgcatggctttcacccaccacccgctgcctgtgcttgctggagtcagaccagggagcccccgggccacagcatcagccctgcacttcccctccacgtccatcatccagcagtcgagcccgtatttcacgcacccgaccatccgctaccaccaccaccacgggcaggactcactgaaggagtttgtgcagtttgtgtgctcggatggctcgggccaggccaccggacagcattcgcaacgacaggcgcctcctctgccaaccggtttgtcagcatcggaccccgggacggcaactttctgaacatcccacagcagtctcagtcctggttcctctgataagatcgacaaaagaaacaacaaaatgagaagaagaggttcctcgaaaggggggagaagaaattttgagaatggaaaaatcccccagcccagcccagccccaccgaaaagcaaaaattacacgtcgtcagccactcagcccttctctcctccagcccggggacccccgcgggccccagaagcagcccagttctcagagagcccttggaaggggtctcggtggagctgtgcaccagcagccaagcagaaagaaacacgcgacatggactctgtcaagtagaggacagaaagcaagaaaggatgcagaactgccttcctccccctgaccccgccccggccttctggggaaggaacaaagtccccaaacaaagcaaccagcacaattctgaaggggcctggtctccccctcttctctgccctccacccccgtctctgcactgagatacataagaaacaagggtagtttactgtctgttttgttttctgggttttcagtgtcctagcggaatgcaagtaggcagccagcccgtctgttccctctccgccccgccccgccccgcccccgtcactgcgcttctgttataccatctttgcctgactctctccggcttctccattgaatggctaatgtgtatgtgaaataaagaaataaagaaaaacaaacgcgaaaaaaaaa

SEQ ID NO: 314696 - DNA, 2030 bp, Homo sapiens
  misc_feature (53)..(53): n is a, c, g, or t
  misc_feature (1998)..(1998): n is a, c, g, or t
  misc_feature (2008)..(2008): n is a, c, g, or t
  misc_feature (2013)..(2013): n is a, c, g, or t
  misc_feature (2015)..(2015): n is a, c, g, or t
tggttttataaggggctgcctccaccacgtcgctcttctttctgctctcatcncgtcttcccctcctcccgtcctccctcgccccgcatgtactccccgtactgcctcacccagggatgagttccacccgttcatcgaggcactgctgcctcacgtccgcgctttctcctacacctggttcaacctgcaggcgcggaagcgcaagtacttcaagaagcatgaaaagcggatgtcgaaggacgaggagcgggcggtgaaggacgagctgctgggcgagaagcccgagatcaagcagaagtgggcatcccggctgctggccaagctgcgcaaggacatccggcccgagttccgcgaggacttcgtgctgaccatcacgggcaagaagcccccctgctgcgtgctctccaaccccgaccagaagggcaagatccggcggattgactgcctgcgccaggctgacaaggtgtggcggctggacctggtcatggtgattttgtttaaggggatccccctggaaagtactgatggggagcggctctacaagtcgcctcagtgctcgaaccccggcctgtgcgtccagccacatcacattggagtcacaatcaaagaactggatctttatctggcttactttgtccacactccggaatccggacaatcagatagttcaaaccagcaaggagatgcggacatcaaaccactgcccaacgggcacttaagtttccaggactgttttgtgacttccggggtctggaatgtgacggagctggtgagagtatcacagactcctgttgcaacagcatcagggcccaacttctccctggcggacctggagagtcccagctactacaacatcaaccaggtgaccctggggcggcggtccatcacctcccctccttccaccagcaccaccaagcgccccaagtccatcgatgacagtgagatggagagccctgttgatgacgtgttctatcccgggacaggccgttccccagcagctggcagcagccagtccagcgggtggcccaacgatgtggatgcaggcccggcttctctaaagaagtcaggaaagctggacttctgcagtgccctctcctctcagggcagctccccgcgcatggctttcacccaccacccgctgcctgtgcttgctggagtcagaccagggagcccccgggccacagcatcagccctgcacttcccctccacgtccatcatccagcagtcgagcccgtatttcacgcacccgaccatccgctaccaccaccaccacgggcaggactcactgaaggagtttgtgcagtttgtgtgctcggatggctcgggccaggccaccggacagcattcgcaacgacaggcgcctcctctgccaaccggtttgtcagcatcggaccccgggacggcaactttctgaacatcccacagcagtctcagtcctggttcctctgataagatcgacaaaagaaacaacaaaatgagaagaagaggttcctcgaaaggggggagaagaaattttgagaatggaaaaatcccccagcccagcccagccccaccgaaaagcaaaaattacacgtcgtcagccactcagcccttctctcctccagcccggggacccccgcgggccccagaagcagcccagttctcagagagcccttggaaggggtctcggtggagctgtgcaccagcagccaagcagaaagaaacacgcgacatggactctgtcaagtagaggacagaaagcaagaaaggatgcagaactgccttcctccccctgaccccgccccggccttctggggaaggaacaaagtccccaaacaaagcaaccagcacaattctgaaggggcctggcctccaccctcaccccttcctaggggaaccccaccctccacacagccggagctgccctagggagcctggagggccagcttgtaaagatgatggggtttagatccctcaggctctcccctccagactccgcccttcccttccctccaaccngtcgaccggncgcgnanttagtagtagtagta

SEQ ID NO: 314697 - DNA, 1899 bp, Homo sapiens
  misc_feature (53)..(53): n is a, c, g, or t
tggttttataaggggctgcctccaccacgtcgctcttctttctgctctcatcncgtcttcccctcctcccgtcctccctcgccccgcatgtactccccgtactgcctcacccagggatgagttccacccgttcatcgaggcactgctgcctcacgtccgcgctttctcctacacctggttcaacctgcaggcgcggaagcgcaagtacttcaagaagcatgaaaagcggatgtcgaaggacgaggagcgggcggtgaaggacgagctgctgggcgagaagcccgagatcaagcagaagtgggcatcccggctgctggccaagctgcgcaaggacatccggcccgagttccgcgaggacttcgtgctgaccatcacgggcaagaagcccccctgctgcgtgctctccaaccccgaccagaagggcaagatccggcggattgactgcctgcgccaggctgacaaggtgtggcggctggacctggtcatggtgattttgtttaaggggatccccctggaaagtactgatggggagcggctctacaagtcgcctcagtgctcgaaccccggcctgtgcgtccagccacatcacattggagtcacaatcaaagaactggatctttatctggcttactttgtccacactccggaatccggacaatcagatagttcaaaccagcaaggagatgcggacatcaaaccactgcccaacgggcacttaagtttccaggactgttttgtgacttccggggtctggaatgtgacggagctggtgagagtatcacagactcctgttgcaacagcatcagggcccaacttctccctggcggacctggagagtcccagctactacaacatcaaccaggtgaccctggggcggcggtccatcacctcccctccttccaccagcaccaccaagcgccccaagtccatcgatgacagtgagatggagagccctgttgatgacgtgttctatcccgggacaggccgttccccagcagctggcagcagccagtccagcgggtggcccaacgatgtggatgcaggcccggcttctctaaagaagtcaggaaagctggacttctgcagtgccctctcctctcagggcagctccccgcgcatggctttcacccaccacccgctgcctgtgcttgctggagtcagaccagggagcccccgggccacagcatcagccctgcacttcccctccacgtccatcatccagcagtcgagcccgtatttcacgcacccgaccatccgctaccaccaccaccacgggcaggactcactgaaggagtttgtgcagtttgtgtgctcggatggctcgggccaggccaccggacagcattcgcaacgacaggcgcctcctctgccaaccggtttgtcagcatcggaccccgggacggcaactttctgaacatcccacagcagtctcagtcctggttcctctgataagatcgacaaaagaaacaacaaaatgagaagaagaggttcctcgaaaggggggagaagaaattttgagaatggaaaaatcccccagcccagcccagccccaccgaaaagcaaaaattacacgtcgtcagccactcagcccttctctcctccagcccggggacccccgcgggccccagaagcagcccagttctcagagagcccttggaaggggtctcggtggagctgtgcaccagcagccaagcagaaagaaacacgcgacatggactctgtcaagtagaggacagaaagcaagaaaggatgcagaactgccttcctccccctgacgccccgcccccgtcactgcgcttctgttataccatctttgcctgactctctccggcttctccattgaatggctaatgtgtatgtgaaataaagaaataaagaaaaacaaacgcgaaaaaaaaa

SEQ ID NO: 314698 - DNA, 3173 bp, Homo sapiens
  misc_feature (3153)..(3153): n is a, c, g, or t
gcggccgccgcctgccgggcctcccctcgccgcggccggccgccgcgctcccgcccgggcgcccagctatgtactccccgtactgcctcacccaggatgagttccacccgttcatcgaggcactgctgcctcacgtccgcgctttctcctacacctggttcaacctgcaggcgcggaagcgcaagtacttcaagaagcatgaaaagcggatgtcgaaggacgaggagcgggcggtgaaggacgagctgctgggcgagaagcccgagatcaagcagaagtgggcatcccggctgctggccaagctgcgcaaggacatccggcccgagttccgcgaggacttcgtgctgaccatcacgggcaagaagcccccctgctgcgtgctctccaaccccgaccagaagggcaagatccggcggattgactgcctgcgccaggctgacaaggtgtggcggctggacctggtcatggtgattttgtttaaggggatccccctggaaagtactgatggggagcggctctacaagtcgcctcagtgctcgaaccccggcctgtgcgtccagccacatcacattggagtcacaatcaaagaactggatctttatctggcttactttgtccacactccggaatccggacaatcagatagttcaaaccagcaaggagatgcggacatcaaaccactgcccaacgggcacttaagtttccaggactgttttgtgacttccggggtctggaatgtgacggagctggtgagagtatcacagactcctgttgcaacagcatcagggcccaacttctccctggcggacctggagagtcccagctactacaacatcaaccaggtgaccctggggcggcggtccatcacctcccctccttccaccagcaccaccaagcgccccaagtccatcgatgacagtgagatggagagccctgttgatgacgtgttctatcccgggacaggccgttccccagcagctggcagcagccagtccagcgggtggcccaacgatgtggatgcaggcccggcttctctaaagaagtcaggaaagctggacttctgcagtgccctctcctctcagggcagctccccgcgcatggctttcacccaccacccgctgcctgtgcttgctggagtcagaccagggagcccccgggccacagcatcagccctgcacttcccctccacgtccatcatccagcagtcgagcccgtatttcacgcacccgaccatccgctaccaccaccaccacgggcaggactcactgaaggagtttgtgcagtttgtgtgctcggatggctcgggccaggccaccggacagcccaacggtagcggccagggcaaagtcccggggtcatttttgcaccgccgccgcctccagtggccagacctgtgcccttcctatgcctgattccaaatccaccagcactgccccagacgcgccgccttgactcctccatcaccttcattcgcaacgacaggcgcctcctctgccaaccggtttgtcagcatcggaccccgggacggcaactttctgaacatcccacagcagtctcagtcctggttcctctgataagatcgacaaaagaaacaacaaaatgagaagaagaggttcctcgaaaggggggagaagaaattttgagaatggaaaaatcccccagcccagcccagccccaccgaaaagcaaaaattacacgtcgtcagccactcagcccttctctcctccagcccggggacccccgcgggccccagaagcagcccagttctcagagagcccttggaaggggtctcggtggagctgtgcaccagcagccaagcagaaagaaacacgcgacatggactctgtcaagtagaggacagaaagcaagaaaggatgcagaactgccttcctccccctgaccccgccccggccttctggggaaggaacaaagtccccaaacaaagcaaccagcacaattctgaaggggcctggcctccaccctcaccccttcctaggggaagggccgggcgtgacgcgcggtcaaagtgcaatgatttttcagttcggttggctaaacagggtcagagctgagagcgaagcagaaggggctccctgtccggcccacgtgccctttccctcgacgacagtcgagggctcgggctctgtgggactgtgggagctagggtctgcggggcgcctgcccgggcgaggtcggaagctgcaggccagctgggcccgggccggagcgtgcccggcggggctgcccgggcgggcagggggtgggggctgctcctttcccaagtggtgttgtgaggggcaatgagggcaacaggagatgtggggacgtgttaggagagaaaaaaaaaaaaacaaaaatatatatgggggaaattaacttttttttttcattgaaccaagtgcaatgcatcagagagttttcctatctttgtatgttaagagattaagaaaaaaaaattctatttttgttgtaatgtcctcgcggctctggggacgctaaaagaaccgggcctgccccgccctgcgcggggataacgaaagctgagtgtttttcccttttttttgttcgtttttagtttttttttttttaagtcgttttcctgcgttgacgaggatgatctggggtttttatttgtttcgtcgttcgttctgtttcggtgggagggctgaaggaaacgttcacattttagagtttaaaaaaaacacctcgacatttaaaaaatcaaccaacacaagatcaaaaaggaaaaggacgagagaaaaattatttttaagataattaaacataaaaccctggtgcttcttacattataaagtacgttttaaagaacccacaaactattatacataagtttatgaatcaattaaatatcctgcacttgttaggaatacgcatatcccttctttgttgagtttaacggaacgggacagcggcgtgcccccggcggctggactgctccggccgcgggtctccccgggcgcccctccctggggcccagcacccctcctcgccccatccccgtccgggtacgggggcgcggcaggggtccccggcccctcccccgcagaggtcaatgccaacgaacaaacgtcccctccctccgtcgggctccgttcccaattgatattctacgggaccatgagggcaacaggnggtgttaggttttgttaggg

SEQ ID NO: 314699 - DNA, 2905 bp, Homo sapiens
  misc_feature (2885)..(2885): n is a, c, g, or t
gcggccgccgcctgccgggcctcccctcgccgcggccggccgccgcgctcccgcccgggcgcccagctatgtactccccgtactgcctcacccaggatgagttccacccgttcatcgaggcactgctgcctcacgtccgcgctttctcctacacctggttcaacctgcaggcgcggaagcgcaagtacttcaagaagcatgaaaagcggatgtcgaaggacgaggagcgggcggtgaaggacgagctgctgggcgagaagcccgagatcaagcagaagtgggcatcccggctgctggccaagctgcgcaaggacatccggcccgagttccgcgaggacttcgtgctgaccatcacgggcaagaagcccccctgctgcgtgctctccaaccccgaccagaagggcaagatccggcggattgactgcctgcgccaggctgacaaggtgtggcggctggacctggtcatggtgattttgtttaaggggatccccctggaaagtactgatggggagcggctctacaagtcgcctcagtgctcgaaccccggcctgtgcgtccagccacatcacattggagtcacaatcaaagaactggatctttatctggcttactttgtccacactccggaatccggacaatcagatagttcaaaccagcaaggagatgcggacatcaaaccactgcccaacgggcacttaagtttccaggactgttttgtgacttccggggtctggaatgtgacggagctggtgagagtatcacagactcctgttgcaacagcatcagggcccaacttctccctggcggacctggagagtcccagctactacaacatcaaccaggtgaccctggggcggcggtccatcacctcccctccttccaccagcaccaccaagcgccccaagtccatcgatgacagtgagatggagagccctgttgatgacgtgttctatcccgggacaggccgttccccagcagctggcagcagccagtccagcgggtggcccaacgatgtggatgcagggagcccccgggccacagcatcagccctgcacttcccctccacgtccatcatccagcagtcgagcccgtatttcacgcacccgaccatccgctaccaccaccaccacgggcaggactcactgaaggagtttgtgcagtttgtgtgctcggatggctcgggccaggccaccggacagcattcgcaacgacaggcgcctcctctgccaaccggtttgtcagcatcggaccccgggacggcaactttctgaacatcccacagcagtctcagtcctggttcctctgataagatcgacaaaagaaacaacaaaatgagaagaagaggttcctcgaaaggggggagaagaaattttgagaatggaaaaatcccccagcccagcccagccccaccgaaaagcaaaaattacacgtcgtcagccactcagcccttctctcctccagcccggggacccccgcgggccccagaagcagcccagttctcagagagcccttggaaggggtctcggtggagctgtgcaccagcagccaagcagaaagaaacacgcgacatggactctgtcaagtagaggacagaaagcaagaaaggatgcagaactgccttcctccccctgaccccgccccggccttctggggaaggaacaaagtccccaaacaaagcaaccagcacaattctgaaggggcctggcctccaccctcaccccttcctaggggaagggccgggcgtgacgcgcggtcaaagtgcaatgatttttcagttcggttggctaaacagggtcagagctgagagcgaagcagaaggggctccctgtccggcccacgtgccctttccctcgacgacagtcgagggctcgggctctgtgggactgtgggagctagggtctgcggggcgcctgcccgggcgaggtcggaagctgcaggccagctgggcccgggccggagcgtgcccggcggggctgcccgggcgggcagggggtgggggctgctcctttcccaagtggtgttgtgaggggcaatgagggcaacaggagatgtggggacgtgttaggagagaaaaaaaaaaaaacaaaaatatatatgggggaaattaacttttttttttcattgaaccaagtgcaatgcatcagagagttttcctatctttgtatgttaagagattaagaaaaaaaaattctatttttgttgtaatgtcctcgcggctctggggacgctaaaagaaccgggcctgccccgccctgcgcggggataacgaaagctgagtgtttttcccttttttttgttcgtttttagtttttttttttttaagtcgttttcctgcgttgacgaggatgatctggggtttttatttgtttcgtcgttcgttctgtttcggtgggagggctgaaggaaacgttcacattttagagtttaaaaaaaacacctcgacatttaaaaaatcaaccaacacaagatcaaaaaggaaaaggacgagagaaaaattatttttaagataattaaacataaaaccctggtgcttcttacattataaagtacgttttaaagaacccacaaactattatacataagtttatgaatcaattaaatatcctgcacttgttaggaatacgcatatcccttctttgttgagtttaacggaacgggacagcggcgtgcccccggcggctggactgctccggccgcgggtctccccgggcgcccctccctggggcccagcacccctcctcgccccatccccgtccgggtacgggggcgcggcaggggtccccggcccctcccccgcagaggtcaatgccaacgaacaaacgtcccctccctccgtcgggctccgttcccaattgatattctacgggaccatgagggcaacaggnggtgttaggttttgttaggg

SEQ ID NO: 314700 - DNA, 3288 bp, Homo sapiens
  misc_feature (3268)..(3268): n is a, c, g, or t
tcgataacaaagctgaaatcacatatttaggatttaggtctgattaaaaaatgttggggtggatgttccaactggatcaggagaaaagaaaatgaaaacagcctggggagagggaagcctgatctgtttcctcactcgcttgctcgtggatgtcattttctgtcttcttgggggcggccaaaaatcgaccggtgtcggggaccagaggcggccccgcacgcccccgcgtgtgcgtccacgggcgtctgtgcagacggacactgtgccggggcgagctgacaggagttcacggctgcgatagaacatggagatgtcatgggcgcgacagagcctggcggggataccagcagcgtgtgatgagttccacccgttcatcgaggcactgctgcctcacgtccgcgctttctcctacacctggttcaacctgcaggcgcggaagcgcaagtacttcaagaagcatgaaaagcggatgtcgaaggacgaggagcgggcggtgaaggacgagctgctgggcgagaagcccgagatcaagcagaagtgggcatcccggctgctggccaagctgcgcaaggacatccggcccgagttccgcgaggacttcgtgctgaccatcacgggcaagaagcccccctgctgcgtgctctccaaccccgaccagaagggcaagatccggcggattgactgcctgcgccaggctgacaaggtgtggcggctggacctggtcatggtgattttgtttaaggggatccccctggaaagtactgatggggagcggctctacaagtcgcctcagtgctcgaaccccggcctgtgcgtccagccacatcacattggagtcacaatcaaagaactggatctttatctggcttactttgtccacactccggaatccggacaatcagatagttcaaaccagcaaggagatgcggacatcaaaccactgcccaacgggcacttaagtttccaggactgttttgtgacttccggggtctggaatgtgacggagctggtgagagtatcacagactcctgttgcaacagcatcagggcccaacttctccctggcggacctggagagtcccagctactacaacatcaaccaggtgaccctggggcggcggtccatcacctcccctccttccaccagcaccaccaagcgccccaagtccatcgatgacagtgagatggagagccctgttgatgacgtgttctatcccgggacaggccgttccccagcagctggcagcagccagtccagcgggtggcccaacgatgtggatgcaggcccggcttctctaaagaagtcaggaaagctggacttctgcagtgccctctcctctcagggcagctccccgcgcatggctttcacccaccacccgctgcctgtgcttgctggagtcagaccagggagcccccgggccacagcatcagccctgcacttcccctccacgtccatcatccagcagtcgagcccgtatttcacgcacccgaccatccgctaccaccaccaccacgggcaggactcactgaaggagtttgtgcagtttgtgtgctcggatggctcgggccaggccaccggacagcattcgcaacgacaggcgcctcctctgccaaccggtttgtcagcatcggaccccgggacggcaactttctgaacatcccacagcagtctcagtcctggttcctctgataagatcgacaaaagaaacaacaaaatgagaagaagaggttcctcgaaaggggggagaagaaattttgagaatggaaaaatcccccagcccagcccagccccaccgaaaagcaaaaattacacgtcgtcagccactcagcccttctctcctccagcccggggacccccgcgggccccagaagcagcccagttctcagagagcccttggaaggggtctcggtggagctgtgcaccagcagccaagcagaaagaaacacgcgacatggactctgtcaagtagaggacagaaagcaagaaaggatgcagaactgccttcctccccctgaccccgccccggccttctggggaaggaacaaagtccccaaacaaagcaaccagcacaattctgaaggggcctggcctccaccctcaccccttcctaggggaagggccgggcgtgacgcgcggtcaaagtgcaatgatttttcagttcggttggctaaacagggtcagagctgagagcgaagcagaaggggctccctgtccggcccacgtgccctttccctcgacgacagtcgagggctcgggctctgtgggactgtgggagctagggtctgcggggcgcctgcccgggcgaggtcggaagctgcaggccagctgggcccgggccggagcgtgcccggcggggctgcccgggcgggcagggggtgggggctgctcctttcccaagtggtgttgtgaggggcaatgagggcaacaggagatgtggggacgtgttaggagagaaaaaaaaaaaaacaaaaatatatatgggggaaattaacttttttttttcattgaaccaagtgcaatgcatcagagagttttcctatctttgtatgttaagagattaagaaaaaaaaattctatttttgttgtaatgtcctcgcggctctggggacgctaaaagaaccgggcctgccccgccctgcgcggggataacgaaagctgagtgtttttcccttttttttgttcgtttttagtttttttttttttaagtcgttttcctgcgttgacgaggatgatctggggtttttatttgtttcgtcgttcgttctgtttcggtgggagggctgaaggaaacgttcacattttagagtttaaaaaaaacacctcgacatttaaaaaatcaaccaacacaagatcaaaaaggaaaaggacgagagaaaaattatttttaagataattaaacataaaaccctggtgcttcttacattataaagtacgttttaaagaacccacaaactattatacataagtttatgaatcaattaaatatcctgcacttgttaggaatacgcatatcccttctttgttgagtttaacggaacgggacagcggcgtgcccccggcggctggactgctccggccgcgggtctccccgggcgcccctccctggggcccagcacccctcctcgccccatccccgtccgggtacgggggcgcggcaggggtccccggcccctcccccgcagaggtcaatgccaacgaacaaacgtcccctccctccgtcgggctccgttcccaattgatattctacgggaccatgagggcaacaggnggtgttaggttttgttaggg

SEQ ID NO: 314701 - DNA, 2961 bp, Homo sapiens
  misc_feature (10)..(10): n is a, c, g, or t
  misc_feature (17)..(17): n is a, c, g, or t
  misc_feature (2941)..(2941): n is a, c, g, or t
gttccaagtntcaaagnaatgtcaacatgatgagttccacccgttcatcgaggcactgctgcctcacgtccgcgctttctcctacacctggttcaacctgcaggcgcggaagcgcaagtacttcaagaagcatgaaaagcggatgtcgaaggacgaggagcgggcggtgaaggacgagctgctgggcgagaagcccgagatcaagcagaagtgggcatcccggctgctggccaagctgcgcaaggacatccggcccgagttccgcgaggacttcgtgctgaccatcacgggcaagaagcccccctgctgcgtgctctccaaccccgaccagaagggcaagatccggcggattgactgcctgcgccaggctgacaaggtgtggcggctggacctggtcatggtgattttgtttaaggggatccccctggaaagtactgatggggagcggctctacaagtcgcctcagtgctcgaaccccggcctgtgcgtccagccacatcacattggagtcacaatcaaagaactggatctttatctggcttactttgtccacactccggaatccggacaatcagatagttcaaaccagcaaggagatgcggacatcaaaccactgcccaacgggcacttaagtttccaggactgttttgtgacttccggggtctggaatgtgacggagctggtgagagtatcacagactcctgttgcaacagcatcagggcccaacttctccctggcggacctggagagtcccagctactacaacatcaaccaggtgaccctggggcggcggtccatcacctcccctccttccaccagcaccaccaagcgccccaagtccatcgatgacagtgagatggagagccctgttgatgacgtgttctatcccgggacaggccgttccccagcagctggcagcagccagtccagcgggtggcccaacgatgtggatgcaggcccggcttctctaaagaagtcaggaaagctggacttctgcagtgccctctcctctcagggcagctccccgcgcatggctttcacccaccacccgctgcctgtgcttgctggagtcagaccagggagcccccgggccacagcatcagccctgcacttcccctccacgtccatcatccagcagtcgagcccgtatttcacgcacccgaccatccgctaccaccaccaccacgggcaggactcactgaaggagtttgtgcagtttgtgtgctcggatggctcgggccaggccaccggacagcattcgcaacgacaggcgcctcctctgccaaccggtttgtcagcatcggaccccgggacggcaactttctgaacatcccacagcagtctcagtcctggttcctctgataagatcgacaaaagaaacaacaaaatgagaagaagaggttcctcgaaaggggggagaagaaattttgagaatggaaaaatcccccagcccagcccagccccaccgaaaagcaaaaattacacgtcgtcagccactcagcccttctctcctccagcccggggacccccgcgggccccagaagcagcccagttctcagagagcccttggaaggggtctcggtggagctgtgcaccagcagccaagcagaaagaaacacgcgacatggactctgtcaagtagaggacagaaagcaagaaaggatgcagaactgccttcctccccctgaccccgccccggccttctggggaaggaacaaagtccccaaacaaagcaaccagcacaattctgaaggggcctggcctccaccctcaccccttcctaggggaagggccgggcgtgacgcgcggtcaaagtgcaatgatttttcagttcggttggctaaacagggtcagagctgagagcgaagcagaaggggctccctgtccggcccacgtgccctttccctcgacgacagtcgagggctcgggctctgtgggactgtgggagctagggtctgcggggcgcctgcccgggcgaggtcggaagctgcaggccagctgggcccgggccggagcgtgcccggcggggctgcccgggcgggcagggggtgggggctgctcctttcccaagtggtgttgtgaggggcaatgagggcaacaggagatgtggggacgtgttaggagagaaaaaaaaaaaaacaaaaatatatatgggggaaattaacttttttttttcattgaaccaagtgcaatgcatcagagagttttcctatctttgtatgttaagagattaagaaaaaaaaattctatttttgttgtaatgtcctcgcggctctggggacgctaaaagaaccgggcctgccccgccctgcgcggggataacgaaagctgagtgtttttcccttttttttgttcgtttttagtttttttttttttaagtcgttttcctgcgttgacgaggatgatctggggtttttatttgtttcgtcgttcgttctgtttcggtgggagggctgaaggaaacgttcacattttagagtttaaaaaaaacacctcgacatttaaaaaatcaaccaacacaagatcaaaaaggaaaaggacgagagaaaaattatttttaagataattaaacataaaaccctggtgcttcttacattataaagtacgttttaaagaacccacaaactattatacataagtttatgaatcaattaaatatcctgcacttgttaggaatacgcatatcccttctttgttgagtttaacggaacgggacagcggcgtgcccccggcggctggactgctccggccgcgggtctccccgggcgcccctccctggggcccagcacccctcctcgccccatccccgtccgggtacgggggcgcggcaggggtccccggcccctcccccgcagaggtcaatgccaacgaacaaacgtcccctccctccgtcgggctccgttcccaattgatattctacgggaccatgagggcaacaggnggtgttaggttttgttaggg

SEQ ID NO: 314702 - DNA, 1827 bp, Homo sapiens
gcggccgccgcctgccgggcctcccctcgccgcggccggccgccgcgctcccgcccgggcgcccagctatgtactccccgtactgcctcacccaggatgagttccacccgttcatcgaggcactgctgcctcacgtccgcgctttctcctacacctggttcaacctgcaggcgcggaagcgcaagtacttcaagaagcatgaaaagcggatgtcgaaggacgaggagcgggcggtgaaggacgagctgctgggcgagaagcccgagatcaagcagaagtgggcatcccggctgctggccaagctgcgcaaggacatccggcccgagttccgcgaggacttcgtgctgaccatcacgggcaagaagcccccctgctgcgtgctctccaaccccgaccagaagggcaagatccggcggattgactgcctgcgccaggctgacaaggtgtggcggctggacctggtcatggtgattttgtttaaggggatccccctggaaagtactgatggggagcggctctacaagtcgcctcagtgctcgaaccccggcctgtgcgtccagccacatcacattggagtcacaatcaaagaactggatctttatctggcttactttgtccacactccggaatccggacaatcagatagttcaaaccagcaaggagatgcggacatcaaaccactgcccaacgggcacttaagtttccaggactgttttgtgacttccggggtctggaatgtgacggagctggtgagagtatcacagactcctgttgcaacagcatcagggcccaacttctccctggcggacctggagagtcccagctactacaacatcaaccaggtgaccctggggcggcggtccatcacctcccctccttccaccagcaccaccaagcgccccaagtccatcgatgacagtgagatggagagccctgttgatgacgtgttctatcccgggacaggccgttccccagcagctggcagcagccagtccagcgggtggcccaacgatgtggatgcaggcccggcttctctaaagaagtcaggaaagctggacttctgcagtgccctctcctctcagggcagctccccgcgcatggctttcacccaccacccgctgcctgtgcttgctggagtcagaccaggtgagaaatggggggccccggaggggggcagttggggaggtggctgagtatctaggggcagctggccaggtgaaggggccagagctgaccccgagtgacagccccacgctctccaagtgggccaaggtgcagcagcgggtgggcatgggagccggcccctgcttcacgtagcacctcatcgaggaccaggccgggcccctgggctgcccacctggctcctgagcaacctcccacttctcactcctcacgtgcatgggtgctacatacaacacaagcctgtcccgagtcctccccaactctggcccagttctccttttgtcctgccagctgtgagcgggaaggcacagccttctgctctgccttcctgccggctcctctctcccagctcctggctgagcccaggctctggatttttgccagcatgagcccaggttgatgtggggcctggatggagaagagtactcctaaggagcccaggctcctgcggcaagtagctaccttgtctgggcctccctgccgctttctagaaaggaagggctgggtctaggggacaggtggtacctgggctgctccccaggaaaaggaactgcccactgccgtggggctgctctctgacttcagtgtcccagttgagaaggtgctcaggatgagaacacctagatcgccctgaggagataggat

SEQ ID NO: 314703 - DNA, 2474 bp, Homo sapiens
  misc_feature (2454)..(2454): n is a, c, g, or t
tgctctgcagctcctgtcacctgtccagagcaggtgtagacctcaaggcaaggctccccaaagagcctgccagaatccggacaatcagatagttcaaaccagcaaggagatgcggacatcaaaccactgcccaacgggcacttaagtttccaggactgttttgtgacttccggggtctggaatgtgacggagctggtgagagtatcacagactcctgttgcaacagcatcagggcccaacttctccctggcggacctggagagtcccagctactacaacatcaaccaggtgaccctggggcggcggtccatcacctcccctccttccaccagcaccaccaagcgccccaagtccatcgatgacagtgagatggagagccctgttgatgacgtgttctatcccgggacaggccgttccccagcagctggcagcagccagtccagcgggtggcccaacgatgtggatgcaggcccggcttctctaaagaagtcaggaaagctggacttctgcagtgccctctcctctcagggcagctccccgcgcatggctttcacccaccacccgctgcctgtgcttgctggagtcagaccagggagcccccgggccacagcatcagccctgcacttcccctccacgtccatcatccagcagtcgagcccgtatttcacgcacccgaccatccgctaccaccaccaccacgggcaggactcactgaaggagtttgtgcagtttgtgtgctcggatggctcgggccaggccaccggacagcattcgcaacgacaggcgcctcctctgccaaccggtttgtcagcatcggaccccgggacggcaactttctgaacatcccacagcagtctcagtcctggttcctctgataagatcgacaaaagaaacaacaaaatgagaagaagaggttcctcgaaaggggggagaagaaattttgagaatggaaaaatcccccagcccagcccagccccaccgaaaagcaaaaattacacgtcgtcagccactcagcccttctctcctccagcccggggacccccgcgggccccagaagcagcccagttctcagagagcccttggaaggggtctcggtggagctgtgcaccagcagccaagcagaaagaaacacgcgacatggactctgtcaagtagaggacagaaagcaagaaaggatgcagaactgccttcctccccctgaccccgccccggccttctggggaaggaacaaagtccccaaacaaagcaaccagcacaattctgaaggggcctggcctccaccctcaccccttcctaggggaagggccgggcgtgacgcgcggtcaaagtgcaatgatttttcagttcggttggctaaacagggtcagagctgagagcgaagcagaaggggctccctgtccggcccacgtgccctttccctcgacgacagtcgagggctcgggctctgtgggactgtgggagctagggtctgcggggcgcctgcccgggcgaggtcggaagctgcaggccagctgggcccgggccggagcgtgcccggcggggctgcccgggcgggcagggggtgggggctgctcctttcccaagtggtgttgtgaggggcaatgagggcaacaggagatgtggggacgtgttaggagagaaaaaaaaaaaaacaaaaatatatatgggggaaattaacttttttttttcattgaaccaagtgcaatgcatcagagagttttcctatctttgtatgttaagagattaagaaaaaaaaattctatttttgttgtaatgtcctcgcggctctggggacgctaaaagaaccgggcctgccccgccctgcgcggggataacgaaagctgagtgtttttcccttttttttgttcgtttttagtttttttttttttaagtcgttttcctgcgttgacgaggatgatctggggtttttatttgtttcgtcgttcgttctgtttcggtgggagggctgaaggaaacgttcacattttagagtttaaaaaaaacacctcgacatttaaaaaatcaaccaacacaagatcaaaaaggaaaaggacgagagaaaaattatttttaagataattaaacataaaaccctggtgcttcttacattataaagtacgttttaaagaacccacaaactattatacataagtttatgaatcaattaaatatcctgcacttgttaggaatacgcatatcccttctttgttgagtttaacggaacgggacagcggcgtgcccccggcggctggactgctccggccgcgggtctccccgggcgcccctccctggggcccagcacccctcctcgccccatccccgtccgggtacgggggcgcggcaggggtccccggcccctcccccgcagaggtcaatgccaacgaacaaacgtcccctccctccgtcgggctccgttcccaattgatattctacgggaccatgagggcaacaggnggtgttaggttttgttaggg

SEQ ID NO: 314704 - DNA, 2432 bp, Homo sapiens
  misc_feature (2412)..(2412): n is a, c, g, or t
aatgtcggtgtgtctaatgtcggagtgactaatgtcggtgtgtctaatgtcggtgtgtctcaaggagatgcggacatcaaaccactgcccaacgggcacttaagtttccaggactgttttgtgacttccggggtctggaatgtgacggagctggtgagagtatcacagactcctgttgcaacagcatcagggcccaacttctccctggcggacctggagagtcccagctactacaacatcaaccaggtgaccctggggcggcggtccatcacctcccctccttccaccagcaccaccaagcgccccaagtccatcgatgacagtgagatggagagccctgttgatgacgtgttctatcccgggacaggccgttccccagcagctggcagcagccagtccagcgggtggcccaacgatgtggatgcaggcccggcttctctaaagaagtcaggaaagctggacttctgcagtgccctctcctctcagggcagctccccgcgcatggctttcacccaccacccgctgcctgtgcttgctggagtcagaccagggagcccccgggccacagcatcagccctgcacttcccctccacgtccatcatccagcagtcgagcccgtatttcacgcacccgaccatccgctaccaccaccaccacgggcaggactcactgaaggagtttgtgcagtttgtgtgctcggatggctcgggccaggccaccggacagcattcgcaacgacaggcgcctcctctgccaaccggtttgtcagcatcggaccccgggacggcaactttctgaacatcccacagcagtctcagtcctggttcctctgataagatcgacaaaagaaacaacaaaatgagaagaagaggttcctcgaaaggggggagaagaaattttgagaatggaaaaatcccccagcccagcccagccccaccgaaaagcaaaaattacacgtcgtcagccactcagcccttctctcctccagcccggggacccccgcgggccccagaagcagcccagttctcagagagcccttggaaggggtctcggtggagctgtgcaccagcagccaagcagaaagaaacacgcgacatggactctgtcaagtagaggacagaaagcaagaaaggatgcagaactgccttcctccccctgaccccgccccggccttctggggaaggaacaaagtccccaaacaaagcaaccagcacaattctgaaggggcctggcctccaccctcaccccttcctaggggaagggccgggcgtgacgcgcggtcaaagtgcaatgatttttcagttcggttggctaaacagggtcagagctgagagcgaagcagaaggggctccctgtccggcccacgtgccctttccctcgacgacagtcgagggctcgggctctgtgggactgtgggagctagggtctgcggggcgcctgcccgggcgaggtcggaagctgcaggccagctgggcccgggccggagcgtgcccggcggggctgcccgggcgggcagggggtgggggctgctcctttcccaagtggtgttgtgaggggcaatgagggcaacaggagatgtggggacgtgttaggagagaaaaaaaaaaaaacaaaaatatatatgggggaaattaacttttttttttcattgaaccaagtgcaatgcatcagagagttttcctatctttgtatgttaagagattaagaaaaaaaaattctatttttgttgtaatgtcctcgcggctctggggacgctaaaagaaccgggcctgccccgccctgcgcggggataacgaaagctgagtgtttttcccttttttttgttcgtttttagtttttttttttttaagtcgttttcctgcgttgacgaggatgatctggggtttttatttgtttcgtcgttcgttctgtttcggtgggagggctgaaggaaacgttcacattttagagtttaaaaaaaacacctcgacatttaaaaaatcaaccaacacaagatcaaaaaggaaaaggacgagagaaaaattatttttaagataattaaacataaaaccctggtgcttcttacattataaagtacgttttaaagaacccacaaactattatacataagtttatgaatcaattaaatatcctgcacttgttaggaatacgcatatcccttctttgttgagtttaacggaacgggacagcggcgtgcccccggcggctggactgctccggccgcgggtctccccgggcgcccctccctggggcccagcacccctcctcgccccatccccgtccgggtacgggggcgcggcaggggtccccggcccctcccccgcagaggtcaatgccaacgaacaaacgtcccctccctccgtcgggctccgttcccaattgatattctacgggaccatgagggcaacaggnggtgttaggttttgttaggg

SEQ ID NO: 314705 - DNA, 2062 bp, Homo sapiens
  misc_feature (2042)..(2042): n is a, c, g, or t
aggctgttctagaggacccccgtgacaggtacagatgtgggccacacgatgtgagcagcccggcttctctaaagaagtcaggaaagctggacttctgcagtgccctctcctctcagggcagctccccgcgcatggctttcacccaccacccgctgcctgtgcttgctggagtcagaccagggagcccccgggccacagcatcagccctgcacttcccctccacgtccatcatccagcagtcgagcccgtatttcacgcacccgaccatccgctaccaccaccaccacgggcaggactcactgaaggagtttgtgcagtttgtgtgctcggatggctcgggccaggccaccggacagcattcgcaacgacaggcgcctcctctgccaaccggtttgtcagcatcggaccccgggacggcaactttctgaacatcccacagcagtctcagtcctggttcctctgataagatcgacaaaagaaacaacaaaatgagaagaagaggttcctcgaaaggggggagaagaaattttgagaatggaaaaatcccccagcccagcccagccccaccgaaaagcaaaaattacacgtcgtcagccactcagcccttctctcctccagcccggggacccccgcgggccccagaagcagcccagttctcagagagcccttggaaggggtctcggtggagctgtgcaccagcagccaagcagaaagaaacacgcgacatggactctgtcaagtagaggacagaaagcaagaaaggatgcagaactgccttcctccccctgaccccgccccggccttctggggaaggaacaaagtccccaaacaaagcaaccagcacaattctgaaggggcctggcctccaccctcaccccttcctaggggaagggccgggcgtgacgcgcggtcaaagtgcaatgatttttcagttcggttggctaaacagggtcagagctgagagcgaagcagaaggggctccctgtccggcccacgtgccctttccctcgacgacagtcgagggctcgggctctgtgggactgtgggagctagggtctgcggggcgcctgcccgggcgaggtcggaagctgcaggccagctgggcccgggccggagcgtgcccggcggggctgcccgggcgggcagggggtgggggctgctcctttcccaagtggtgttgtgaggggcaatgagggcaacaggagatgtggggacgtgttaggagagaaaaaaaaaaaaacaaaaatatatatgggggaaattaacttttttttttcattgaaccaagtgcaatgcatcagagagttttcctatctttgtatgttaagagattaagaaaaaaaaattctatttttgttgtaatgtcctcgcggctctggggacgctaaaagaaccgggcctgccccgccctgcgcggggataacgaaagctgagtgtttttcccttttttttgttcgtttttagtttttttttttttaagtcgttttcctgcgttgacgaggatgatctggggtttttatttgtttcgtcgttcgttctgtttcggtgggagggctgaaggaaacgttcacattttagagtttaaaaaaaacacctcgacatttaaaaaatcaaccaacacaagatcaaaaaggaaaaggacgagagaaaaattatttttaagataattaaacataaaaccctggtgcttcttacattataaagtacgttttaaagaacccacaaactattatacataagtttatgaatcaattaaatatcctgcacttgttaggaatacgcatatcccttctttgttgagtttaacggaacgggacagcggcgtgcccccggcggctggactgctccggccgcgggtctccccgggcgcccctccctggggcccagcacccctcctcgccccatccccgtccgggtacgggggcgcggcaggggtccccggcccctcccccgcagaggtcaatgccaacgaacaaacgtcccctccctccgtcgggctccgttcccaattgatattctacgggaccatgagggcaacaggnggtgttaggttttgttaggg

SEQ ID NO: 314706 - DNA, 838 bp, Homo sapiens
  misc_feature (9)..(9): n is a, c, g, or t
  misc_feature (15)..(15): n is a, c, g, or t
  misc_feature (818)..(818): n is a, c, g, or t
tgtctctcnctctcnctcaaagatagagattaagatagaaaactctctgatgcattgaaccaagtgcaatgcatcagagagttttcctatctttgtatgttaagagattaagaaaaaaaaattctatttttgttgtaatgtcctcgcggctctggggacgctaaaagaaccgggcctgccccgccctgcgcggggataacgaaagctgagtgtttttcccttttttttgttcgtttttagtttttttttttttaagtcgttttcctgcgttgacgaggatgatctggggtttttatttgtttcgtcgttcgttctgtttcggtgggagggctgaaggaaacgttcacattttagagtttaaaaaaaacacctcgacatttaaaaaatcaaccaacacaagatcaaaaaggaaaaggacgagagaaaaattatttttaagataattaaacataaaaccctggtgcttcttacattataaagtacgttttaaagaacccacaaactattatacataagtttatgaatcaattaaatatcctgcacttgttaggaatacgcatatcccttctttgttgagtttaacggaacgggacagcggcgtgcccccggcggctggactgctccggccgcgggtctccccgggcgcccctccctggggcccagcacccctcctcgccccatccccgtccgggtacgggggcgcggcaggggtccccggcccctcccccgcagaggtcaatgccaacgaacaaacgtcccctccctccgtcgggctccgttcccaattgatattctacgggaccatgagggcaacaggnggtgttaggttttgttaggg

SEQ ID NO: 314707 - DNA, 350 bp, Homo sapiens
cccccctgctgcgtgctctccaaccccgaccagaagggcaagatccggcggattgactgcctgcgccaggctgacaaggtgtggcggctggacctggtcatggtgattttgtttaaggggatccccctggaaagtactgatggggagcggctctacaagtcgcctcagtgctcgaaccccggcctgtgcgtccagccacatcacattggagtcacaatcaaagaactggatctttatctggcttactttgtccacactccgggtaggtcgttctcaaccatttttccctctcattttattttccttgctggcatttgttctgtttattgttcctctaatttccaagcgat

SEQ ID NO: 314708 - DNA, 744 bp, Homo sapiens
ccaaggctccagcttcttcccccagctgctcccgaccaggagggggagagcagcctccacttaccccaccccacccttgggctaaaagcccccaggcgggcagggggtgacccctggagctagttgcgtgtcccagaatggagggtgttctgacaccccaccctgagccgcaagagcagtcctggggccctggacccctctgtacagtccgtaggaaaaagtcggaatgctctcgacggcctcgtcccagcctgggacaggccccctttcccctctctctgcaggccaggagggcctccttcctgccacgagggaggggagtcgggccccaggtcgcccccgcccccagccctgcatgcaggtgccctcgctccgccccatcagttcctgcccctgcccctcatgcagactgccctgctggggccgggccggagggtggagcagaaaggggaccccggagccgagcgaggaggaccaggcagccgccgctgccgcgctaagccaccacctgcgcttaggtaggcgtcctgctcgccgactttcagttccttgggagggtgttgggtgtcgtccttttcaaaagtgttttggagctttctgtgccccccgactttcccccgcgccccgcccccgtcactgcgcttctgttataccatctttgcctgactctctccggcttctccattgaatggctaatgtgtatgtgaaataaagaaataaagaaaaacaaacgcgaaaaaaaaa

SEQ ID NO: 314709 - DNA, 3048 bp, Homo sapiens
  misc_feature (53)..(53): n is a, c, g, or t
  misc_feature (3028)..(3028): n is a, c, g, or t
tggttttataaggggctgcctccaccacgtcgctcttctttctgctctcatcncgtcttcccctcctcccgtcctccctcgccccgcatgtactccccgtactgcctcacccagggatgagttccacccgttcatcgaggcactgctgcctcacgtccgcgctttctcctacacctggttcaacctgcaggcgcggaagcgcaagtacttcaagaagcatgaaaagcggatgtcgaaggacgaggagcgggcggtgaaggacgagctgctgggcgagaagcccgagatcaagcagaagtgggcatcccggctgctggccaagctgcgcaaggacatccggcccgagttccgcgaggacttcgtgctgaccatcacgggcaagaagcccccctgctgcgtgctctccaaccccgaccagaagggcaagatccggcggattgactgcctgcgccaggctgacaaggtgtggcggctggacctggtcatggtgattttgtttaaggggatccccctggaaagtactgatggggagcggctctacaagtcgcctcagtgctcgaaccccggcctgtgcgtccagccacatcacattggagtcacaatcaaagaactggatctttatctggcttactttgtccacactccggaatccggacaatcagatagttcaaaccagcaaggagatgcggacatcaaaccactgcccaacgggcacttaagtttccaggactgttttgtgacttccggggtctggaatgtgacggagctggtgagagtatcacagactcctgttgcaacagcatcagggcccaacttctccctggcggacctggagagtcccagctactacaacatcaaccaggtgaccctggggcggcggtccatcacctcccctccttccaccagcaccaccaagcgccccaagtccatcgatgacagtgagatggagagccctgttgatgacgtgttctatcccgggacaggccgttccccagcagctggcagcagccagtccagcgggtggcccaacgatgtggatgcaggcccggcttctctaaagaagtcaggaaagctggacttctgcagtgccctctcctctcagggcagctccccgcgcatggctttcacccaccacccgctgcctgtgcttgctggagtcagaccagggagcccccgggccacagcatcagccctgcacttcccctccacgtccatcatccagcagtcgagcccgtatttcacgcacccgaccatccgctaccaccaccaccacgggcaggactcactgaaggagtttgtgcagtttgtgtgctcggatggctcgggccaggccaccggacagcattcgcaacgacaggcgcctcctctgccaaccggtttgtcagcatcggaccccgggacggcaactttctgaacatcccacagcagtctcagtcctggttcctctgataagatcgacaaaagaaacaacaaaatgagaagaagaggttcctcgaaaggggggagaagaaattttgagaatggaaaaatcccccagcccagcccagccccaccgaaaagcaaaaattacacgtcgtcagccactcagcccttctctcctccagcccggggacccccgcgggccccagaagcagcccagttctcagagagcccttggaaggggtctcggtggagctgtgcaccagcagccaagcagaaagaaacacgcgacatggactctgtcaagtagaggacagaaagcaagaaaggatgcagaactgccttcctccccctgaccccgccccggccttctggggaaggaacaaagtccccaaacaaagcaaccagcacaattctgaaggggcctggcctccaccctcaccccttcctaggggaagggccgggcgtgacgcgcggtcaaagtgcaatgatttttcagttcggttggctaaacagggtcagagctgagagcgaagcagaaggggctccctgtccggcccacgtgccctttccctcgacgacagtcgagggctcgggctctgtgggactgtgggagctagggtctgcggggcgcctgcccgggcgaggtcggaagctgcaggccagctgggcccgggccggagcgtgcccggcggggctgcccgggcgggcagggggtgggggctgctcctttcccaagtggtgttgtgaggggcaatgagggcaacaggagatgtggggacgtgttaggagagaaaaaaaaaaaaacaaaaatatatatgggggaaattaacttttttttttcattgaaccaagtgcaatgcatcagagagttttcctatctttgtatgttaagagattaagaaaaaaaaattctatttttgttgtaatgtcctcgcggctctggggacgctaaaagaaccgggcctgccccgccctgcgcggggataacgaaagctgagtgtttttcccttttttttgttcgtttttagtttttttttttttaagtcgttttcctgcgttgacgaggatgatctggggtttttatttgtttcgtcgttcgttctgtttcggtgggagggctgaaggaaacgttcacattttagagtttaaaaaaaacacctcgacatttaaaaaatcaaccaacacaagatcaaaaaggaaaaggacgagagaaaaattatttttaagataattaaacataaaaccctggtgcttcttacattataaagtacgttttaaagaacccacaaactattatacataagtttatgaatcaattaaatatcctgcacttgttaggaatacgcatatcccttctttgttgagtttaacggaacgggacagcggcgtgcccccggcggctggactgctccggccgcgggtctccccgggcgcccctccctggggcccagcacccctcctcgccccatccccgtccgggtacgggggcgcggcaggggtccccggcccctcccccgcagaggtcaatgccaacgaacaaacgtcccctccctccgtcgggctccgttcccaattgatattctacgggaccatgagggcaacaggnggtgttaggttttgttaggg

SEQ ID NO: 314710 - DNA, 2054 bp, Homo sapiens
  misc_feature (53)..(53): n is a, c, g, or t
tggttttataaggggctgcctccaccacgtcgctcttctttctgctctcatcncgtcttcccctcctcccgtcctccctcgccccgcatgtactccccgtactgcctcacccagggatgagttccacccgttcatcgaggcactgctgcctcacgtccgcgctttctcctacacctggttcaacctgcaggcgcggaagcgcaagtacttcaagaagcatgaaaagcggatgtcgaaggacgaggagcgggcggtgaaggacgagctgctgggcgagaagcccgagatcaagcagaagtgggcatcccggctgctggccaagctgcgcaaggacatccggcccgagttccgcgaggacttcgtgctgaccatcacgggcaagaagcccccctgctgcgtgctctccaaccccgaccagaagggcaagatccggcggattgactgcctgcgccaggctgacaaggtgtggcggctggacctggtcatggtgattttgtttaaggggatccccctggaaagtactgatggggagcggctctacaagtcgcctcagtgctcgaaccccggcctgtgcgtccagccacatcacattggagtcacaatcaaagaactggatctttatctggcttactttgtccacactccggaatccggacaatcagatagttcaaaccagcaaggagatgcggacatcaaaccactgcccaacgggcacttaagtttccaggactgttttgtgacttccggggtctggaatgtgacggagctggtgagagtatcacagactcctgttgcaacagcatcagggcccaacttctccctggcggacctggagagtcccagctactacaacatcaaccaggtgaccctggggcggcggtccatcacctcccctccttccaccagcaccaccaagcgccccaagtccatcgatgacagtgagatggagagccctgttgatgacgtgttctatcccgggacaggccgttccccagcagctggcagcagccagtccagcgggtggcccaacgatgtggatgcaggcccggcttctctaaagaagtcaggaaagctggacttctgcagtgccctctcctctcagggcagctccccgcgcatggctttcacccaccacccgctgcctgtgcttgctggagtcagaccagggagcccccgggccacagcatcagccctgcacttcccctccacgtccatcatccagcagtcgagcccgtatttcacgcacccgaccatccgctaccaccaccaccacgggcaggactcactgaaggagtttgtgcagtttgtgtgctcggatggctcgggccaggccaccggacagcattcgcaacgacaggcgcctcctctgccaaccggtttgtcagcatcggaccccgggacggcaactttctgaacatcccacagcagtctcagtcctggttcctctgataagatcgacaaaagaaacaacaaaatgagaagaagaggttcctcgaaaggggggagaagaaattttgagaatggaaaaatcccccagcccagcccagccccaccgaaaagcaaaaattacacgtcgtcagccactcagcccttctctcctccagcccggggacccccgcgggccccagaagcagcccagttctcagagagcccttggaaggggtctcggtggagctgtgcaccagcagccaagcagaaagaaacacgcgacatggactctgtcaagtagaggacagaaagcaagaaaggatgcagaactgccttcctccccctgaccccgccccggccttctggggaaggaacaaagtccccaaacaaagcaaccagcacaattctgaaggggcctggcctccaccctcaccccttcctaggggaaccccaccctccacacagccggagctgccctagggagcctggagggccagcttgtaaagatgatggggtttagatccctcaggctctcccctccagactccgcccttcccttccctccttcagcccccatcatgggaataaattaattttctcaatgtaaaaaaaaaaaattatcaaaa

SEQ ID NO: 314711 - DNA, 3028 bp, Homo sapiens
  misc_feature (3008)..(3008): n is a, c, g, or t
gcggccgccgcctgccgggcctcccctcgccgcggccggccgccgcgctcccgcccgggcgcccagctatgtactccccgtactgcctcacccaggatgagttccacccgttcatcgaggcactgctgcctcacgtccgcgctttctcctacacctggttcaacctgcaggcgcggaagcgcaagtacttcaagaagcatgaaaagcggatgtcgaaggacgaggagcgggcggtgaaggacgagctgctgggcgagaagcccgagatcaagcagaagtgggcatcccggctgctggccaagctgcgcaaggacatccggcccgagttccgcgaggacttcgtgctgaccatcacgggcaagaagcccccctgctgcgtgctctccaaccccgaccagaagggcaagatccggcggattgactgcctgcgccaggctgacaaggtgtggcggctggacctggtcatggtgattttgtttaaggggatccccctggaaagtactgatggggagcggctctacaagtcgcctcagtgctcgaaccccggcctgtgcgtccagccacatcacattggagtcacaatcaaagaactggatctttatctggcttactttgtccacactccggaatccggacaatcagatagttcaaaccagcaaggagatgcggacatcaaaccactgcccaacgggcacttaagtttccaggactgttttgtgacttccggggtctggaatgtgacggagctggtgagagtatcacagactcctgttgcaacagcatcagggcccaacttctccctggcggacctggagagtcccagctactacaacatcaaccaggtgaccctggggcggcggtccatcacctcccctccttccaccagcaccaccaagcgccccaagtccatcgatgacagtgagatggagagccctgttgatgacgtgttctatcccgggacaggccgttccccagcagctggcagcagccagtccagcgggtggcccaacgatgtggatgcaggcccggcttctctaaagaagtcaggaaagctggacttctgcagtgccctctcctctcagggcagctccccgcgcatggctttcacccaccacccgctgcctgtgcttgctggagtcagaccagggagcccccgggccacagcatcagccctgcacttcccctccacgtccatcatccagcagtcgagcccgtatttcacgcacccgaccatccgctaccaccaccaccacgggcaggactcactgaaggagtttgtgcagtttgtgtgctcggatggctcgggccaggccaccggacagcattcgcaacgacaggcgcctcctctgccaaccggtttgtcagcatcggaccccgggacggcaactttctgaacatcccacagcagtctcagtcctggttcctctgataagatcgacaaaagaaacaacaaaatgagaagaagaggttcctcgaaaggggggagaagaaattttgagaatggaaaaatcccccagcccagcccagccccaccgaaaagcaaaaattacacgtcgtcagccactcagcccttctctcctccagcccggggacccccgcgggccccagaagcagcccagttctcagagagcccttggaaggggtctcggtggagctgtgcaccagcagccaagcagaaagaaacacgcgacatggactctgtcaagtagaggacagaaagcaagaaaggatgcagaactgccttcctccccctgaccccgccccggccttctggggaaggaacaaagtccccaaacaaagcaaccagcacaattctgaaggggcctggcctccaccctcaccccttcctaggggaagggccgggcgtgacgcgcggtcaaagtgcaatgatttttcagttcggttggctaaacagggtcagagctgagagcgaagcagaaggggctccctgtccggcccacgtgccctttccctcgacgacagtcgagggctcgggctctgtgggactgtgggagctagggtctgcggggcgcctgcccgggcgaggtcggaagctgcaggccagctgggcccgggccggagcgtgcccggcggggctgcccgggcgggcagggggtgggggctgctcctttcccaagtggtgttgtgaggggcaatgagggcaacaggagatgtggggacgtgttaggagagaaaaaaaaaaaaacaaaaatatatatgggggaaattaacttttttttttcattgaaccaagtgcaatgcatcagagagttttcctatctttgtatgttaagagattaagaaaaaaaaattctatttttgttgtaatgtcctcgcggctctggggacgctaaaagaaccgggcctgccccgccctgcgcggggataacgaaagctgagtgtttttcccttttttttgttcgtttttagtttttttttttttaagtcgttttcctgcgttgacgaggatgatctggggtttttatttgtttcgtcgttcgttctgtttcggtgggagggctgaaggaaacgttcacattttagagtttaaaaaaaacacctcgacatttaaaaaatcaaccaacacaagatcaaaaaggaaaaggacgagagaaaaattatttttaagataattaaacataaaaccctggtgcttcttacattataaagtacgttttaaagaacccacaaactattatacataagtttatgaatcaattaaatatcctgcacttgttaggaatacgcatatcccttctttgttgagtttaacggaacgggacagcggcgtgcccccggcggctggactgctccggccgcgggtctccccgggcgcccctccctggggcccagcacccctcctcgccccatccccgtccgggtacgggggcgcggcaggggtccccggcccctcccccgcagaggtcaatgccaacgaacaaacgtcccctccctccgtcgggctccgttcccaattgatattctacgggaccatgagggcaacaggnggtgttaggttttgttaggg

SEQ ID NO: 314712 - DNA, 2990 bp, Homo sapiens
  misc_feature (2970)..(2970): n is a, c, g, or t
ttgagtccagaatctcagaatcgggcgttgggctttgccgggtgcttcagatcaatggatgagttccacccgttcatcgaggcactgctgcctcacgtccgcgctttctcctacacctggttcaacctgcaggcgcggaagcgcaagtacttcaagaagcatgaaaagcggatgtcgaaggacgaggagcgggcggtgaaggacgagctgctgggcgagaagcccgagatcaagcagaagtgggcatcccggctgctggccaagctgcgcaaggacatccggcccgagttccgcgaggacttcgtgctgaccatcacgggcaagaagcccccctgctgcgtgctctccaaccccgaccagaagggcaagatccggcggattgactgcctgcgccaggctgacaaggtgtggcggctggacctggtcatggtgattttgtttaaggggatccccctggaaagtactgatggggagcggctctacaagtcgcctcagtgctcgaaccccggcctgtgcgtccagccacatcacattggagtcacaatcaaagaactggatctttatctggcttactttgtccacactccggaatccggacaatcagatagttcaaaccagcaaggagatgcggacatcaaaccactgcccaacgggcacttaagtttccaggactgttttgtgacttccggggtctggaatgtgacggagctggtgagagtatcacagactcctgttgcaacagcatcagggcccaacttctccctggcggacctggagagtcccagctactacaacatcaaccaggtgaccctggggcggcggtccatcacctcccctccttccaccagcaccaccaagcgccccaagtccatcgatgacagtgagatggagagccctgttgatgacgtgttctatcccgggacaggccgttccccagcagctggcagcagccagtccagcgggtggcccaacgatgtggatgcaggcccggcttctctaaagaagtcaggaaagctggacttctgcagtgccctctcctctcagggcagctccccgcgcatggctttcacccaccacccgctgcctgtgcttgctggagtcagaccagggagcccccgggccacagcatcagccctgcacttcccctccacgtccatcatccagcagtcgagcccgtatttcacgcacccgaccatccgctaccaccaccaccacgggcaggactcactgaaggagtttgtgcagtttgtgtgctcggatggctcgggccaggccaccggacagcattcgcaacgacaggcgcctcctctgccaaccggtttgtcagcatcggaccccgggacggcaactttctgaacatcccacagcagtctcagtcctggttcctctgataagatcgacaaaagaaacaacaaaatgagaagaagaggttcctcgaaaggggggagaagaaattttgagaatggaaaaatcccccagcccagcccagccccaccgaaaagcaaaaattacacgtcgtcagccactcagcccttctctcctccagcccggggacccccgcgggccccagaagcagcccagttctcagagagcccttggaaggggtctcggtggagctgtgcaccagcagccaagcagaaagaaacacgcgacatggactctgtcaagtagaggacagaaagcaagaaaggatgcagaactgccttcctccccctgaccccgccccggccttctggggaaggaacaaagtccccaaacaaagcaaccagcacaattctgaaggggcctggcctccaccctcaccccttcctaggggaagggccgggcgtgacgcgcggtcaaagtgcaatgatttttcagttcggttggctaaacagggtcagagctgagagcgaagcagaaggggctccctgtccggcccacgtgccctttccctcgacgacagtcgagggctcgggctctgtgggactgtgggagctagggtctgcggggcgcctgcccgggcgaggtcggaagctgcaggccagctgggcccgggccggagcgtgcccggcggggctgcccgggcgggcagggggtgggggctgctcctttcccaagtggtgttgtgaggggcaatgagggcaacaggagatgtggggacgtgttaggagagaaaaaaaaaaaaacaaaaatatatatgggggaaattaacttttttttttcattgaaccaagtgcaatgcatcagagagttttcctatctttgtatgttaagagattaagaaaaaaaaattctatttttgttgtaatgtcctcgcggctctggggacgctaaaagaaccgggcctgccccgccctgcgcggggataacgaaagctgagtgtttttcccttttttttgttcgtttttagtttttttttttttaagtcgttttcctgcgttgacgaggatgatctggggtttttatttgtttcgtcgttcgttctgtttcggtgggagggctgaaggaaacgttcacattttagagtttaaaaaaaacacctcgacatttaaaaaatcaaccaacacaagatcaaaaaggaaaaggacgagagaaaaattatttttaagataattaaacataaaaccctggtgcttcttacattataaagtacgttttaaagaacccacaaactattatacataagtttatgaatcaattaaatatcctgcacttgttaggaatacgcatatcccttctttgttgagtttaacggaacgggacagcggcgtgcccccggcggctggactgctccggccgcgggtctccccgggcgcccctccctggggcccagcacccctcctcgccccatccccgtccgggtacgggggcgcggcaggggtccccggcccctcccccgcagaggtcaatgccaacgaacaaacgtcccctccctccgtcgggctccgttcccaattgatattctacgggaccatgagggcaacaggnggtgttaggttttgttaggg

SEQ ID NO: 314713 - DNA, 1677 bp, Homo sapiens
gcggccgccgcctgccgggcctcccctcgccgcggccggccgccgcgctcccgcccgggcgcccagctatgtactccccgtactgcctcacccaggatgagttccacccgttcatcgaggcactgctgcctcacgtccgcgctttctcctacacctggttcaacctgcaggcgcggaagcgcaagtacttcaagaagcatgaaaagcggatgtcgaaggacgaggagcgggcggtgaaggacgagctgctgggcgagaagcccgagatcaagcagaagtgggcatcccggctgctggccaagctgcgcaaggacatccggcccgagttccgcgaggacttcgtgctgaccatcacgggcaagaagcccccctgctgcgtgctctccaaccccgaccagaagggcaagatccggcggattgactgcctgcgccaggctgacaaggtgtggcggctggacctggtcatggtgattttgtttaaggggatccccctggaaagtactgatggggagcggctctacaagtcgcctcagtgctcgaaccccggcctgtgcgtccagccacatcacattggagtcacaatcaaagaactggatctttatctggcttactttgtccacactccggaatccggacaatcagatagttcaaaccagcaaggagatgcggacatcaaaccactgcccaacgggcacttaagtttccaggactgttttgtgacttccggggtctggaatgtgacggagctggtgagagtatcacagactcctgttgcaacagcatcagggcccaacttctccctggcggacctggagagtcccagctactacaacatcaaccaggtgaccctggggcggcggtccatcacctcccctccttccaccagcaccaccaagcgccccaagtccatcgatgacagtgagatggagagccctgttgatgacgtgttctatcccgggacaggccgttccccagcagctggcagcagccagtccagcgggtggcccaacgatgtggatgcaggcccggcttctctaaagaagtcaggaaagctggacttctgcagtgccctctcctctcagggcagctccccgcgcatggctttcacccaccacccgctgcctgtgcttgctggagtcagaccagggagcccccgggccacagcatcagccctgcacttcccctccacgtccatcatccagcagtcgagcccgtatttcacgcacccgaccatccgctaccaccaccaccacgggcaggactcactgaaggagtttgtgcagtttgtgtgctcggatggctcgggccaggccaccggacagcattcgcaacgacaggcgcctcctctgccaaccggtttgtcagcatcggaccccgggacggcaactttctgaacatcccacagcagtctcagtcctggttcctctgataagatcgacaaaagaaacaacaaaatgagaagaagaggttcctcgaaaggggggagaagaaattttgagaatggaaaaatcccccagcgcagccagcccgtctgttccctctccgccccgccccgccccgcccccgtcactgcgcttctgttataccatctttgcctgactctctccggcttctccattgaatggctaatgtgtatgtgaaataaagaaataaagaaaaacaaacgcgaaaaaaaaa

SEQ ID NO: 314714 - DNA, 1554 bp, Homo sapiens
gcggccgccgcctgccgggcctcccctcgccgcggccggccgccgcgctcccgcccgggcgcccagctatgtactccccgtactgcctcacccaggatgagttccacccgttcatcgaggcactgctgcctcacgtccgcgctttctcctacacctggttcaacctgcaggcgcggaagcgcaagtacttcaagaagcatgaaaagcggatgtcgaaggacgaggagcgggcggtgaaggacgagctgctgggcgagaagcccgagatcaagcagaagtgggcatcccggctgctggccaagctgcgcaaggacatccggcccgagttccgcgaggacttcgtgctgaccatcacgggcaagaagcccccctgctgcgtgctctccaaccccgaccagaagggcaagatccggcggattgactgcctgcgccaggctgacaaggtgtggcggctggacctggtcatggtgattttgtttaaggggatccccctggaaagtactgatggggagcggctctacaagtcgcctcagtgctcgaaccccggcctgtgcgtccagccacatcacattggagtcacaatcaaagaactggatctttatctggcttactttgtccacactccggaatccggacaatcagatagttcaaaccagcaaggagatgcggacatcaaaccactgcccaacgggcacttaagtttccaggactgttttgtgacttccggggtctggaatgtgacggagctggtgagagtatcacagactcctgttgcaacagcatcagggcccaacttctccctggcggacctggagagtcccagctactacaacatcaaccaggtgaccctggggcggcggtccatcacctcccctccttccaccagcaccaccaagcgccccaagtccatcgatgacagtgagatggagagccctgttgatgacgtgttctatcccgggacaggccgttccccagcagctggcagcagccagtccagcgggtggcccaacgatgtggatgcagggagcccccgggccacagcatcagccctgcacttcccctccacgtccatcatccagcagtcgagcccgtatttcacgcacccgaccatccgctaccaccaccaccacgggcaggactcactgaaggagtttgtgcagtttgtgtgctcggatggctcgggccaggccaccggacagcattcgcaacgacaggcgcctcctctgccaaccggtttgtcagcatcggaccccgggacggcaactttctgaacatcccacagcagtctcagtcctggttcctctgataagatcgacaaaagaaacaacaaaatgagaagaagaggttcctcgaaaggggggagaagaaattttgagaatggaaaaatcccccagcgcagccagcccgtctgttccctctccgccccgccccgccccgcccccgtcactgcgcttctgttataccatctttgcctgactctctccggcttctccattgaatggctaatgtgtatgtgaaataaagaaataaagaaaaacaaacgcgaaaaaaaaa

SEQ ID NO: 314715 - DNA, 2809 bp, Homo sapiens
  misc_feature (2789)..(2789): n is a, c, g, or t
cgacgacggaaccgccatgggtgctgagtggagagtggggaccgcggaccccgggggcaggatgagttccacccgttcatcgaggcactgctgcctcacgtccgcgctttctcctacacctggttcaacctgcaggcgcggaagcgcaagtacttcaagaagcatgaaaagcggatgtcgaaggacgaggagcgggcggtgaaggacgagctgctgggcgagaagcccgagatcaagcagaagtgggcatcccggctgctggccaagctgcgcaaggacatccggcccgagttccgcgaggacttcgtgctgaccatcacgggcaagaagcccccctgctgcgtgctctccaaccccgaccagaagggcaagatccggcggattgactgcctgcgccaggctgacaagaatccggacaatcagatagttcaaaccagcaaggagatgcggacatcaaaccactgcccaacgggcacttaagtttccaggactgttttgtgacttccggggtctggaatgtgacggagctggtgagagtatcacagactcctgttgcaacagcatcagggcccaacttctccctggcggacctggagagtcccagctactacaacatcaaccaggtgaccctggggcggcggtccatcacctcccctccttccaccagcaccaccaagcgccccaagtccatcgatgacagtgagatggagagccctgttgatgacgtgttctatcccgggacaggccgttccccagcagctggcagcagccagtccagcgggtggcccaacgatgtggatgcaggcccggcttctctaaagaagtcaggaaagctggacttctgcagtgccctctcctctcagggcagctccccgcgcatggctttcacccaccacccgctgcctgtgcttgctggagtcagaccagggagcccccgggccacagcatcagccctgcacttcccctccacgtccatcatccagcagtcgagcccgtatttcacgcacccgaccatccgctaccaccaccaccacgggcaggactcactgaaggagtttgtgcagtttgtgtgctcggatggctcgggccaggccaccggacagcattcgcaacgacaggcgcctcctctgccaaccggtttgtcagcatcggaccccgggacggcaactttctgaacatcccacagcagtctcagtcctggttcctctgataagatcgacaaaagaaacaacaaaatgagaagaagaggttcctcgaaaggggggagaagaaattttgagaatggaaaaatcccccagcccagcccagccccaccgaaaagcaaaaattacacgtcgtcagccactcagcccttctctcctccagcccggggacccccgcgggccccagaagcagcccagttctcagagagcccttggaaggggtctcggtggagctgtgcaccagcagccaagcagaaagaaacacgcgacatggactctgtcaagtagaggacagaaagcaagaaaggatgcagaactgccttcctccccctgaccccgccccggccttctggggaaggaacaaagtccccaaacaaagcaaccagcacaattctgaaggggcctggcctccaccctcaccccttcctaggggaagggccgggcgtgacgcgcggtcaaagtgcaatgatttttcagttcggttggctaaacagggtcagagctgagagcgaagcagaaggggctccctgtccggcccacgtgccctttccctcgacgacagtcgagggctcgggctctgtgggactgtgggagctagggtctgcggggcgcctgcccgggcgaggtcggaagctgcaggccagctgggcccgggccggagcgtgcccggcggggctgcccgggcgggcagggggtgggggctgctcctttcccaagtggtgttgtgaggggcaatgagggcaacaggagatgtggggacgtgttaggagagaaaaaaaaaaaaacaaaaatatatatgggggaaattaacttttttttttcattgaaccaagtgcaatgcatcagagagttttcctatctttgtatgttaagagattaagaaaaaaaaattctatttttgttgtaatgtcctcgcggctctggggacgctaaaagaaccgggcctgccccgccctgcgcggggataacgaaagctgagtgtttttcccttttttttgttcgtttttagtttttttttttttaagtcgttttcctgcgttgacgaggatgatctggggtttttatttgtttcgtcgttcgttctgtttcggtgggagggctgaaggaaacgttcacattttagagtttaaaaaaaacacctcgacatttaaaaaatcaaccaacacaagatcaaaaaggaaaaggacgagagaaaaattatttttaagataattaaacataaaaccctggtgcttcttacattataaagtacgttttaaagaacccacaaactattatacataagtttatgaatcaattaaatatcctgcacttgttaggaatacgcatatcccttctttgttgagtttaacggaacgggacagcggcgtgcccccggcggctggactgctccggccgcgggtctccccgggcgcccctccctggggcccagcacccctcctcgccccatccccgtccgggtacgggggcgcggcaggggtccccggcccctcccccgcagaggtcaatgccaacgaacaaacgtcccctccctccgtcgggctccgttcccaattgatattctacgggaccatgagggcaacaggnggtgttaggttttgttaggg

SEQ ID NO: 314716 - DNA, 2440 bp, Homo sapiens
  misc_feature (2420)..(2420): n is a, c, g, or t
ccaaggctccagcttcttcccccagctgctcccgaccaggagggggagagcagcctccacttaccccaccccacccttgggctaaaagcccccaggcgggcagggggtgacccctggagctagttgcgtgtcccagaatggagggtgttctgacaccccaccctgagccgcaagagcagtcctggggccctggacccctctgtacagtccgtaggaaaaagtcggaatgctctcgacggcctcgtcccagcctgggacaggccccctttcccctctctctgcaggccaggagggcctccttcctgccacgagggaggggagtcgggccccaggtcgcccccgcccccagccctgcatgcaggtgccctcgctccgccccatcagttcctgcccctgcccctcatgcagactgccctgctggggccgggccggagggtggagcagaaaggggaccccggagccgagcgaggaggaccaggcagccgccgctgccgcgctaagccaccacctgcgcttaggtaggcgtcctgctcgccgactttcagttccttgggagggtgttgggtgtcgtccttttcaaaagtgttttggagctttctgtgccccccgactttcccccgcctccccgccccccacgtggccacttttctctggattttagctgtaatgtctttactctttatttaggggtggggcattcattgtttggggtcttcagaagcccccctgggagggaggggaggatgagcacgcccagctcccctccagggtgtgacttggcccctctggcttgtctttctgtgccttactcctcctcctgcgtctcccgttcctggccccttcttgagtccttgtgcctctctctttctctctctttcttaattgtatgaaaacacaaagcacaggtcaggatcctctgagagaaaatcaacattgcaccacgtaggggtgggctatgggctgtatttattgtgaatctagtttgtgaggctgtggccccgagctggcggagggagggaagaggagggagtgacgggaggggaggaggtcagcgacctggggccgtagcggcaggcgaacggtgcctgctacccagctggaagccacaaggtggctggctccaggggcggcttttgttggaagttgagtgaagccctccccctgtcctcagcgtgcagccctagaggaccccagggctgaggggcagtggatcctgcgggagtctcccggggcgtggggagtaaggccccgggggtggggggccgggtgggccgggcgtgacgcgcggtcaaagtgcaatgatttttcagttcggttggctaaacagggtcagagctgagagcgaagcagaaggggctccctgtccggcccacgtgccctttccctcgacgacagtcgagggctcgggctctgtgggactgtgggagctagggtctgcggggcgcctgcccgggcgaggtcggaagctgcaggccagctgggcccgggccggagcgtgcccggcggggctgcccgggcgggcagggggtgggggctgctcctttcccaagtggtgttgtgaggggcaatgagggcaacaggagatgtggggacgtgttaggagagaaaaaaaaaaaaacaaaaatatatatgggggaaattaacttttttttttcattgaaccaagtgcaatgcatcagagagttttcctatctttgtatgttaagagattaagaaaaaaaaattctatttttgttgtaatgtcctcgcggctctggggacgctaaaagaaccgggcctgccccgccctgcgcggggataacgaaagctgagtgtttttcccttttttttgttcgtttttagtttttttttttttaagtcgttttcctgcgttgacgaggatgatctggggtttttatttgtttcgtcgttcgttctgtttcggtgggagggctgaaggaaacgttcacattttagagtttaaaaaaaacacctcgacatttaaaaaatcaaccaacacaagatcaaaaaggaaaaggacgagagaaaaattatttttaagataattaaacataaaaccctggtgcttcttacattataaagtacgttttaaagaacccacaaactattatacataagtttatgaatcaattaaatatcctgcacttgttaggaatacgcatatcccttctttgttgagtttaacggaacgggacagcggcgtgcccccggcggctggactgctccggccgcgggtctccccgggcgcccctccctggggcccagcacccctcctcgccccatccccgtccgggtacgggggcgcggcaggggtccccggcccctcccccgcagaggtcaatgccaacgaacaaacgtcccctccctccgtcgggctccgttcccaattgatattctacgggaccatgagggcaacaggnggtgttaggttttgttaggg

SEQ ID NO: 314717 - DNA, 950 bp, Homo sapiens
gcggccgccgcctgccgggcctcccctcgccgcggccggccgccgcgctcccgcccgggcgcccagctatgtactccccgtactgcctcacccaggatgagttccacccgttcatcgaggcactgctgcctcacgtccgcgctttctcctacacctggttcaacctgcaggcgcggaagcgcaagtacttcaagaagcatgaaaagcggatgtcgaaggacgaggagcgggcggtgaaggacgagctgctgggcgagaagcccgagatcaagcagaagtgggcatcccggctgctggccaagctgcgcaaggacatccggcccgagttccgcgaggacttcgtgctgaccatcacgggcaagaagcccccctgctgcgtgctctccaaccccgaccagaagggcaagatccggcggattgactgcctgcgccaggctgacaaggtgtggcggctggacctggtcatggtgattttgtttaaggggatccccctggaaagtactgatggggagcggctctacaagtcgcctcagtgctcgaaccccggcctgtgcgtccagccacatcacattggagtcacaatcaaagaactggatctttatctggcttactttgtccacactccgggtaggtcgttctcaaccatttttccctctcattttattttcctctctatgtattaattccctgaattctcaccctgattctagttttaagcctgtgctcctggctgggtgtgtgtgcactcaggtgatgtgcataatatgtgtagtgaggaatcagcaaaccagacctggggaccagggaggcttcctagaagacgacctacttgacctgcaccttgaaagacagtgaggaattagctcgttttgtcagctgcctgagccttctcagtgtgcctggagctgattccctcctcacaatggttgagtgatatagacagggcaggt

SEQ ID NO: 314718 - DNA, 661 bp, Homo sapiens
atcatatcatacatgctgttttatagtttgcctttttcgtagactatatcctagacagctctccatgtcagtgaacctagatatattatttataataactgaattataaaccattgtctgaatatttaggtagaattcaatttctcagcattacaaaaatgccatgctaagtatccttattacatgcctttctgttcatacaaatgataaatttctggaactgaaattgctgggacaaagggtatcagggtacacagctttacatgatgctatgtactaccaaatggacccccaagaaagacagtttaagtggcatgtcattgtcttcccaagtctgttcctaatgcagtcccacatgttcagtaaaacatcaagacacatcagttgggccaggcacggtggctcgcacttgtaatcccagcactttgggaggtcgaggcaggtggatcacttgagttgaggagttcgagatcaacctggccaacctggtgaaacccccatctctacaaaaataagccaggcctggtggtgcatgcctgtagtcccagctactaaggaggctgaggtgggagaatcgcttgaacccaggaggcagaggttgcattgggcctagatcatgccactgcactccagcctgggcgtcagagtgagaccctgtctc

SEQ ID NO: 314719 - DNA, 2059 bp, Homo sapiens
tcaagtctgttttcctcgcagcggtgcccacacccctagcatactgcctggcacacagtaaatgctcattaaatatttgtgaggtacatggacaggggaatgtggtagacagctgatgaagctgttctcccactgttcccctaggtggatcatccaaagtcaatcgattctgaactctgaggtccaagttctgccctcccccttcactctccccacaagtgggcgggacaatcctcccatgacttaagcacaggtggacaggggtggtcagagagaggaaggggcactcagagatccagcaggtgctgcaccatgagtgtctctgtgctgagccccagcagactcctgggtgatgtctctggaatcctccaagcggcctccctgctcattctgcttctgctgctgatcaaggcagttcagctctacctgcacaggcagtggctgctcaaagccctccagcagttcccgtgccctccctcccactggctcttcgggcacatccaggagctccaacaggaccaggagctacaacggattcagaaatgggtggagacattcccaagtgcctgtcctcattggctatggggaggcaaagttcgtgtccagctctatgaccctgactatatgaaggtgattctggggagatcagacccgaaatcccatggttcctacagattcctggctccatggattgggtacggcttgctcctgttgaatgggcagacatggttccagcatcgacggatgctgaccccagccttccactatgacatcctgaagccctatgtggggctcatggcagactctgtacgagtgatgctggacaaatgggaagagctccttggccaggattcccctctggaggtctttcagcacgtctccttgatgaccctggacaccatcatgaagtgtgccttcagccatcagggcagcatccaggtggacaggaattctcagtcctacatacaggccattagtgacctgaacaacctggttttttcccgtgtgaggaatgcctttcaccagaatgacaccatctacagcctgacctctgctggccgctggacacaccgcgcctgccagctggcccatcagcacacagaccaagtgatccaactgaggaaggctcaactacagaaggagggggagctggagaagatcaagaggaagaggcatttggattttctggatatcctcctcttggccaaaatggagaatgggagcatcttgtcagacaaggacctccgtgctgaggtggacacgttcatgtttgagggccacgacaccacagccagtgggatctcctggatcctctatgctctggccacacaccccaagcatcaggagaggtgccgggaggagatccacagcctcctgggtgatggagcctccatcacctggaaccacctggaccagatgccctacaccaccatgtgcattaaggaggcactgaggctctacccaccggtgccaggcattggcagagagctcagcactcccgtcaccttccctgatgggcgctccttgcccaaaggtatcatggtcctcctctccatttatggccttcaccacaacccaaaagtgtggcccaacccagaggtgtttgacccttcccgttttgcaccgggttctgctcaacacagccacgctttcctgcccttctcaggaggatcaaggaactgcatcgggaaacaatttgccatgaacgagctgaaggtggccacggccctgaccctgctccgctttgagctgctgcctgatcccaccaggatccccatccccattgcacgacttgtgttgaaatccaaaaatggaatccacctgcgtctcaggaggctccctaacccttgtgaagacaaggaccagctttgagggcctccacctgccgtcctgtcttcctgacccccgcttctgtccccttcctgtctgcccatatcctgttttctccagactgtctgcccatacacctgtctccttcttcctgcctgcttgtctgttcctatattagtttcctattactgctgtaataaactatcacaatctcagtgattttaaataa

SEQ ID NO: 314720 - DNA, 2760 bp, Homo sapiens
  misc_feature (2375)..(2376): n is a, c, g, or t
  misc_feature (2410)..(2410): n is a, c, g, or t
tcaagtctgttttcctcgcagcggtgcccacacccctagcatactgcctggcacacagtaaatgctcattaaatatttgtgaggtacatggacaggggaatgtggtagacagctgatgaagctgttctcccactgttcccctaggtggatcatccaaagtcaatcgattctgaactctgaggtccaagttctgccctcccccttcactctccccacaagtgggcgggacaatcctcccatgacttaagcacaggtggacaggggtggtcagagagaggaaggggcactcagagatccagcaggtgctgcaccatgagtgtctctgtgctgagccccagcagactcctgggtgatgtctctggaatcctccaagcggcctccctgctcattctgcttctgctgctgatcaaggcagttcagctctacctgcacaggcagtggctgctcaaagccctccagcagttcccgtgccctccctcccactggctcttcgggcacatccaggagctccaacaggaccaggagctacaacggattcagaaatgggtggagacattcccaagtgcctgtcctcattggctatggggaggcaaagttcgtgtccagctctatgaccctgactatatgaaggtgattctggggagatcagacccgaaatcccatggttcctacagattcctggctccatggattgggtacggcttgctcctgttgaatgggcagacatggttccagcatcgacggatgctgaccccagccttccactatgacatcctgaagccctatgtggggctcatggcagactctgtacgagtgatgctggacaaatgggaagagctccttggccaggattcccctctggaggtctttcagcacgtctccttgatgaccctggacaccatcatgaagtgtgccttcagccatcagggcagcatccaggtggacaggaattctcagtcctacatacaggccattagtgacctgaacaacctggttttttcccgtgtgaggaatgcctttcaccagaatgacaccatctacagcctgacctctgctggccgctggacacaccgcgcctgccagctggcccatcagcacacagaccaagtgatccaactgaggaaggctcaactacagaaggagggggagctggagaagatcaagaggaagaggcatttggattttctggatatcctcctcttggccaaaatggagaatgggagcatcttgtcagacaaggacctccgtgctgaggtggacacgttcatgtttgagggccacgacaccacagccagtgggatctcctggatcctctatgctctggccacacaccccaagcatcaggagaggtgccgggaggagatccacagcctcctgggtgatggagcctccatcacctggaaccacctggaccagatgccctacaccaccatgtgcattaaggaggcactgaggctctacccaccggtgccaggcattggcagagagctcagcactcccgtcaccttccctgatgggcgctccttgcccaaaggtatcatggtcctcctctccatttatggccttcaccacaacccaaaagtgtggcccaacccagaggtgtttgacccttcccgttttgcaccgggttctgctcaacacagccacgctttcctgcccttctcaggaggatcaaggaactgcatcgggaaacaatttgccatgaacgagctgaaggtggccacggccctgaccctgctccgctttgagctgctgcctgatcccaccaggatccccatccccattgcacgacttgtgttgaaatccaaaaatggaatccacctgcgtctcaggaggctccctaacccttgtgaagacaaggaccagctttgagggcctccacctgccgtcctgtcttcctgacccccgcttctgtccccttcctgtctgcccatatcctgttttctgtctgcccaccttcccttcttcccacctgcctgctgtcccccagtctgcctgcccttctctctctcacctttctccaggctccctacctgcttgtctacctgtctcctacccacctgtatctcttgttgggagaaaagctgagtgttgggagaagctgaggccgagcttgcatgtctgacataatgtaaaagagtcttgaatcatgtccaggatccagggtctaaaaccccttgtggcctttggaacaccaagctctgtgctgaagggtggaaggctaccctgacgcaccataatctaagcccggggcatggacttgctggctccttgctccttgctctcccaggatcaattgtatcttgagttaaaagaacctgctctccattatctcaagtaacagagcagatgctaaaccgtcacagctgtaaatnntgtgcttaatgcaacatgccctttcgacccaccncattctcaccacctgtttctttgtttgatcaccaataaataatctgcacttccagagctcggggccttcacagcctccatccttagctttggcgccctggacccactttctctctcaaactgtcttttctcactgctttgactctgccggactttgtcacccccacgacctggtgttgggtctgaacaccccaacatccctgaatctccacccacctcccaaactcctgcctgccctccagactgtctgcccatacacctgtctccttcttcctgcctgcttgtctgttcctatattagtttcctattactgctgtaataaactatcacaatctcagtgattttaaataa

SEQ ID NO: 314721 - DNA, 2205 bp, Homo sapiens
  misc_feature (1820)..(1821): n is a, c, g, or t
  misc_feature (1855)..(1855): n is a, c, g, or t
tcaagtctgttttcctcgcagcggtgcccacacccctagcatactgcctggcacacagtaaatgctcattaaatatttgtgaggtacatggacaggggaatgtggtagacagctgatgaagctgttctcccactgttcccctaggtggatcatccaaagtcaatcgattctgaactctgaggtccaagttctgccctcccccttcactctccccacaagtgggcgggacaatcctcccatgacttaagcacaggtggacaggggtggtcagagagaggaaggggcactcagagatccagcaggtgctgcaccatgagtgtctctgtgctgagccccagcagactcctgggtgatgtctctggaatcctccaagcggcctccctgctcattctgcttctgctgctgatcaaggcagttcagctctacctgcacaggcagtggctgctcaaagccctccagcagttcccgtgccctccctcccactggctcttcgggcacatccaggagctccaacaggaccaggagctacaacggattcagaaatgggtggagacattcccaagtgcctgtcctcattggctatggggaggcaaagttcgtgtccagctctatgaccctgactatatgaaggtgattctggggagatcagacccgaaatcccatggttcctacagattcctggctccatggattgggtacggcttgctcctgttgaatgggcagacatggttccagcatcgacggatgctgaccccagccttccactatgacatcctgaagccctatgtggggctcatggcagactctgtacgagtgatgctggacaaatgggaagagctccttggccaggattcccctctggaggtctttcagcacgtctccttgatgaccctggacaccatcatgaagtgtgccttcagcattggcagagagctcagcactcccgtcaccttccctgatgggcgctccttgcccaaaggtatcatggtcctcctctccatttatggccttcaccacaacccaaaagtgtggcccaacccagaggtgtttgacccttcccgttttgcaccgggttctgctcaacacagccacgctttcctgcccttctcaggaggatcaaggaactgcatcgggaaacaatttgccatgaacgagctgaaggtggccacggccctgaccctgctccgctttgagctgctgcctgatcccaccaggatccccatccccattgcacgacttgtgttgaaatccaaaaatggaatccacctgcgtctcaggaggctccctaacccttgtgaagacaaggaccagctttgagggcctccacctgccgtcctgtcttcctgacccccgcttctgtccccttcctgtctgcccatatcctgttttctgtctgcccaccttcccttcttcccacctgcctgctgtcccccagtctgcctgcccttctctctctcacctttctccaggctccctacctgcttgtctacctgtctcctacccacctgtatctcttgttgggagaaaagctgagtgttgggagaagctgaggccgagcttgcatgtctgacataatgtaaaagagtcttgaatcatgtccaggatccagggtctaaaaccccttgtggcctttggaacaccaagctctgtgctgaagggtggaaggctaccctgacgcaccataatctaagcccggggcatggacttgctggctccttgctccttgctctcccaggatcaattgtatcttgagttaaaagaacctgctctccattatctcaagtaacagagcagatgctaaaccgtcacagctgtaaatnntgtgcttaatgcaacatgccctttcgacccaccncattctcaccacctgtttctttgtttgatcaccaataaataatctgcacttccagagctcggggccttcacagcctccatccttagctttggcgccctggacccactttctctctcaaactgtcttttctcactgctttgactctgccggactttgtcacccccacgacctggtgttgggtctgaacaccccaacatccctgaatctccacccacctcccaaactcctgcctgccctccagactgtctgcccatacacctgtctccttcttcctgcctgcttgtctgttcctatattagtttcctattactgctgtaataaactatcacaatctcagtgattttaaataa

SEQ ID NO: 314722 - DNA, 1565 bp, Homo sapiens
tcaagtctgttttcctcgcagcggtgcccacacccctagcatactgcctggcacacagtaaatgctcattaaatatttgtgaggtacatggacaggggaatgtggtagacagctgatgaagctgttctcccactgttcccctaggtggatcatccaaagtcaatcgattctgaactctgaggtccaagttctgccctcccccttcactctccccacaagtgggcgggacaatcctcccatgacttaagcacaggtggacaggggtggtcagagagaggaaggggcactcagagatccagcaggtgctgcaccatgagtgtctctgtgctgagccccagcagactcctgggtgatgtctctggaatcctccaagcggcctccctgctcattctgcttctgctgctgatcaaggcagttcagctctacctgcacaggcagtggctgctcaaagccctccagcagttcccgtgccctccctcccactggctcttcgggcacatccaggagctccaacaggaccaggagctacaacggattcagaaatgggtggagacattcccaagtgcctgtcctcattggctatggggaggcaaagttcgtgtccagctctatgaccctgactatatgaaggtgattctggggagatcagacccgaaatcccatggttcctacagattcctggctccatggattgggtacggcttgctcctgttgaatgggcagacatggttccagcatcgacggatgctgaccccagccttccactatgacatcctgaagccctatgtggggctcatggcagactctgtacgagtgatgctggacaaatgggaagagctccttggccaggattcccctctggaggtctttcagcacgtctccttgatgaccctggacaccatcatgaagtgtgccttcagccatcagggcagcatccaggtggacaggaattctcagtcctacatacaggccattagtgacctgaacaacctggttttttcccgtgtgaggaatgcctttcaccagaatgacaccatctacagcctgacctctgctggccgctggacacaccgcgcctgccagctggcccatcagcacacagaccaagtgatccaactgaggaaggctcaactacagaaggagggggagctggagaagatcaagaggaagaggcatttggattttctggatatcctcctcttggccaaaatggagaatgggagcatcttgtcagacaaggacctccgtgctgaggtggacacgttcatgtttgagggccacgacaccacagccagtgggatctcctggatcctctatgctctggccacacaccccaagcatcaggagaggtgccgggaggagatccacagcctcctgggtgatggagcctccatcacctggaaccacctggaccagatgccctacaccaccatgtgcattaaggaggcactgaggctctacccaccggtgccaggcattggcagagagctcagcactcccgtcaccttccctgatgggcgctccttgcccaaaggtatgaagtttccccaccctctcacccaaag

SEQ ID NO: 314723 - DNA, 1179 bp, Homo sapiens
  misc_feature (1072)..(1072): n is a, c, g, or t
  misc_feature (1087)..(1087): n is a, c, g, or t
  misc_feature (1163)..(1163): n is a, c, g, or t
  misc_feature (1168)..(1168): n is a, c, g, or t
  misc_feature (1173)..(1173): n is a, c, g, or t
tcaagtctgttttcctcgcagcggtgcccacacccctagcatactgcctggcacacagtaaatgctcattaaatatttgtgaggtacatggacaggggaatgtggtagacagctgatgaagctgttctcccactgttcccctaggtggatcatccaaagtcaatcgattctgaactctgaggtccaagttctgccctcccccttcactctccccacaagtgggcgggacaatcctcccatgacttaagcacaggtggacaggggtggtcagagagaggaaggggcactcagagatccagcaggtgctgcaccatgagtgtctctgtgctgagccccagcagactcctgggtgatgtctctggaatcctccaagcggcctccctgctcattctgcttctgctgctgatcaaggcagttcagctctacctgcacaggcagtggctgctcaaagccctccagcagttcccgtgccctccctcccactggctcttcgggcacatccaggagctccaacaggaccaggagctacaacggattcagaaatgggtggagacattcccaagtgcctgtcctcattggctatggggaggcaaagttcgtgtccagctctatgaccctgactatatgaaggtgattctggggagatcagacccgaaatcccatggttcctacagattcctggctccatggattgggtacggcttgctcctgttgaatgggcagacatggttccagcatcgacggatgctgaccccagccttccactatgacatcctgaagccctatgtggggctcatggcagactctgtacgagtgatgctggtgagtccatgtctctctcctctccccacacccactcacagcacacactctcaccaactccactctcaaccctgtgtcccacaggcagacatagacatagactcatggaacaacactctcaggtcattgctgtgagagtagagggttccccaggagttgtattaaggtagggagaacacccagggcattcaggtcatattccacgcttttgtttccccaccatagggaagtaggagattcatgggtggantggcaagggcccttnttccttccccatttttgggaacctttcaggcacaaggggattgggagggattttggcattttttgttgggacagtnggggntttcnattggt

SEQ ID NO: 314724 - DNA, 809 bp, Homo sapiens
tcaagtctgttttcctcgcagcggtgcccacacccctagcatactgcctggcacacagtaaatgctcattaaatatttgtgaggtacatggacaggggaatgtggtagacagctgatgaagctgttctcccactgttcccctaggtggatcatccaaagtcaatcgattctgaactctgaggtccaagttctgccctcccccttcactctccccacaagtgggcgggacaatcctcccatgacttaagcacaggtggacaggggtggtcagagagaggaaggggcactcagagatccagcaggtgctgcaccatgagtgtctctgtgctgagccccagcagactcctgggtgatgtctctggaatcctccaagcggcctccctgctcattctgcttctgctgctgatcaaggcagttcagctctacctgcacaggcagtggctgctcaaagccctccagcagttcccgtgccctccctcccactggctcttcgggcacatccaggagctccaacaggaccaggagctacaacggattcagaaatgggtggagacattcccaagtgcctgtcctcattggctatggggaggcaaagttcgtgtccagctctatgaccctgactatatgaaggtgattctggggagatcagacccgaaatcccatggttcctacagattcctggctccatggattgctccagactgtctgcccatacacctgtctccttcttcctgcctgcttgtctgttcctatattagtttcctattactgctgtaataaactatcacaatctcagtgattttaaataa

SEQ ID NO: 314725 - DNA, 2814 bp, Homo sapiens
  misc_feature (2429)..(2430): n is a, c, g, or t
  misc_feature (2464)..(2464): n is a, c, g, or t
tcaagtctgttttcctcgcagcggtgcccacacccctagcatactgcctggcacacagtaaatgctcattaaatatttgtgaggtacatggacaggggaatgtggtagacagctgatgaagctgttctcccactgttcccctaggtggatcatccaaagtcaatcgattctgaactctgaggtccaagttctgccctcccccttcactctccccacaagtgggcgggacaatcctcccatgacttaagcacaggtggacaggggtggtcagagagaggaaggggcactcagagatccagcaggtgctgcaccatgagtgtctctgtgctgagccccagcagactcctgggtgatgtctctggaatcctccaagcggcctccctgctcattctgcttctgctgctgatcaaggcagttcagctctacctgcacaggcagtggctgctcaaagccctccagcagttcccgtgccctccctcccactggctcttcgggcacatccaggagctccaacaggaccaggagctacaacggattcagaaatgggtggagacattcccaagtgcctgtcctcattggctatggggaggcaaagttcgtgtccagctctatgaccctgactatatgaaggtgattctggggagatcagacccgaaatcccatggttcctacagattcctggctccatggattgggtacggcttgctcctgttgaatgggcagacatggttccagcatcgacggatgctgaccccagccttccactatgacatcctgaagccctatgtggggctcatggcagactctgtacgagtgatgctggacaaatgggaagagctccttggccaggattcccctctggaggtctttcagcacgtctccttgatgaccctggacaccatcatgaagtgtgccttcagccatcagggcagcatccaggtggacaggaattctcagtcctacatacaggccattagtgacctgaacaacctggttttttcccgtgtgaggaatgcctttcaccagaatgacaccatctacagcctgacctctgctggccgctggacacaccgcgcctgccagctggcccatcagcacacagaccaagtgatccaactgaggaaggctcaactacagaaggagggggagctggagaagatcaagaggaagaggcatttggattttctggatatcctcctcttggccaaaatggagaatgggagcatcttgtcagacaaggacctccgtgctgaggtggacacgttcatgtttgagggccacgacaccacagccagtgggatctcctggatcctctatgctctggccacacaccccaagcatcaggagaggtgccgggaggagatccacagcctcctgggtgatggagcctccatcacctggaaccacctggaccagatgccctacaccaccatgtgcattaaggaggcactgaggctctacccaccggtgccaggcattggcagagagctcagcactcccgtcaccttccctgatgggcgctccttgcccaaaggtatcatggtcctcctctccatttatggccttcaccacaacccaaaagtgtggcccaacccagaggtgtttgacccttcccgttttgcaccgggttctgctcaacacagccacgctttcctgcccttctcaggaggatcaaggaactgcatcgggaaacaatttgccatgaacgagctgaaggtggccacggccctgaccctgctccgctttgagctgctgcctgatcccaccaggatccccatccccattgcacgacttgtgttgaaatccaaaaatggaatccacctgcgtctcaggaggctccctaacccttgtgaagacaaggaccagctttgagggcctccacctgccgtcctgtcttcctgacccccgcttctgtccccttcctgtctgcccatatcctgttttctgtctgcccaccttcccttcttcccacctgcctgctgtcccccagtctgcctgcccttctctctctcacctttctccaggctccctacctgcttgtctacctgtctcctacccacctgtatctcttgttgggagaaaagctgagtgttgggagaagctgaggccgagcttgcatgtctgacataatgtaaaagagtcttgaatcatgtccaggatccagggtctaaaaccccttgtggcctttggaacaccaagctctgtgctgaagggtggaaggctaccctgacgcaccataatctaagcccggggcataaaacccctcgtggcttggatagaatccagggctcgtggctctggaatgtgtctggacttgctggctccttgctccttgctctcccaggatcaattgtatcttgagttaaaagaacctgctctccattatctcaagtaacagagcagatgctaaaccgtcacagctgtaaatnntgtgcttaatgcaacatgccctttcgacccaccncattctcaccacctgtttctttgtttgatcaccaataaataatctgcacttccagagctcggggccttcacagcctccatccttagctttggcgccctggacccactttctctctcaaactgtcttttctcactgctttgactctgccggactttgtcacccccacgacctggtgttgggtctgaacaccccaacatccctgaatctccacccacctcccaaactcctgcctgccctccagactgtctgcccatacacctgtctccttcttcctgcctgcttgtctgttcctatattagtttcctattactgctgtaataaactatcacaatctcagtgattttaaataa

SEQ ID NO: 314726 - DNA, 2707 bp, Homo sapiens
  misc_feature (2322)..(2323): n is a, c, g, or t
  misc_feature (2357)..(2357): n is a, c, g, or t
tcaagtctgttttcctcgcagcggtgcccacacccctagcatactgcctggcacacagtaaatgctcattaaatatttgtgaggtacatggacaggggaatgtggtagacagctgatgaagctgttctcccactgttcccctaggtggatcatccaaagtcaatcgattctgaactctgaggtccaagttctgccctcccccttcactctccccacaagtgggcgggacaatcctcccatgacttaagcacaggtggacaggggtggtcagagagaggaaggggcactcagagatccagcaggtgctgcaccatgagtgtctctgtgctgagccccagcagactcctgggtgatgtctctggaatcctccaagcggcctccctgctcattctgcttctgctgctgatcaaggcagttcagctctacctgcacaggcagtggctgctcaaagccctccagcagttcccgtgccctccctcccactggctcttcgggcacatccaggagctccaacaggaccaggagctacaacggattcagaaatgggtggagacattcccaagtgcctgtcctcattggctatggggaggcaaagttcgtgtccagctctatgaccctgactatatgaaggtgattctggggagatcagacccgaaatcccatggttcctacagattcctggctccatggattgggtacggcttgctcctgttgaatgggcagacatggttccagcatcgacggatgctgaccccagccttccactatgacatcctgaagccctatgtggggctcatggcagactctgtacgagtgatgctggacaaatgggaagagctccttggccaggattcccctctggaggtctttcagcacgtctccttgatgaccctggacaccatcatgaagtgtgccttcagccatcagggcagcatccaggtggacaggaattctcagtcctacatacaggccattagtgacctgaacaacctggttttttcccgtgtgaggaatgcctttcaccagaatgacaccatctacagcctgacctctgctggccgctggacacaccgcgcctgccagctggcccatcagcacacagaccaagtgatccaactgaggaaggctcaactacagaaggagggggagctggagaagatcaagaggaagaggcatttggattttctggatatcctcctcttggccaaaatggagaatgggagcatcttgtcagacaaggacctccgtgctgaggtggacacgttcatgtttgagggccacgacaccacagccagtgggatctcctggatcctctatgctctggccacacaccccaagcatcaggagaggtgccgggaggagatccacagcctcctgggtgatggagcctccatcacctggaaccacctggaccagatgccctacaccaccatgtgcattaaggaggcactgaggctctacccaccggtgccaggcattggcagagagctcagcactcccgtcaccttccctgatgggcgctccttgcccaaaggtatcatggtcctcctctccatttatggccttcaccacaacccaaaagtgtggcccaacccagaggtgtttgacccttcccgttttgcaccgggttctgctcaacacagccacgctttcctgcccttctcaggaggatcaaggaactgcatcgggaaacaatttgccatgaacgagctgaaggtggccacggccctgaccctgctccgctttgagctgctgcctgatcccaccaggatccccatccccattgcacgacttgtgttgaaatccagaccagctttgagggcctccacctgccgtcctgtcttcctgacccccgcttctgtccccttcctgtctgcccatatcctgttttctgtctgcccaccttcccttcttcccacctgcctgctgtcccccagtctgcctgcccttctctctctcacctttctccaggctccctacctgcttgtctacctgtctcctacccacctgtatctcttgttgggagaaaagctgagtgttgggagaagctgaggccgagcttgcatgtctgacataatgtaaaagagtcttgaatcatgtccaggatccagggtctaaaaccccttgtggcctttggaacaccaagctctgtgctgaagggtggaaggctaccctgacgcaccataatctaagcccggggcatggacttgctggctccttgctccttgctctcccaggatcaattgtatcttgagttaaaagaacctgctctccattatctcaagtaacagagcagatgctaaaccgtcacagctgtaaatnntgtgcttaatgcaacatgccctttcgacccaccncattctcaccacctgtttctttgtttgatcaccaataaataatctgcacttccagagctcggggccttcacagcctccatccttagctttggcgccctggacccactttctctctcaaactgtcttttctcactgctttgactctgccggactttgtcacccccacgacctggtgttgggtctgaacaccccaacatccctgaatctccacccacctcccaaactcctgcctgccctccagactgtctgcccatacacctgtctccttcttcctgcctgcttgtctgttcctatattagtttcctattactgctgtaataaactatcacaatctcagtgattttaaataa

SEQ ID NO: 314727 - DNA, 2216 bp, Homo sapiens
tcaagtctgttttcctcgcagcggtgcccacacccctagcatactgcctggcacacagtaaatgctcattaaatatttgtgaggtacatggacaggggaatgtggtagacagctgatgaagctgttctcccactgttcccctaggtggatcatccaaagtcaatcgattctgaactctgaggtccaagttctgccctcccccttcactctccccacaagtgggcgggacaatcctcccatgacttaagcacaggtggacaggggtggtcagagagaggaaggggcactcagagatccagcaggtgctgcaccatgagtgtctctgtgctgagccccagcagactcctgggtgatgtctctggaatcctccaagcggcctccctgctcattctgcttctgctgctgatcaaggcagttcagctctacctgcacaggcagtggctgctcaaagccctccagcagttcccgtgccctccctcccactggctcttcgggcacatccaggagctccaacaggaccaggagctacaacggattcagaaatgggtggagacattcccaagtgcctgtcctcattggctatggggaggcaaagttcgtgtccagctctatgaccctgactatatgaaggtgattctggggagatcagacccgaaatcccatggttcctacagattcctggctccatggattgggtacggcttgctcctgttgaatgggcagacatggttccagcatcgacggatgctgaccccagccttccactatgacatcctgaagccctatgtggggctcatggcagactctgtacgagtgatgctggacaaatgggaagagctccttggccaggattcccctctggaggtctttcagcacgtctccttgatgaccctggacaccatcatgaagtgtgccttcagccatcagggcagcatccaggtggacaggaattctcagtcctacatacaggccattagtgacctgaacaacctggttttttcccgtgtgaggaatgcctttcaccagaatgacaccatctacagcctgacctctgctggccgctggacacaccgcgcctgccagctggcccatcagcacacagaccaagtgatccaactgaggaaggctcaactacagaaggagggggagctggagaagatcaagaggaagaggcatttggattttctggatatcctcctcttggccaaaatggagaatgggagcatcttgtcagacaaggacctccgtgctgaggtggacacgttcatgtttgagggccacgacaccacagccagtgggatctcctggatcctctatgctctggccacacaccccaagcatcaggagaggtgccgggaggagatccacagcctcctgggtgatggagcctccatcacctggaaccacctggaccagatgccctacaccaccatgtgcattaaggaggcactgaggctctacccaccggtgccaggcattggcagagagctcagcactcccgtcaccttccctgatgggcgctccttgcccaaaggtatcatggtcctcctctccatttatggccttcaccacaacccaaaagtgtggcccaacccagaggtgtttgacccttcccgttttgcaccgggttctgctcaacacagccacgctttcctgcccttctcaggaggatcaaggtgagacgtcctgtgtggtaattggaatagagaaatgagggaagtctctggtcaaccctctgatctttgtgagcccgatgttcatatgtggcatcttcaggtgtgctcttaaatattggtatttgtgggaaagtcaggcacctggtgtgggcgtctctgtgtacaaaaggaaggtggcattcagagcaccccatggagactttgctccctctgcttcttcaaatgggcagcctgaattcactgtcagtgcatgttccaaacttcagtatattcatgtattttcctcactttaaggatatgaattctcaaaattagatattctccagtaaattcaacttcagctgtttgcttttctcagttgtcaggaatagtaaactgtagatttctctctccccacacatcctcaatgcagcacactaccttccctatttaattcactagtctgtcgtagagatgaatcattgaaatctttgcatctgtttataatacagatgacctgcaagtcctacctttcaagccatataagggagaggttaaggt

SEQ ID NO: 314728 - DNA, 1673 bp, Homo sapiens
tcaagtctgttttcctcgcagcggtgcccacacccctagcatactgcctggcacacagtaaatgctcattaaatatttgtgaggtacatggacaggggaatgtggtagacagctgatgaagctgttctcccactgttcccctaggtggatcatccaaagtcaatcgattctgaactctgaggtccaagttctgccctcccccttcactctccccacaagtgggcgggacaatcctcccatgacttaagcacaggtggacaggggtggtcagagagaggaaggggcactcagagatccagcaggtgctgcaccatgagtgtctctgtgctgagccccagcagactcctgggtgatgtctctggaatcctccaagcggcctccctgctcattctgcttctgctgctgatcaaggcagttcagctctacctgcacaggcagtggctgctcaaagccctccagcagttcccgtgccctccctcccactggctcttcgggcacatccaggagctccaacaggaccaggagctacaacggattcagaaatgggtggagacattcccaagtgcctgtcctcattggctatggggaggcaaagttcgtgtccagctctatgaccctgactatatgaaggtgattctggggagatcagacccgaaatcccatggttcctacagattcctggctccatggattgggtacggcttgctcctgttgaatgggcagacatggttccagcatcgacggatgctgaccccagccttccactatgacatcctgaagccctatgtggggctcatggcagactctgtacgagtgatgctggtgagtccatgtctctctcctctccccacacccactcacagcacacactctcaccaactccactctcaaccctgtgtcccacaggcagacatagacatagactcatggaacaacactctcaggtcattgctgtgagagtagagggttccccaggagttgtattaaggtagggagaacacccagggcattcaggtcatattccacgcttttgtttccccaccatagggaagtaggagattcatggtgaacacaaggcccttctcctcccactttggaacctcagcacaagggactggaggcatatgcaatcttgttggacagtaggacttcctatgctggctggcctgggcaatggcagcttcagtggcagcatggacaggccaagatgtcacccacccaggctctggcctggggccccgggtttctgcatggatttaagccaccctgggaaggaaatgaacaccaggtctatgttctcagagcaataccttccatagatagcatcatctccagtcaggactctgatttctcacccaaactgtgcccagcacattttgatgaatggaaaagaattgaagtccctgttttctctacaacagagtgcccatactagccccttaagctatctttggcactgaaactttcctactagtccctcagaactagctcagctctcagaacactgaagagtcccccattatttatcccagaacaacaataacaacaaaattttcacaagcatatgtcctaactgaatctcaaaattcaatacttaatccatgctattgtgagaggatctgttgaatgttgtattaaaagtgtgtgagaattaggtgtcagtttaccaacac

SEQ ID NO: 314729 - DNA, 1055 bp, Homo sapiens
  misc_feature (993)..(993): n is a, c, g, or t
cgggcgcctacgtgggcaccagcccccgcgcccgcccgcccgccctgcggtccggtcctggcgcccgcgcagaaccagctgtctgagctgcccgggcagcgggggagcagcgagcgggcttccgcgagccggagaaggcacaggcctgtcccgggtcccggcaggtctgcgcgtctgttcccagcgctctgcgaggcctaaaaaggaggagcaacctgtccagaatccctgcaggacaggaaaaggaggggaaatctcgacatggaaaaaccctacaataaaaatgaaggaaacctggaaaacgagggaaagccagaagatgaagtagagcctgatgatgaaggaaagtcagacgaggaagaaaagccagacgtggaggggaagacagaatgcgagggaaagagagaggatgagggagagccaggtgatgagggacaactggaagatgagggaagccaggaaaagcagggcaggtccgaaggtgagggcaagccacaaggcgagggcaagccagcctcccaggcaaagccagagagccagccgcgggccgccgaaaagcgcccggctgaagattatgtgccccggaaagcaaaaagaaaaacggacagggggacggacgattcccccaaggactctcaggaggacttacaggaaaggcatctgagcagtgaggagatgatgagagaatgtggagatgtgtcaagggctcaagaggagctaaggaaaaaacagaaaatgggtggttttcattggatgcaaagagatgtacaggatccattcgccccaaggggacaacggggtgtcaggggagtgaggggtggaggtaggggccagaggggcttacacgatatcccatacctttaatgcctttggccttccattctgatttctctgatgagaatattgctggccctgctttccctggtaggtatttgccaggcccaatgctttaaccttaagctgatactttgctttagatgtcagtctcgttanacaccgacccccattctcctcctatccctcaaccccggcatcattaccgggttttcctctta

SEQ ID NO: 314730 - DNA, 1124 bp, Homo sapiens
cgggcgcctacgtgggcaccagcccccgcgcccgcccgcccgccctgcggtccggtcctggcgcccgcgcagaaccagctgtctgagctgcccgggcagcgggggagcagcgagcgggcttccgcgagccggagaaggcacaggcctgtcccgggtcccggcaggtctgcgcgtctgttcccagcgctctgcgaggcctaaaaaggaggagcaacctgtccagaatccctgcaggacaggaaaaggaggggaaatctcgacatggaaaaaccctacaataaaaatgaaggaaacctggaaaacgagggaaagccagaagatgaagtagagcctgatgatgaaggaaagtcagacgaggaagaaaagccagacgtggaggggaagacagaatgcgagggaaagagagaggatgagggagagccaggtgatgagggacaactggaagatgagggaagccaggaaaagcagggcaggtccgaaggtgagggcaagccacaaggcgagggcaagccagcctcccaggcaaagccagagagccagccgcgggccgccgaaaagcgcccggctgaagattatgtgccccggaaagcaaaaagaaaaacggacagggggacggacgattcccccaaggactctcaggaggacttacaggaaaggcatctgagcagtgaggagatgatgagagaatgtggagatgtgtcaagggctcaagaggagctaaggaaaaaacagaaaatgggtggttttcattggatgcaaagagatgtacaggatccattcgccccaaggggacaacggggtgtcaggggagtgaggggtggaggtaggggccagaggggcttacacgatatcccatacctttaatgcctttggccttccattctgatttctctgatgagaatattgctggccctgctttccctggtaggtatttgccaggcccaatgctttaaccttaagctgatactttgctttagatgtcagtctcgttaccagcagccttttgacccaactacggcgctctatattttagtagaggattttcacccatgtgcatggaaaagatgttcatggtacattgtaaaaaaataaaattaaaattaaaaaaagtttgcagaaccgca

SEQ ID NO: 314731 - DNA, 1544 bp, Homo sapiens
cctttgtatttgggaaagaaaagcatgcattggctgaaatgaaacaaaagcccttacttgggaaaagggacccccaccagcggccctgcttgctccgtagctgggaacatcttttctggtttcctgagccagcacctgaattgcaacgaagctctgaggatactcaacaccacccagcagtgcgtcagaatggaacgtacattctcattctcagactgttcaatatggtgcccgtaacctccaaagccacacaggaggctgccagcagcattttccccaagggcctgagctcagggtcaagtccctgctggccatcttggggctgtcactgggggtctgggtcaaggacatcccaggaatggtaactgccacatacctcatcttcttactccccagctactctcttttcctcattagccttcctgattatttattgatttcttttttttattcaactgacattgtttgcaccctggctctgttggtggtcctggtgttttaatgaagcttgcctcacccagtagctgggaaattaggtgggggtgcttaagggaggtttgtaggagtcctcggacgtgggatattgggggtatctagggcttggatggtttgtggaatgtcctcagcatcctcccgtcccaacccaaccttccttcttcctcattgtggacttggatttattctcaggctaggagtctccaaaactccgtgaaaccttattgctgctgggtgtggagtggagagtgacaggaatgtgggggacggtgattgttggctccagttactaatgtttaagcagaaaaaccactttcttgttgaaaatatccctgaaaaggtcgctgctgctttgaggaggcgtgactttttcctggtggagtgtgacggaggcatggggcctgtgctcccaggctcgggggagccccctctgcacacggggagggaggaacttggggacatcagtcatgggtcacaggtggcttcaggccattcacaagagtccccggaagttgcgtgccaagtttggttttttccctgaatctctgcatatgagcatttttctggagaaaggaccatagcttttattagattctcaaaggttcagaatggggaatgtgttaaacaaaccgaaaacctgtttcagctttaaaatcctccaaaactttaaagacttttcttttttctgagaaaggctggtaaatcactgagtcatcattcagaacatacagcctcgaagggcagagctcacacccatatatgacgttaagagctcaacaaatgtttgttgagtgactgagtgaccccaggggcagactccagatcatcagacactgatacagagagcgatgctatctcctcaactctccctcttctcctaaaagctgagtctatatagggatgacaggctcagctgagcactggttgggatgcattcgaatgacttcagcaagatcctgctttcctcagcccccgctctgttttatttattgtttaatatttccaatgatccaaatcaaagtgaataaacaaagagctattttattgtt

SEQ ID NO: 314732 - DNA, 3847 bp, Homo sapiens
cctttgtatttgggaaagaaaagcatgcattggctgaaatgaaacaaaagcccttacttgggaaaagggacccccaccagcggccctgcttgctccgtagctgggaacatcttttctggtttcctgagccagcacctgaattgcaacgaagctctgaggatactcaacaccacccagcagtgcgtcagaatggaacgtacattctcattctcagactgttcaatatggtgcccgtaacctccaaagccacacaggaggctgccagcagcattttccccaagggcctgagctcagggtcaagtccctgctggccatcttggggctgtcactgggggtctgggtcaaggacatcccaggaatggtaactgccacatacctcatcttcttactccccagctactctcttttcctcattagccttcctgattatttattgatttcttttttttattcaactgacattgtttgcaccctggctctgttggtggtcctggtgttttaatgaagcttgcctcacccagtagctgggaaattaggtgggggtgcttaagggaggtttgtaggagtcctcggacgtgggatattgggggtatctagggcttggatggtttgtggaatgtcctcagcatcctcccgtcccaacccaaccttccttcttcctcattgtggacttggatttattctcaggctaggagtctccaaaactccgtgaaaccttattgctgctgggtgtggagtggagagtgacaggaatgtgggggacggtgattgttggctccagttactaatgtttaagcagaaaaaccactttcttgttgaaaatatccctgaaaaggtcgctgctgctttgaggaggcgtgactttttcctggtggagtgtgacggaggcatggggcctgtgctcccaggctcgggggagccccctctgcacacggggagggaggaacttggggacatcagtcatgggtcacaggtggcttcaggccattcacaagagtccccggaagttgcgtgccaagtttggttttttccctgaatctctgcatatgagcatttttctggagaaaggaccatagcttttattagattctcaaaggttcagaatggggaatgtgttaaacaaaccgaaaacctgtttcagctttaaaatcctccaaaactttaaagacttttcttttttctgagaaaggctggtaaatcactgagtcatcattcagaacatacagcctcgaagggcagagctcacacccatatatgacgttaagagctcaacaaatgtttgttgagtgactgagtgaccccaggggcagactccagatcatcagacactgatacagagagcgatgctatctcctcaactctccctcttctcctaaaagctgagtctatatagggatgacaggctcaggctgagcagtcgacttctctgggttttgctgtgtaagaataggtccctcaacatgaagatgtgtctgcgtctgagccagatgctgcctgggtcggttgcctggcctccgtctggtctccctccctcctactagggtggtcaagctgtgagatctcttccagcctccaaatccagctttcccattttactgatgagaaaatcaaggccacattgcagctgggtggggagtggagcgtgacaggcacgggagaggacagcgattgttgactctagttcctgatgtttaatcagaaaaaccacttttcctgtagagcacatttcctaaaaggctgctgctgtgtagggaggtgtggccttttcctggtgcagtgtgaaggagggaagtgacgggcagtcgtgaactgtctgggacagatagcacaagtcagagtttgagcaaaactagggtgttaccggcgctatgttgaaattgtctggaggcgggctttcccagcgagtctccattcagcatctggaaaaagtgtaaccagaatggaggtgtctgactctcctgtgctctctcagcgccgagctctagctgcaggctgcctgggtggccttctcacaccctcccgtgcaggagactgcatttctctttcccacagcccagcagatagctcattggcttagcaatgggcacttaacagaatccagttgttgcagccagaattaaatgcaccagtctggcttaaaccaactggaactcatccctggggtgaaggtggctgggaattagacaagagtgtgtgttagccaaaaggcacatgcatgctgtcagcaggagaatgaggagcactggttctgggcaggcagtggcaggggctccctcaggcccctgattcccagcccacagctctttctactctgcagacagagttccttggagactggccctgcattcaggcagggagcagaggggtccctgcctgcagcacccagagctgaacctgaagctacaaagatgggctgatgaggtggcccatgaggtgtcagcaacatcccaaccccctgggtctccccagtgagtcagggcactgatttgctatagctggagctacatgcacctctcctcccctcagccaccttttaggggagaaaggagggcagatttgtaacctctggttctctgcagggatcctgggctggaagaaagttcataaatggatgaatgccttttaaaactccagcttttccaagcatcattcaccaaagcatttggttaggcttagagagaaaagctggatatgagaaaatagaatgtaaaataggaggggctggttgagaggctttgatggaatcccattctctgctgtggccagaaggtggtgctagaggccagtcccacttggatgtgaccctggcctctgccaggattcaaaccacaaagaacatttggaactgggatgtttgctttgaagcagcccgaaaacaagtgaaaggaaaccaagataactctctctccctccgctggcaaggatcaaaaataccttgtgcagggaagcccgagcctcgaggggccactgcccagctaaagatgactggacaccagccatgcaccatcaggaaccagcacctgtcctcacccctgagaagagccccgggggtatcattatatccatcgcagacatctggtttgcagcaaatgtggctacacgccatcaggattatcctgccctgtggactggggctagctagttttgagatagagtcaacctccccatttttgtttgtcatgaaaacaccagctcctgcacccctggggtgctacctgacacctgtgcaaagaaaaggaggaaaacttagaagaaaaggcagagacaggcaagacagcatctcacagcttgtcaggatcagggcattaccgactattttttcttaccaaaagagcactgaatttcctaggggaaggtgagccacctttacacctcctgtcctccctcccagcccgtcaagcgatcccatcacccagcctcatcactcagcttcttcctagtacaaaactgccatcggttgtacgtcctgagctgtgggacgtcagctttaaccctagcctgtctcagggcctcgccctccagccccccgccccttagggtgatcgtgggtttcttcccttcctcctgcacaatcgcttcccttcactgaattcccttcaaagccaaagtttcttgagcactttttcttgtgtgcagtcttgtgtgtttgggtgttggtgtttttaaatttgctttctattcccccctgcctctctccatgtcgttacgcagctgagcactggttgggatgcattcgaatgacttcagcaagatcctgctttcctcagcccccgctctgttttatttattgtttaatatttccaatgatccaaatcaaagtgaataaacaaagagctattttattgtt

SEQ ID NO: 314733 - DNA, 4369 bp, Homo sapiens
  misc_feature (4244)..(4244): n is a, c, g, or t
cctttgtatttgggaaagaaaagcatgcattggctgaaatgaaacaaaagcccttacttgggaaaagggacccccaccagcggccctgcttgctccgtagctgggaacatcttttctggtttcctgagccagcacctgaattgcaacgaagctctgaggatactcaacaccacccagcagtgcgtcagaatggaacgtacattctcattctcagactgttcaatatggtgcccgtaacctccaaagccacacaggaggctgccagcagcattttccccaagggcctgagctcagggtcaagtccctgctggccatcttggggctgtcactgggggtctgggtcaaggacatcccaggaatggtaactgccacatacctcatcttcttactccccagctactctcttttcctcattagccttcctgattatttattgatttcttttttttattcaactgacattgtttgcaccctggctctgttggtggtcctggtgttttaatgaagcttgcctcacccagtagctgggaaattaggtgggggtgcttaagggaggtttgtaggagtcctcggacgtgggatattgggggtatctagggcttggatggtttgtggaatgtcctcagcatcctcccgtcccaacccaaccttccttcttcctcattgtggacttggatttattctcaggctaggagtctccaaaactccgtgaaaccttattgctgctgggtgtggagtggagagtgacaggaatgtgggggacggtgattgttggctccagttactaatgtttaagcagaaaaaccactttcttgttgaaaatatccctgaaaaggtcgctgctgctttgaggaggcgtgactttttcctggtggagtgtgacggaggcatggggcctgtgctcccaggctcgggggagccccctctgcacacggggagggaggaacttggggacatcagtcatgggtcacaggtggcttcaggccattcacaagagtccccggaagttgcgtgccaagtttggttttttccctgaatctctgcatatgagcatttttctggagaaaggaccatagcttttattagattctcaaaggttcagaatggggaatgtgttaaacaaaccgaaaacctgtttcagctttaaaatcctccaaaactttaaagacttttcttttttctgagaaaggctggtaaatcactgagtcatcattcagaacatacagcctcgaagggcagagctcacacccatatatgacgttaagagctcaacaaatgtttgttgagtgactgagtgaccccaggggcagactccagatcatcagacactgatacagagagcgatgctatctcctcaactctccctcttctcctaaaagctgagtctatatagggatgacaggctcaggctgagcagtcgacttctctgggttttgctgtgtaagaataggtccctcaacatgaagatgtgtctgcgtctgagccagatgctgcctgggtcggttgcctggcctccgtctggtctccctccctcctactagggtggtcaagctgtgagatctcttccagcctccaaatccagctttcccattttactgatgagaaaatcaaggccacattgcagctgggtggggagtggagcgtgacaggcacgggagaggacagcgattgttgactctagttcctgatgtttaatcagaaaaaccacttttcctgtagagcacatttcctaaaaggctgctgctgtgtagggaggtgtggccttttcctggtgcagtgtgaaggagggaagtgacgggcagtcgtgaactgtctgggacagatagcacaagtcagagtttgagcaaaactagggtgttaccggcgctatgttgaaattgtctggaggcgggctttcccagcgagtctccattcagcatctggaaaaagtgtaaccagaatggaggtgtctgactctcctgtgctctctcagcgccgagctctagctgcaggctgcctgggtggccttctcacaccctcccgtgcaggagactgcatttctctttcccacagcccagcagatagctcattggcttagcaatgggcacttaacagaatccagttgttgcagccagaattaaatgcaccagtctggcttaaaccaactggaactcatccctggggtgaaggtggctgggaattagacaagagtgtgtgttagccaaaaggcacatgcatgctgtcagcaggagaatgaggagcactggttctgggcaggcagtggcaggggctccctcaggcccctgattcccagcccacagctctttctactctgcagacagagttccttggagactggccctgcattcaggcagggagcagaggggtccctgcctgcagcacccagagctgaacctgaagctacaaagatgggctgatgaggtggcccatgaggtgtcagcaacatcccaaccccctgggtctccccagtgagtcagggcactgatttgctatagctggagctacatgcacctctcctcccctcagccaccttttaggggagaaaggagggcagatttgtaacctctggttctctgcagggatcctgggctggaagaaagttcataaatggatgaatgccttttaaaactccagcttttccaagcatcattcaccaaagcatttggttaggcttagagagaaaagctggatatgagaaaatagaatgtaaaataggagggaaaaaaaaaagaaggtggagagggcagttaagatctgggtgattctttagggaaacggctggttgagaggctttgatggaatcccattctctgctgtggccagaaggtggtgctagaggccagtcccacttggatgtgaccctggcctctgccaggattcaaaccacaaagaacatttggaactgggatgtttgctttgaagcagcccgaaaacaagtgaaaggaaaccaagataactctctctccctccgctggcaaggatcaaaaataccttgtgcagggaagcccgagcctcgaggggccactgcccagctaaagatgactggacaccagccatgcaccatcaggaaccagcacctgtcctcacccctgagaagagccccgggggtatcattatatccatcgcagacatctggtttgcagcaaatgtggctacacgccatcaggattatcctgccctgtggactggggctagctagttttgagatagagtcaacctccccatttttgtttgtcatgaaaacaccagctcctgcacccctggggtgctacctgacacctgtgcaaagaaaaggaggaaaacttagaagaaaaggcagagacaggcaagacagcatctcacagcttgtcaggatcagggcattaccgactattttttcttaccaaaagagcactgaatttcctaggggaaggtgagccacctttacacctcctgtcctccctcccagcccgtcaagcgatcccatcacccagcctcatcactcagcttcttcctagtacaaaactgccatcggttgtacgtcctgagctgtgggacgtcagctttaaccctagcctgtctcagggcctcgccctccagccccccgccccttagggtgatcgtgggtttcttcccttcctcctgcacaatcgcttcccttcactgaattcccttcaaagccaaagtttcttgagcactttttcttgtgtgcagtcttgtgtgtttgggtgttggtgtttttaaatttgctttctattcccccctgcctctctccatgtcgttacgcagctgagcactggttgggatgcattcgaatgacttcagcaagatcctgctttcctcagcccccgctctgttttatttattgtttaatatttccaatgatccaaatcaaagtgaataaacaaagagctattttattgtttttgggtgtgtttgttgcttttctacaagggtcatgcatttgcgcctccttcaacactccaactcagagggcctcctgggttggcgtcgccactaccgaatggccagaattcaggatacagaggagagccccagcgtaggccttggagaggcctcttctcaagcccaggagtcccattacctgccgtgtgactggcgagtcacctaagttctctgaacctcagctgcgtgtctcatgtattaaatgggcgcgacaacactggccttcagaggggatgtgggagtaaaaacaaaagcatctccagaggcccagtagacatgcaccacctgcttgaacgttngctgagtgaattcaccttggccagggcctgattgggctgggctagtgtctgtcctcccccgacagagacgggcacacccagggatggacaagagtttggtccaaagttggcactaatctcccttt

SEQ ID NO: 314734 - DNA, 3975 bp, Homo sapiens
cctttgtatttgggaaagaaaagcatgcattggctgaaatgaaacaaaagcccttacttgggaaaagggacccccaccagcggccctgcttgctccgtagctgggaacatcttttctggtttcctgagccagcacctgaattgcaacgaagctctgaggatactcaacaccacccagcagtgcgtcagaatggaacgtacattctcattctcagactgttcaatatggtgcccgtaacctccaaagccacacaggaggctgccagcagcattttccccaagggcctgagctcagggtcaagtccctgctggccatcttggggctgtcactgggggtctgggtcaaggacatcccaggaatggtaactgccacatacctcatcttcttactccccagctactctcttttcctcattagccttcctgattatttattgatttcttttttttattcaactgacattgtttgcaccctggctctgttggtggtcctggtgttttaatgaagcttgcctcacccagtagctgggaaattaggtgggggtgcttaagggaggtttgtaggagtcctcggacgtgggatattgggggtatctagggcttggatggtttgtggaatgtcctcagcatcctcccgtcccaacccaaccttccttcttcctcattgtggacttggatttattctcaggctaggagtctccaaaactccgtgaaaccttattgctgctgggtgtggagtggagagtgacaggaatgtgggggacggtgattgttggctccagttactaatgtttaagcagaaaaaccactttcttgttgaaaatatccctgaaaaggtcgctgctgctttgaggaggcgtgactttttcctggtggagtgtgacggaggcatggggcctgtgctcccaggctcgggggagccccctctgcacacggggagggaggaacttggggacatcagtcatgggtcacaggtggcttcaggccattcacaagagtccccggaagttgcgtgccaagtttggttttttccctgaatctctgcatatgagcatttttctggagaaaggaccatagcttttattagattctcaaaggttcagaatggggaatgtgttaaacaaaccgaaaacctgtttcagctttaaaatcctccaaaactttaaagacttttcttttttctgagaaaggctggtaaatcactgagtcatcattcagaacatacagcctcgaagggcagagctcacacccatatatgacgttaagagctcaacaaatgtttgttgagtgactgagtgaccccaggggcagactccagatcatcagacactgatacagagagcgatgctatctcctcaactctccctcttctcctaaaagctgagtctatatagggatgacaggctcaggctgagcagtcgacttctctgggttttgctgtgtaagaataggtccctcaacatgaagatgtgtctgcgtctgagccagatgctgcctgggtcggttgcctggcctccgtctggtctccctccctcctactagggtggtcaagctgtgagatctcttccagcctccaaatccagctttcccattttactgatgagaaaatcaaggccacattgcagctgggtggggagtggagcgtgacaggcacgggagaggacagcgattgttgactctagttcctgatgtttaatcagaaaaaccacttttcctgtagagcacatttcctaaaaggctgctgctgtgtagggaggtgtggccttttcctggtgcagtgtgaaggagggaagtgacgggcagtcgtgaactgtctgggacagatagcacaagtcagagtttgagcaaaactagggtgttaccggcgctatgttgaaattgtctggaggcgggctttcccagcgagtctccattcagcatctggaaaaagtgtaaccagaatggaggtgtctgactctcctgtgctctctcagcgccgagctctagctgcaggctgcctgggtggccttctcacaccctcccgtgcaggagactgcatttctctttcccacagcccagcagatagctcattggcttagcaatgggcacttaacagaatccagttgttgcagccagaattaaatgcaccagtctggcttaaaccaactggaactcatccctggggtgaaggtggctgggaattagacaagagtgtgtgttagccaaaaggcacatgcatgctgtcagcaggagaatgaggagcactggttctgggcaggcagtggcaggggctccctcaggcccctgattcccagcccacagctctttctactctgcagacagagttccttggagactggccctgcattcaggcagggagcagaggggtccctgcctgcagcacccagagctgaacctgaagctacaaagatgggctgatgaggtggcccatgaggtgtcagcaacatcccaaccccctgggtctccccagtgagtcagggcactgatttgctatagctggagctacatgcacctctcctcccctcagccaccttttaggggagaaaggagggcagatttgtaacctctggttctctgcagggatcctgggctggaagaaagttcataaatggatgaatgccttttaaaactccagcttttccaagcatcattcaccaaagcatttggttaggcttagagagaaaagctggatatgagaaaatagaatgtaaaataggagggaaaaaaaaaagaaggtggagagggcagttaagatctgggtgattctttagggaaacggctggttgagaggctttgatggaatcccattctctgctgtggccagaaggtggtgctagaggccagtcccacttggatgtgaccctggcctctgccaggattcaaaccacaaagaacatttggaactgggatgtttgctttgaagcagcccgaaaacaagtgaaaggaaaccaagataactctctctccctccgctggcaaggatcaaaaataccttgtgcagggaagcccgagcctcgaggggccactgcccagctaaagatgactggacaccagccatgcaccatcaggaaccagcacctgtcctcacccctgagaagagccccgggggtatcattatatccatcgcagacatctggtttgcagcaaatgtggctacacgccatcaggattatcctgccctgtggactggggctagctagttttgagatagagtcaacctccccatttttgtttgtcatgaaaacaccagctcctgcacccctggggtgctacctgacacctgtgcaaagaaaaggaggaaaacttagaagaaaaggcagagacaggcaagacagcatctcacagcttgtcaggatcagggcattaccgactattttttcttaccaaaagagcactgaatttcctaggggaaggtgagccacctttacacctcctgtcctccctcccagcccgtcaagcgatcccatcacccagcctcatcactcagcttcttcctagtacaaaactgccatcggttgtacgtcctgagctgtgggacgtcagctttaaccctagcctgtctcagggcctcgccctccagccccccgccccttagggtgatcgtgggtttcttcccttcctcctgcacaatcgcttcccttcactgaattcccttcaaagccaaagtttcttgagcactttttcttgtgtgcagtcttgtgtgtttgggtgttggtgtttttaaatttgctttctattcccccctgcctctctccatgtcgttacgcagctgagcactggttgggatgcattcgaatgacttcagcaagatcctgctttcctcagcccccgctctgttttatttattgtttaatatttccaatgatccaaatcaaagtgaataaacaaagagctattttattgttaaaaccatctggaagtgggacagcttcaggaatgttataacggaattgaggagggcagagaggatgaaccc

SEQ ID NO: 314735 - DNA, 1070 bp, Homo sapiens
atgtgacttgtatatcctatgtctaaattaggaatatgcatctgattcttctacaagaagtttgcgatcacagctgactgtgttcctgatgcatccaccaaacccagttccatctgtgggcctccctggctctgtcaccacccattgcaccctcccaatcacaggagtcacaaacctcagacatgcagctcctgctccacacttaatatatgcacgcattggatcatcccagccctggtctttctgcctccatggatacactgcatgaccctgagagtaaacctccttagatttagcatcctaggttcctcacacgcctcaccctcttccccagcccctgcgactggggaagtggggctagctagttttgagatagagtcaacctccccatttttgtttgtcatgaaaacaccagctcctgcacccctggggtgctacctgacacctgtgcaaagaaaaggaggaaaacttagaagaaaaggcagagacaggcaagacagcatctcacagcttgtcaggatcagggcattaccgactattttttcttaccaaaagagcactgaatttcctaggggaaggtgagccacctttacacctcctgtcctccctcccagcccgtcaagcgatcccatcacccagcctcatcactcagcttcttcctagtacaaaactgccatcggttgtacgtcctgagctgtgggacgtcagctttaaccctagcctgtctcagggcctcgccctccagccccccgccccttagggtgatcgtgggtttcttcccttcctcctgcacaatcgcttcccttcactgaattcccttcaaagccaaagtttcttgagcactttttcttgtgtgcagtcttgtgtgtttgggtgttggtgtttttaaatttgctttctattcccccctgcctctctccatgtcgttacgcagctgagcactggttgggatgcattcgaatgacttcagcaagatcctgctttcctcagcccccgctctgttttatttattgtttaatatttccaatgatccaaatcaaagtgaataaacaaagagctattttattgtt

SEQ ID NO: 314736 - DNA, 3241 bp, Homo sapiens
cctttgtatttgggaaagaaaagcatgcattggctgaaatgaaacaaaagcccttacttgggaaaagggacccccaccagcggccctgcttgctccgtagctgggaacatcttttctggtttcctgagccagcacctgaattgcaacgaagctctgaggatactcaacaccacccagcagtgcgtcagaatggaacgtacattctcattctcagactgttcaatatggtgcccgtaacctccaaagccacacaggaggctgccagcagcattttccccaagggcctgagctcagggtcaagtccctgctggccatcttggggctgtcactgggggtctgggtcaaggacatcccaggaatggtaactgccacatacctcatcttcttactccccagctactctcttttcctcattagccttcctgattatttattgatttcttttttttattcaactgacattgtttgcaccctggctctgttggtggtcctggtgttttaatgaagcttgcctcacccagtagctgggaaattaggtgggggtgcttaagggaggtttgtaggagtcctcggacgtgggatattgggggtatctagggcttggatggtttgtggaatgtcctcagcatcctcccgtcccaacccaaccttccttcttcctcattgtggacttggatttattctcaggctaggagtctccaaaactccgtgaaaccttattgctgctgggtgtggagtggagagtgacaggaatgtgggggacggtgattgttggctccagttactaatgtttaagcagaaaaaccactttcttgttgaaaatatccctgaaaaggtcgctgctgctttgaggaggcgtgactttttcctggtggagtgtgacggaggcatggggcctgtgctcccaggctcgggggagccccctctgcacacggggagggaggaacttggggacatcagtcatgggtcacaggtggcttcaggccattcacaagagtccccggaagttgcgtgccaagtttggttttttccctgaatctctgcatatgagcatttttctggagaaaggaccatagcttttattagattctcaaaggttcagaatggggaatgtgttaaacaaaccgaaaacctgtttcagctttaaaatcctccaaaactttaaagacttttcttttttctgagaaaggctggtaaatcactgagtcatcattcagaacatacagcctcgaagggcagagctcacacccatatatgacgttaagagctcaacaaatgtttgttgagtgactgagtgaccccaggggcagactccagatcatcagacactgatacagagagcgatgctatctcctcaactctccctcttctcctaaaagctgagtctatatagggatgacaggctcaggctgagcagtcgacttctctgggttttgctgtgtaagaataggtccctcaacatgaagatgtgtctgcgtctgagccagatgctgcctgggtcggttgcctggcctccgtctggtctccctccctcctactagggtggtcaagctgtgagatctcttccagcctccaaatccagctttcccattttactgatgagaaaatcaaggccacattgcagctgggtggggagtggagcgtgacaggcacgggagaggacagcgattgttgactctagttcctgatgtttaatcagaaaaaccacttttcctgtagagcacatttcctaaaaggctgctgctgtgtagggaggtgtggccttttcctggtgcagtgtgaaggagggaagtgacgggcagtcgtgaactgtctgggacagatagcacaagtcagagtttgagcaaaactagggtgttaccggcgctatgttgaaattgtctggaggcgggctttcccagcgagtctccattcagcatctggaaaaagtgtaaccagaatggaggtgtctgactctcctgtgctctctcagcgccgagctctagctgcaggctgcctgggtggccttctcacaccctcccgtgcaggagactgcatttctctttcccacagcccagcagatagctcattggcttagcaatgggcacttaacagaatccagttgttgcagccagaattaaatgcaccagtctggcttaaaccaactggaactcatccctggggtgaaggtggctgggaattagacaagagtgtgtgttagccaaaaggcacatgcatgctgtcagcaggagaatgaggagcactggttctgggcaggcagtggcaggggctccctcaggcccctgattcccagcccacagctctttctactctgcagacagagttccttggagactggccctgcattcaggcagggagcagaggggtccctgcctgcagcacccagagctgaacctgaagctacaaagatgggctgatgaggtggcccatgaggtgtcagcaacatcccaaccccctgggtctccccagtgagtcagggcactgatttgctatagctggagctacatgcacctctcctcccctcagccaccttttaggggagaaaggagggcagatttgtaacctctggttctctgcagggatcctgggctggaagaaagttcataaatggatgaatgccttttaaaactccagcttttccaagcatcattcaccaaagcatttggttaggcttagagagaaaagctggatatgagaaaatagaatgtaaaataggagggaaaaaaaaaagaaggtggagagggcagttaagatctgggtgattctttagggaaacggctggttgagaggctttgatggaatcccattctctgctgtggccagaaggtggtgctagaggccagtcccacttggatgtgaccctggcctctgccaggattcaaaccacaaagaacatttggaactgggatgtttgctttgaagcagcccgaaaacaagtgaaaggaaaccaagataactctctctccctccgctggcaaggatcaaaaataccttgtgcagggaagcccgagcctctctccatgtcgttacgcagctgagcactggttgggatgcattcgaatgacttcagcaagatcctgctttcctcagcccccgctctgttttatttattgtttaatatttccaatgatccaaatcaaagtgaataaacaaagagctattttattgttaaaaccatctggaagtgggacagcttcaggaatgttataacggaattgaggagggcagagaggatgaaccc

SEQ ID NO: 314737 - DNA, 2969 bp, Homo sapiens
cctttgtatttgggaaagaaaagcatgcattggctgaaatgaaacaaaagcccttacttgggaaaagggacccccaccagcggccctgcttgctccgtagctgggaacatcttttctggtttcctgagccagcacctgaattgcaacgaagctctgaggatactcaacaccacccagcagtgcgtcagaatggaacgtacattctcattctcagactgttcaatatggtgcccgtaacctccaaagccacacaggaggctgccagcagcattttccccaagggcctgagctcagggtcaagtccctgctggccatcttggggctgtcactgggggtctgggtcaaggacatcccaggaatggtaactgccacatacctcatcttcttactccccagctactctcttttcctcattagccttcctgattatttattgatttcttttttttattcaactgacattgtttgcaccctggctctgttggtggtcctggtgttttaatgaagcttgcctcacccagtagctgggaaattaggtgggggtgcttaagggaggtttgtaggagtcctcggacgtgggatattgggggtatctagggcttggatggtttgtggaatgtcctcagcatcctcccgtcccaacccaaccttccttcttcctcattgtggacttggatttattctcaggctaggagtctccaaaactccgtgaaaccttattgctgctgggtgtggagtggagagtgacaggaatgtgggggacggtgattgttggctccagttactaatgtttaagcagaaaaaccactttcttgttgaaaatatccctgaaaaggtcgctgctgctttgaggaggcgtgactttttcctggtggagtgtgacggaggcatggggcctgtgctcccaggctcgggggagccccctctgcacacggggagggaggaacttggggacatcagtcatgggtcacaggtggcttcaggccattcacaagagtccccggaagttgcgtgccaagtttggttttttccctgaatctctgcatatgagcatttttctggagaaaggaccatagcttttattagattctcaaaggttcagaatggggaatgtgttaaacaaaccgaaaacctgtttcagctttaaaatcctccaaaactttaaagacttttcttttttctgagaaaggctggtaaatcactgagtcatcattcagaacatacagcctcgaagggcagagctcacacccatatatgacgttaagagctcaacaaatgtttgttgagtgactgagtgaccccaggggcagactccagatcatcagacactgatacagagagcgatgctatctcctcaactctccctcttctcctaaaagctgagtctatatagggatgacaggctcaggctgagcagtcgacttctctgggttttgctgtgtaagaataggtccctcaacatgaagatgtgtctgcgtctgagccagatgctgcctgggtcggttgcctggcctccgtctggtctccctccctcctactagggtggtcaagctgtgagatctcttccagcctccaaatccagctttcccattttactgatgagaaaatcaaggccacattgcagctgggtggggagtggagcgtgacaggcacgggagaggacagcgattgttgactctagttcctgatgtttaatcagaaaaaccacttttcctgtagagcacatttcctaaaaggctgctgctgtgtagggaggtgtggccttttcctggtgcagtgtgaaggagggaagtgacgggcagtcgtgaactgtctgggacagatagcacaagtcagagtttgagcaaaactagggtgttaccggcgctatgttgaaattgtctggaggcgggctttcccagcgagtctccattcagcatctggaaaaagtgtaaccagaatggaggtgtctgactctcctgtgctctctcagcgccgagctctagctgcaggctgcctgggtggccttctcacaccctcccgtgcaggagactgcatttctctttcccacagcccagcagatagctcattggcttagcaatgggcacttaacagaatccagttgttgcagccagaattaaatgcaccagtctggcttaaaccaactggaactcatccctggggtgaaggtggctgggaattagacaagagtgtgtgttagccaaaaggcacatgcatgctgtcagcaggagaatgaggagcactggttctgggcaggcagtggcaggggctccctcaggcccctgattcccagcccacagctctttctactctgcagacagagttccttggagactggccctgcattcaggcagggagcagaggggtccctgcctgcagcacccagagctgaacctgaagctacaaagatgggctgatgaggtggcccatgaggtgtcagcaacatcccaaccccctgggtctccccagtgagtcagggcactgatttgctatagctggagctacatgcacctctcctcccctcagccaccttttaggggagaaaggagggcagatttgtaacctctggttctctgcagggatcctgggctggaagaaagttcataaatggatgaatgccttttaaaactccagcttttccaagcatcattcaccaaagcatttggttaggcttagagagaaaagctggatatgagaaaatagaatgtaaaataggaggggaaaaaaaaaggacgaacctgtgaagaaacagccccagaaacctagaggtggacagagggtctctgacaacattaagaaagaaactccgttccttgaggttataactcatgagttacaagactttgctgtagatgatccacatgatcggacccacgaaaacctatttgattctcttgacaggcccgccacatcctgaacgatgtactactgttagccattcccatacgtgccccgtacaccaccatgat

SEQ ID NO: 314738 - DNA, 3904 bp, Homo sapiens
cctttgtatttgggaaagaaaagcatgcattggctgaaatgaaacaaaagcccttacttgggaaaagggacccccaccagcggccctgcttgctccgtagctgggaacatcttttctggtttcctgagccagcacctgaattgcaacgaagctctgaggatactcaacaccacccagcagtgcgtcagaatggaacgtacattctcattctcagactgttcaatatggtgcccgtaacctccaaagccacacaggaggctgccagcagcattttccccaagggcctgagctcagggtcaagtccctgctggccatcttggggctgtcactgggggtctgggtcaaggacatcccaggaatggtaactgccacatacctcatcttcttactccccagctactctcttttcctcattagccttcctgattatttattgatttcttttttttattcaactgacattgtttgcaccctggctctgttggtggtcctggtgttttaatgaagcttgcctcacccagtagctgggaaattaggtgggggtgcttaagggaggtttgtaggagtcctcggacgtgggatattgggggtatctagggcttggatggtttgtggaatgtcctcagcatcctcccgtcccaacccaaccttccttcttcctcattgtggacttggatttattctcaggctaggagtctccaaaactccgtgaaaccttattgctgctgggtgtggagtggagagtgacaggaatgtgggggacggtgattgttggctccagttactaatgtttaagcagaaaaaccactttcttgttgaaaatatccctgaaaaggtcgctgctgctttgaggaggcgtgactttttcctggtggagtgtgacggaggcatggggcctgtgctcccaggctcgggggagccccctctgcacacggggagggaggaacttggggacatcagtcatgggtcacaggtggcttcaggccattcacaagagtccccggaagttgcgtgccaagtttggttttttccctgaatctctgcatatgagcatttttctggagaaaggaccatagcttttattagattctcaaaggttcagaatggggaatgtgttaaacaaaccgaaaacctgtttcagctttaaaatcctccaaaactttaaagacttttcttttttctgagaaaggctggtaaatcactgagtcatcattcagaacatacagcctcgaagggcagagctcacacccatatatgacgttaagagctcaacaaatgtttgttgagtgactgagtgaccccaggggcagactccagatcatcagacactgatacagagagcgatgctatctcctcaactctccctcttctcctaaaagctgagtctatatagggatgacaggctcaggctgagcagtcgacttctctgggttttgctgtgtaagaataggtccctcaacatgaagatgtgtctgcgtctgagccagatgctgcctgggtcggttgcctggcctccgtctggtctccctccctcctactagggtggtcaagctgtgagatctcttccagcctccaaatccagctttcccattttactgatgagaaaatcaaggccacattgcagctgggtggggagtggagcgtgacaggcacgggagaggacagcgattgttgactctagttcctgatgtttaatcagaaaaaccacttttcctgtagagcacatttcctaaaaggctgctgctgtgtagggaggtgtggccttttcctggtgcagtgtgaaggagggaagtgacgggcagtcgtgaactgtctgggacagatagcacaagtcagagtttgagcaaaactagggtgttaccggcgctatgttgaaattgtctggaggcgggctttcccagcgagtctccattcagcatctggaaaaagtgtaaccagaatggaggtgtctgactctcctgtgctctctcagcgccgagctctagctgcaggctgcctgggtggccttctcacaccctcccgtgcaggagactgcatttctctttcccacagcccagcagatagctcattggcttagcaatgggcacttaacagaatccagttgttgcagccagaattaaatgcaccagtctggcttaaaccaactggaactcatccctggggtgaaggtggctgggaattagacaagagtgtgtgttagccaaaaggcacatgcatgctgtcagcaggagaatgaggagcactggttctgggcaggcagtggcaggggctccctcaggcccctgattcccagcccacagctctttctactctgcagacagagttccttggagactggccctgcattcaggcagggagcagaggggtccctgcctgcagcacccagagctgaacctgaagctacaaagatgggctgatgaggtggcccatgaggtgtcagcaacatcccaaccccctgggtctccccagtgagtcagggcactgatttgctatagctggagctacatgcacctctcctcccctcagccaccttttaggggagaaaggagggcagatttgtaacctctggttctctgcagggatcctgggctggaagaaagttcataaatggatgaatgccttttaaaactccagcttttccaagcatcattcaccaaagcatttggttaggcttagagagaaaagctggatatgagaaaatagaatgtaaaataggagggaaaaaaaaaagaaggtggagagggcagttaagatctgggtgattctttagggaaacggctggttgagaggctttgatggaatcccattctctgctgtggccagaaggtggtgctagaggccagtcccacttggatgtgaccctggcctctgccaggattcaaaccacaaagaacatttggaactgggatgtttgctttgaagcagcccgaaaacaagtgaaaggaaaccaagataactctctctccctccgctggcaaggatcaaaaataccttgtgcagggaagcccgagcctcgaggggccactgcccagctaaagatgactggacaccagccatgcaccatcaggaaccagcacctgtcctcacccctgagaagagccccgggggtatcattatatccatcgcagacatctggtttgcagcaaatgtggctacacgccatcaggattatcctgccctgtggactggggctagctagttttgagatagagtcaacctccccatttttgtttgtcatgaaaacaccagctcctgcacccctggggtgctacctgacacctgtgcaaagaaaaggaggaaaacttagaagaaaaggcagagacaggcaagacagcatctcacagcttgtcaggatcagggcattaccgactattttttcttaccaaaagagcactgaatttcctaggggaaggtgagccacctttacacctcctgtcctccctcccagcccgtcaagcgatcccatcacccagcctcatcactcagcttcttcctagtacaaaactgccatcggttgtacgtcctgagctgtgggacgtcagctttaaccctagcctgtctcagggcctcgccctccagccccccgccccttagggtgatcgtgggtttcttcccttcctcctgcacaatcgcttcccttcactgaattcccttcaaagccaaagtttcttgagcactttttcttgtgtgcagtcttgtgtgtttgggtgttggtgtttttaaatttgctttctattcccccctgcctctctccatgtcgttacgcagctgagcactggttgggatgcattcgaatgacttcagcaagatcctgctttcctcagcccccgctctgttttatttattgtttaatatttccaatgatccaaatcaaagtgaataaacaaagagctattttattgtt

SEQ ID NO: 314739 - DNA, 1776 bp, Homo sapiens
catgatcgatcgagctcggtaccgaacgggtgatgcggttgtatctggggacgtggtggaggatgcatgttctgttctctccaggaagagctagtggttttctacccgtgtgtgttggtgagcaatgtgcagtggcaggggctccctcaggcccctgattcccagcccacagctctttctactctgcagacagagttccttggagactggccctgcattcaggcagggagcagaggggtccctgcctgcagcacccagagctgaacctgaagctacaaagatgggctgatgaggtggcccatgaggtgtcagcaacatcccaaccccctgggtctccccagtgagtcagggcactgatttgctatagctggagctacatgcacctctcctcccctcagccaccttttaggggagaaaggagggcagatttgtaacctctggttctctgcagggatcctgggctggaagaaagttcataaatggatgaatgccttttaaaactccagcttttccaagcatcattcaccaaagcatttggttaggcttagagagaaaagctggatatgagaaaatagaatgtaaaataggagggaaaaaaaaaagaaggtggagagggcagttaagatctgggtgattctttagggaaacggctggttgagaggctttgatggaatcccattctctgctgtggccagaaggtggtgctagaggccagtcccacttggatgtgaccctggcctctgccaggattcaaaccacaaagaacatttggaactgggatgtttgctttgaagcagcccgaaaacaagtgaaaggaaaccaagataactctctctccctccgctggcaaggatcaaaaataccttgtgcagggaagcccgagcctcgaggggccactgcccagctaaagatgactggacaccagccatgcaccatcaggaaccagcacctgtcctcacccctgagaagagccccgggggtatcattatatccatcgcagacatctggtttgcagcaaatgtggctacacgccatcaggattatcctgccctgtggactggggctagctagttttgagatagagtcaacctccccatttttgtttgtcatgaaaacaccagctcctgcacccctggggtgctacctgacacctgtgcaaagaaaaggaggaaaacttagaagaaaaggcagagacaggcaagacagcatctcacagcttgtcaggatcagggcattaccgactattttttcttaccaaaagagcactgaatttcctaggggaaggtgagccacctttacacctcctgtcctccctcccagcccgtcaagcgatcccatcacccagcctcatcactcagcttcttcctagtacaaaactgccatcggttgtacgtcctgagctgtgggacgtcagctttaaccctagcctgtctcagggcctcgccctccagccccccgccccttagggtgatcgtgggtttcttcccttcctcctgcacaatcgcttcccttcactgaattcccttcaaagccaaagtttcttgagcactttttcttgtgtgcagtcttgtgtgtttgggtgttggtgtttttaaatttgctttctattcccccctgcctctctccatgtcgttacgcagctgagcactggttgggatgcattcgaatgacttcagcaagatcctgctttcctcagcccccgctctgttttatttattgtttaatatttccaatgatccaaatcaaagtgaataaacaaagagctattttattgtt

SEQ ID NO: 314740 - DNA, 4191 bp, Homo sapiens
cctttgtatttgggaaagaaaagcatgcattggctgaaatgaaacaaaagcccttacttgggaaaagggacccccaccagcggccctgcttgctccgtagctgggaacatcttttctggtttcctgagccagcacctgaattgcaacgaagctctgaggatactcaacaccacccagcagtgcgtcagaatggaacgtacattctcattctcagactgttcaatatggtgcccgtaacctccaaagccacacaggaggctgccagcagcattttccccaagggcctgagctcagggtcaagtccctgctggccatcttggggctgtcactgggggtctgggtcaaggacatcccaggaatggtaactgccacatacctcatcttcttactccccagctactctcttttcctcattagccttcctgattatttattgatttcttttttttattcaactgacattgtttgcaccctggctctgttggtggtcctggtgttttaatgaagcttgcctcacccagtagctgggaaattaggtgggggtgcttaagggaggtttgtaggagtcctcggacgtgggatattgggggtatctagggcttggatggtttgtggaatgtcctcagcatcctcccgtcccaacccaaccttccttcttcctcattgtggacttggatttattctcaggctaggagtctccaaaactccgtgaaaccttattgctgctgggtgtggagtggagagtgacaggaatgtgggggacggtgattgttggctccagttactaatgtttaagcagaaaaaccactttcttgttgaaaatatccctgaaaaggtcgctgctgctttgaggaggcgtgactttttcctggtggagtgtgacggaggcatggggcctgtgctcccaggctcgggggagccccctctgcacacggggagggaggaacttggggacatcagtcatgggtcacaggtggcttcaggccattcacaagagtccccggaagttgcgtgccaagtttggttttttccctgaatctctgcatatgagcatttttctggagaaaggaccatagcttttattagattctcaaaggttcagaatggggaatgtgttaaacaaaccgaaaacctgtttcagctttaaaatcctccaaaactttaaagacttttcttttttctgagaaaggctggtaaatcactgagtcatcattcagaacatacagcctcgaagggcagagctcacacccatatatgacgttaagagctcaacaaatgtttgttgagtgactgagtgaccccaggggcagactccagatcatcagacactgatacagagagcgatgctatctcctcaactctccctcttctcctaaaagctgagtctatatagggatgacaggctcaggctgagcagtcgacttctctgggttttgctgtgtaagaataggtccctcaacatgaagatgtgtctgcgtctgagccagatgctgcctgggtcggttgcctggcctccgtctggtctccctccctcctactagggtggtcaagctgtgagatctcttccagcctccaaatccagctttcccattttactgatgagaaaatcaaggccacattgcagctgggtggggagtggagcgtgacaggcacgggagaggacagcgattgttgactctagttcctgatgtttaatcagaaaaaccacttttcctgtagagcacatttcctaaaaggctgctgctgtgtagggaggtgtggccttttcctggtgcagtgtgaaggagggaagtgacgggcagtcgtgaactgtctgggacagatagcacaagtcagagtttgagcaaaactagggtgttaccggcgctatgttgaaattgtctggaggcgggctttcccagcgagtctccattcagcatctggaaaaagtgtaaccagaatggaggtgtctgactctcctgtgctctctcagcgccgagctctagctgcaggctgcctgggtggccttctcacaccctcccgtgcaggagactgcatttctctttcccacagcccagcagatagctcattggcttagcaatgggcacttaacagaatccagttgttgcagccagaattaaatgcaccagtctggcttaaaccaactggaactcatccctggggtgaaggtggctgggaattagacaagagtgtgtgttagccaaaaggcacatgcatgctgtcagcaggagaatgaggagcactggttctgggcaggcagtggcaggggctccctcaggcccctgattcccagcccacagctctttctactctgcagacagagttccttggagactggccctgcattcaggcagggagcagaggggtccctgcctgcagcacccagagctgaacctgaagctacaaagatgggctgatgaggtggcccatgaggtgtcagcaacatcccaaccccctgggtctccccagtgagtcagggcactgatttgctatagctggagctacatgcacctctcctcccctcagccaccttttaggggagaaaggagggcagatttgtaacctctggttctctgcagggatcctgggctggaagaaagttcataaatggatgaatgccttttaaaactccagcttttccaagcatcattcaccaaagcatttggttaggcttagagagaaaagctggatatgagaaaatagaatgtaaaataggagggaaaaaaaaaagaaggtggagagggcagttaagatctgggtgattctttagggaaacggctggttgagaggctttgatggaatcccattctctgctgtggccagaaggtggtgctagaggccagtcccacttggatgtgaccctggcctctgccaggattcaaaccacaaagaacatttggaactgggatgtttgctttgaagcagcccgaaaacaagtgaaaggaaaccaagataactctctctccctccgctggcaaggatcaaaaataccttgtgcagggaagcccgagcctcgaggggccactgcccagctaaagatgactggacaccagccatgcaccatcaggaaccagcacctgtcctcacccctgagaagagccccgggggtatcattatatccatcgcagacatctggtttgcagcaaatgtggctacacgccatcaggattatcctgccctgtggactggggctagctagttttgagatagagtcaacctccccatttttgtttgtcatgaaaacaccagctcctgcacccctggggtgctacctgacacctgtgcaaagaaaaggaggaaaacttagaagaaaaggcagagacaggcaagacagcatctcacagcttgtcaggatcagggcattaccgactattttttcttaccaaaagagcactgaatttcctaggggaaggtgagccacctttacacctcctgtcctccctcccagcccgtcaagcgatcccatcacccagcctcatcactcagcttcttcctagtacaaaactgccatcggttgtacgtcctgagctgtgggacgtcagctttaaccctagcctgtctcagggcctcgccctccagccccccgccccttagggtgatcgtgggtttcttcccttcctcctgcacaatcgcttcccttcactgaattcccttcaaagccaaagtttcttgagcactttttcttgtgtgcagtcttgtgtgtttgggtgttggtgtttttaaatttgctttctattcccccctgcctctctccatgtcgttacgcagctgagcactggttgggatgcattcgaatgacttcagcaagatcctgctttcctcagcccccgctctgttttatttattgtttaatatttccaatgatccaaatcaaagtgaataaacaaagagctattttattgttaaaaaaaaaaaaaaaaactcgagactagttctctctccttttttttttccaatgagtacaaatgattcttgaatatggacgctttccatggaatagtaggaaccttcatttccactcccacagtaatgtgaaattttgttctaatttttaggattaatagaaacaggattgacaaattgaaattttgactccttcttgaagcatctattaatataagggggcgttggaagagtggtcatttcagatgctgtcgctactgtgttcgactcatctctgtagctgctgtt

SEQ ID NO: 314741 - DNA, 3170 bp, Homo sapiens
cctttgtatttgggaaagaaaagcatgcattggctgaaatgaaacaaaagcccttacttgggaaaagggacccccaccagcggccctgcttgctccgtagctgggaacatcttttctggtttcctgagccagcacctgaattgcaacgaagctctgaggatactcaacaccacccagcagtgcgtcagaatggaacgtacattctcattctcagactgttcaatatggtgcccgtaacctccaaagccacacaggaggctgccagcagcattttccccaagggcctgagctcagggtcaagtccctgctggccatcttggggctgtcactgggggtctgggtcaaggacatcccaggaatggtaactgccacatacctcatcttcttactccccagctactctcttttcctcattagccttcctgattatttattgatttcttttttttattcaactgacattgtttgcaccctggctctgttggtggtcctggtgttttaatgaagcttgcctcacccagtagctgggaaattaggtgggggtgcttaagggaggtttgtaggagtcctcggacgtgggatattgggggtatctagggcttggatggtttgtggaatgtcctcagcatcctcccgtcccaacccaaccttccttcttcctcattgtggacttggatttattctcaggctaggagtctccaaaactccgtgaaaccttattgctgctgggtgtggagtggagagtgacaggaatgtgggggacggtgattgttggctccagttactaatgtttaagcagaaaaaccactttcttgttgaaaatatccctgaaaaggtcgctgctgctttgaggaggcgtgactttttcctggtggagtgtgacggaggcatggggcctgtgctcccaggctcgggggagccccctctgcacacggggagggaggaacttggggacatcagtcatgggtcacaggtggcttcaggccattcacaagagtccccggaagttgcgtgccaagtttggttttttccctgaatctctgcatatgagcatttttctggagaaaggaccatagcttttattagattctcaaaggttcagaatggggaatgtgttaaacaaaccgaaaacctgtttcagctttaaaatcctccaaaactttaaagacttttcttttttctgagaaaggctggtaaatcactgagtcatcattcagaacatacagcctcgaagggcagagctcacacccatatatgacgttaagagctcaacaaatgtttgttgagtgactgagtgaccccaggggcagactccagatcatcagacactgatacagagagcgatgctatctcctcaactctccctcttctcctaaaagctgagtctatatagggatgacaggctcaggctgagcagtcgacttctctgggttttgctgtgtaagaataggtccctcaacatgaagatgtgtctgcgtctgagccagatgctgcctgggtcggttgcctggcctccgtctggtctccctccctcctactagggtggtcaagctgtgagatctcttccagcctccaaatccagctttcccattttactgatgagaaaatcaaggccacattgcagctgggtggggagtggagcgtgacaggcacgggagaggacagcgattgttgactctagttcctgatgtttaatcagaaaaaccacttttcctgtagagcacatttcctaaaaggctgctgctgtgtagggaggtgtggccttttcctggtgcagtgtgaaggagggaagtgacgggcagtcgtgaactgtctgggacagatagcacaagtcagagtttgagcaaaactagggtgttaccggcgctatgttgaaattgtctggaggcgggctttcccagcgagtctccattcagcatctggaaaaagtgtaaccagaatggaggtgtctgactctcctgtgctctctcagcgccgagctctagctgcaggctgcctgggtggccttctcacaccctcccgtgcaggagactgcatttctctttcccacagcccagcagatagctcattggcttagcaatgggcacttaacagaatccagttgttgcagccagaattaaatgcaccagtctggcttaaaccaactggaactcatccctggggtgaaggtggctgggaattagacaagagtgtgtgttagccaaaaggcacatgcatgctgtcagcaggagaatgaggagcactggttctgggcaggcagtggcaggggctccctcaggcccctgattcccagcccacagctctttctactctgcagacagagttccttggagactggccctgcattcaggcagggagcagaggggtccctgcctgcagcacccagagctgaacctgaagctacaaagatgggctgatgaggtggcccatgaggtgtcagcaacatcccaaccccctgggtctccccagtgagtcagggcactgatttgctatagctggagctacatgcacctctcctcccctcagccaccttttaggggagaaaggagggcagatttgtaacctctggttctctgcagggatcctgggctggaagaaagttcataaatggatgaatgccttttaaaactccagcttttccaagcatcattcaccaaagcatttggttaggcttagagagaaaagctggatatgagaaaatagaatgtaaaataggagggaaaaaaaaaagaaggtggagagggcagttaagatctgggtgattctttagggaaacggctggttgagaggctttgatggaatcccattctctgctgtggccagaaggtggtgctagaggccagtcccacttggatgtgaccctggcctctgccaggattcaaaccacaaagaacatttggaactgggatgtttgctttgaagcagcccgaaaacaagtgaaaggaaaccaagataactctctctccctccgctggcaaggatcaaaaataccttgtgcagggaagcccgagcctctctccatgtcgttacgcagctgagcactggttgggatgcattcgaatgacttcagcaagatcctgctttcctcagcccccgctctgttttatttattgtttaatatttccaatgatccaaatcaaagtgaataaacaaagagctattttattgtt

SEQ ID NO: 314742 - DNA, 107 bp, Homo sapiens
ggggggccaatttaatcacttcagtccttacaacagggaggcagggaggtcagaatgaaagtgatgtgatggatgcagagttgaagatgctaggctgctggctttgg

SEQ ID NO: 314743 - DNA, 2610 bp, Homo sapiens
gactcctaggggcttgcagacctagtgggagagaaagaacatcgcagcagccaggcagaaccaggacaggtgaggtgcaggctggctttcctctcgcagcgcggtgtggagtcctgtcctgcctcagggcttttcggagcctggatcctcaaggaacaagtagacctggccgcggggagtggggagggaaggggtgtctattgggcaacagggcggcaaagccctgaataaaggggcgcagggcaggcgcaagtgcagagccttcgtttgccaagtcgcctccagaccgcagacatgaaacttgtcttcctcgtcctgctgttcctcggggccctcggactgtgtctggctggccgtaggagaaggagtgttcagtggtgcgccgtatcccaacccgaggccacaaaatgcttccaatggcaaaggaatatgagaaaagtgcgtggccctcctgtcagctgcataaagagagactcccccatccagtgtatccaggccattgcggaaaacagggccgatgctgtgacccttgatggtggtttcatatacgaggcaggcctggccccctacaaactgcgacctgtagcggcggaagtctacgggaccgaaagacagccacgaactcactattatgccgtggctgtggtgaagaagggcggcagctttcagctgaacgaactgcaaggtctgaagtcctgccacacaggccttcgcaggaccgctggatggaatgtccctatagggacacttcgtccattcttgaattggacgggtccacctgagcccattgaggcagctgtggccaggttcttctcagccagctgtgttcccggtgcagataaaggacagttccccaacctgtgtcgcctgtgtgcggggacaggggaaaacaaatgtgccttctcctcccaggaaccgtacttcagctactctggtgccttcaagtgtctgagagacggggctggagacgtggcttttatcagagagagcacagtgtttgaggacctgtcagacgaggctgaaagggacgagtatgagttactctgcccagacaacactcggaagccagtggacaagttcaaagactgccatctggcccgggtcccttctcatgccgttgtggcacgaagtgtgaatggcaaggaggatgccatctggaatcttctccgccaggcacaggaaaagtttggaaaggacaagtcaccgaaattccagctctttggctcccctagtgggcagaaagatctgctgttcaaggactctgccattgggttttcgagggtgcccccgaggatagattctgggctgtaccttggctccggctacttcactgccatccagaacttgaggaaaagtgaggaggaagtggctgcccggcgtgcgcgggtcgtgtggtgtgcggtgggcgagcaggagctgcgcaagtgtaaccagtggagtggcttgagcgaaggcagcgtgacctgctcctcggcctccaccacagaggactgcatcgccctggtgctgaaaggagaagctgatgccatgagtttggatggaggatatgtgtacactgcaggcaaatgtggtttggtgcctgtcctggcagagaactacaaatcccaacaaagcagtgaccctgatcctaactgtgtggatagacctgtggaaggatatcttgctgtggcggtggttaggagatcagacactagccttacctggaactctgtgaaaggcaagaagtcctgccacaccgccgtggacaggactgcaggctggaatatccccatgggcctgctcttcaaccagacgggctcctgcaaatttgatgaatatttcagtcaaagctgtgcccctgggtctgacccgagatctaatctctgtgctctgtgtattggcgacgagcagggtgagaataagtgcgtgcccaacagcaacgagagatactacggctacactggggctttccggtgcctggctgagaatgctggagacgttgcatttgtgaaagatgtcactgtcttgcagaacactgatggaaataacaatgaggcatgggctaaggatttgaagctggcagactttgcgctgctgtgcctcgatggcaaacggaagcctgtgactgaggctagaagctgccatcttgccatggccccgaatcatgccgtggtgtctcggatggataaggtggaacgcctgaaacaggtgttgctccaccaacaggctaaatttgggagaaatggatctgactgcccggacaagttttgcttattccagtctgaaaccaaaaaccttctgttcaatgacaacactgagtgtctggccagactccatggcaaaacaacatatgaaaaatatttgggaccacagtatgtcgcaggcattactaatctgaaaaagtgctcaacctcccccctcctggaagcctgtgaattcctcaggaagtaaaaccgaagaagatggcccagctccccaagaaagcctcagccattcactgcccccagctcttctccccaggtgtgttggggccttggcctcccctgctgaaggtggggattgcccatccatctgcttacaattccctgctgtcgtcttagcaagaagtaaaatgagaaattttgttgatat

SEQ ID NO: 314744 - DNA, 2740 bp, Homo sapiens
gactcctaggggcttgcagacctagtgggagagaaagaacatcgcagcagccaggcagaaccaggacaggtgaggtgcaggctggctttcctctcgcagcgcggtgtggagtcctgtcctgcctcagggcttttcggagcctggatcctcaaggaacaagtagacctggccgcggggagtggggagggaaggggtgtctattgggcaacagggcggcaaagccctgaataaaggggcgcagggcaggcgcaagtgcagagccttcgtttgccaagtcgcctccagaccgcagacatgaaacttgtcttcctcgtcctgctgttcctcggggccctcggactgtgtctggctggccgtaggagaaggagtgttcagtggtgcgccgtatcccaacccgaggccacaaaatgcttccaatggcaaaggaatatgagaaaagtgcgtggccctcctgtcagctgcataaagagagactcccccatccagtgtatccaggccattgcggaaaacagggccgatgctgtgacccttgatggtggtttcatatacgaggcaggcctggccccctacaaactgcgacctgtagcggcggaagtctacgggaccgaaagacagccacgaactcactattatgccgtggctgtggtgaagaagggcggcagctttcagctgaacgaactgcaaggtctgaagtcctgccacacaggccttcgcaggaccgctggatggaatgtccctatagggacacttcgtccattcttgaattggacgggtccacctgagcccattgaggcagctgtggccaggttcttctcagccagctgtgttcccggtgcagataaaggacagttccccaacctgtgtcgcctgtgtgcggggacaggggaaaacaaatgtgccttctcctcccaggaaccgtacttcagctactctggtgccttcaagtgtctgagagacggggctggagacgtggcttttatcagagagagcacagtgtttgaggacctgtcagacgaggctgaaagggacgagtatgagttactctgcccagacaacactcggaagccagtggacaagttcaaagactgccatctggcccgggtcccttctcatgccgttgtggcacgaagtgtgaatggcaaggaggatgccatctggaatcttctccgccaggcacaggaaaagtttggaaaggacaagtcaccgaaattccagctctttggctcccctagtgggcagaaagatctgctgttcaaggactctgccattgggttttcgagggtgcccccgaggatagattctgggctgtaccttggctccggctacttcactgccatccagaacttgaggaaaagtgaggaggaagtggctgcccggcgtgcgcgggtcgtgtggtgtgcggtgggcgagcaggagctgcgcaagtgtaaccagtggagtggcttgagcgaaggcagcgtgacctgctcctcggcctccaccacagaggactgcatcgccctggtgctgaaaggagaagctgatgccatgagtttggatggaggatatgtgtacactgcaggcaaatgtggtttggtgcctgtcctggcagagaactacaaatcccaacaaagcagtgaccctgatcctaactgtgtggatagacctgtggaaggatatcttgctgtggcggtggttaggagatcagacactagccttacctggaactctgtgaaaggcaagaagtcctgccacaccgccgtggacaggactgcaggctggaatatccccatgggcctgctcttcaaccagacgggctcctgcaaatttgatgaatatttcagtcaaagctgtgcccctgggtctgacccgagatctaatctctgtgctctgtgtattggcgacgagcagggtgagaataagtgcgtgcccaacagcaacgagagatactacggctacactggggctttccggtgcctggctgagaatgctggagacgttgcatttgtgaaagatgtcactgtcttgcagaacactgatggaaataacaatgaggcatgggctaaggatttgaagctggcagactttgcgctgctgtgcctcgatggcaaacggaagcctgtgactgaggctagaagctgccatcttgccatggccccgaatcatgccgtggtgtctcggatggataaggtggaacgcctgaaacaggtgttgctccaccaacaggctaaatttgggagaaatggatctgactgcccggacaagttttgcttattccagtctgaaaccaaaaaccttctgttcaatgacaacactgagtgtctggccagactccatggcaaaacaacatatgaaaaatatttgggaccacagtatgtcgcaggcattactaatctgaaaaagtgctcaacctcccccctcctggaagcctgtgaattcctcaggaagtaaaaccgaagaagatggcccagctccccaagaaagcctcagccattcactgcccccagctcttctccccaggtgtgttggggccttggcctcccctgctgaaggtggggattgcccatccatctgcttacaattccctgctgtcgtcttagcaagaagtaaaatgagaaattttgttgatataaaaaaaaaaaaagggggcggctaaaatttcctcgaggccaagtagcgtcccagtttttggcaaagggcctatggggcgataagaagacagcgggtaacaggtggtggaagggtggctggggacaactgg

SEQ ID NO: 314745 - DNA, 657 bp, Homo sapiens
cttcccatgggtgttggtcatccttctcttctctaagacagattgggactggccaggacccgactgttctcttcgcctcaagctccctggcgagtggcctgttgcacagggttagggccacctgggaggggcaggagaggaaggaagccttgccttcctggaagtggtcatgggctgtggtccaggattctggctcagagttgcaccactgggttttatattcacttggatctttagttgttttggcgcctactgaggtctgaagtttgaatcctgcagtcaattgggatggtggcttgtaccccaaagtgccattgcaacccttgtccttcctgaggaaagggtggcagttgccctgtggaattcctgccctgctccccgtgggtgtccaggctgacagaagttgggtgagtggggccagctggatctaagccgtgtgagcattgggtggaggagtctgtctgcttagccctggagccatgggctgggaggcactcatgaggtttcccatcagtctgagcagtctgcttgggccctatcatgagctgtgtgggtaggtggggagagtaactcctgtcctggcccctgccttggaggccagcgcactgcatgtctgcccagaatgtgtgttttggccagtgtccagccaggtccagt

SEQ ID NO: 314746 - DNA, 645 bp, Homo sapiens
gactggccaccataactggcctttatggagctcttaatgtgcacacacagtggtgctggtgagagagctgccgtgactgaggggtttgggtctcagtctccccacatgggagcctgggacagagcaggaacctgtgtgagggaggcagggtgaccgacctgcacactgagctggttagtggctgagcctgggttttcctagcagcctgcctctctagaagagctgcatattagaatgtcctgagcaattgacttgtgagggcagatctcaaaacccctccattgttgccttgtcacccataagaagttgtatgggaaaaggtcacaggttaagaaggaaggaaagatggcagatggtaggaggtaggaccagaagtggtgcgaggcctggatgctgcccaaggcgggcctgccaccaggagtgtggggtgggggactccactaaggaggtggaatgactccagaactcagctccttctgccccatggttttctcagggctgttcttgggtggaagaaatacccctttgcctcctttaacccacaaattcctcttttccttagctactcactgtctgcccttttgtcgcaggctaaatttgggagaaatggatgcaccaacccggaagggatcctctagacagcca

SEQ ID NO: 314747 - DNA, 385 bp, Homo sapiens
  misc_feature (31)..(32): n is a, c, g, or t
ggtcgactactactactaaattcgcggccgnntctgctgctggtaacaaataggtagaggccagggatgctactaaacaaagcacagccagccccctgcaataaagggttattatcaggccccaaatgtcaatagtgccaaggttgagaaacccttttctgtattgacaaacaactcaggtcactgtgatgcaggtcaggaccaccctctgagaaatatggctacagggctcttcttgtgagcagccagctcaggactgcatagaccacatgcttcttgagggcaggccagtctatccatgctgtgtccccagcacttagcacagcaactcacacaaagcaggtgctaggtcgacgcggccgcgaatttagtagtagtaggcggc

SEQ ID NO: 314748 - DNA, 2980 bp, Homo sapiens
gactcctaggggcttgcagacctagtgggagagaaagaacatcgcagcagccaggcagaaccaggacaggtgaggtgcaggctggctttcctctcgcagcgcggtgtggagtcctgtcctgcctcagggcttttcggagcctggatcctcaaggaacaagtagacctggccgcggggagtggggagggaaggggtgtctattgggcaacagggcggcaaagccctgaataaaggggcgcagggcaggcgcaagtgcagagccttcgtttgccaagtcgcctccagaccgcagacatgaaacttgtcttcctcgtcctgctgttcctcggggccctcggactgtgtctggctggccgtaggagaaggagtgttcagtggtgcgccgtatcccaacccgaggccacaaaatgcttccaatggcaaaggaatatgagaaaagtgcgtggccctcctgtcagctgcataaagagagactcccccatccagtgtatccaggccattgcggaaaacagggccgatgctgtgacccttgatggtggtttcatatacgaggcaggcctggccccctacaaactgcgacctgtagcggcggaagtctacgggaccgaaagacagccacgaactcactattatgccgtggctgtggtgaagaagggcggcagctttcagctgaacgaactgcaaggtctgaagtcctgccacacaggccttcgcaggaccgctggatggaatgtccctatagggacacttcgtccattcttgaattggacgggtccacctgagcccattgaggcagctgtggccaggttcttctcagccagctgtgttcccggtgcagataaaggacagttccccaacctgtgtcgcctgtgtgcggggacaggggaaaacaaatgtgccttctcctcccaggaaccgtacttcagctactctggtgccttcaagtgtctgagagacggggctggagacgtggcttttatcagagagagcacagtgtttgaggacctgtcagacgaggctgaaagggacgagtatgagttactctgcccagacaacactcggaagccagtggacaagttcaaagactgccatctggcccgggtcccttctcatgccgttgtggcacgaagtgtgaatggcaaggaggatgccatctggaatcttctccgccaggcacaggaaaagtttggaaaggacaagtcaccgaaattccagctctttggctcccctagtgggcagaaagatctgctgttcaaggactctgccattgggttttcgagggtgcccccgaggatagattctgggctgtaccttggctccggctacttcactgccatccagaacttgaggaaaagtgaggaggaagtggctgcccggcgtgcgcgggtcgtgtggtgtgcggtgggcgagcaggagctgcgcaagtgtaaccagtggagtggcttgagcgaaggcagcgtgacctgctcctcggcctccaccacagaggactgcatcgccctggtgctgaaaggagaagctgatgccatgagtttggatggaggatatgtgtacactgcaggcaaatgtggtttggtgcctgtcctggcagagaactacaaatcccaacaaagcagtgaccctgatcctaactgtgtggatagacctgtggaaggatatcttgctgtggcggtggttaggagatcagacactagccttacctggaactctgtgaaaggcaagaagtcctgccacaccgccgtggacaggactgcaggctggaatatccccatgggcctgctcttcaaccagacgggctcctgcaaatttgatgaatatttcagtcaaagctgtgcccctgggtctgacccgagatctaatctctgtgctctgtgtattggcgacgagcagggtgagaataagtgcgtgcccaacagcaacgagagatactacggctacactggggctttccggtgcctggctgagaatgctggagacgttgcatttgtgaaagatgtcactgtcttgcagaacactgatggaaataacaatgaggcatgggctaaggatttgaagctggcagactttgcgctgctgtgcctcgatggcaaacggaagcctgtgactgaggctagaagctgccatcttgccatggccccgaatcatgccgtggtgtctcggatggataaggtggaacgcctgaaacaggtgttgctccaccaacaggctaaatttgggagaaatggatctgactgcccggacaagttttgcttattccagtctgaaaccaaaaaccttctgttcaatgacaacactgagtgtctggccagactccatggcaaaacaacatatgaaaaatatttgggaccacagtatgtcgcaggcattactaatctgaaaaagtgctcaacctcccccctcctggaagcctgtgaattcctcaggaagtaaaaccgaagaagatggcccagctccccaagaaagcctcagccattcactgcccccagctcttctccccaggtgtgttggggccttggcctcccctgctgaaggtggggattgcccatccatctgcttacaattccctgctgtcgtcttagcaagaagtaaaatgagaaattttgttgatattctctccttaaaaagtgtcactcatcttttctagaattttatactgaaatcacatgcctgacaaaatacctgtacagttggaccttcccttccaagtttttcaggtccagcccctcctctttcttgcagtcttgggtatgatgcccaagggtctggaatttaaggccaggccaagcaccggttttcctaaggggatcttgttggttattcacatagctgtctcagtgcacgtgcatgtatgtgcctgggagtgtgtgcgtgtccccaaggcagggcaggaagaacaagcataggaattataactgaaatgtaggttcagttgctcatcacttgcagagtctaattaacaagagctaggtttggtataaag

SEQ ID NO: 314749 - DNA, 3050 bp, Homo sapiens
cttcccatgggtgttggtcatccttctcttctctaagacagattgggactggccaggacccgactgttctcttcgcctcaagctccctggcgagtggcctgttgcacagggttagggccacctgggaggggcaggagaggaaggaagccttgccttcctggaagtggtcatgggctgtggtccaggattctggctcagagttgcaccactgggttttatattcacttggatctttagttgttttggcgcctactgaggtctgaagtttgaatcctgcagtcaattgggatggtggcttgtaccccaaagtgccattgcaacccttgtccttcctgaggaaagggtggcagttgccctgtggaattcctgccctgctccccgtgggtgtccaggctgacagaagttgggactgtgtctggctggccgtaggagaaggagtgttcagtggtgcgccgtatcccaacccgaggccacaaaatgcttccaatggcaaaggaatatgagaaaagtgcgtggccctcctgtcagctgcataaagagagactcccccatccagtgtatccaggccattgcggaaaacagggccgatgctgtgacccttgatggtggtttcatatacgaggcaggcctggccccctacaaactgcgacctgtagcggcggaagtctacgggaccgaaagacagccacgaactcactattatgccgtggctgtggtgaagaagggcggcagctttcagctgaacgaactgcaaggtctgaagtcctgccacacaggccttcgcaggaccgctggatggaatgtccctatagggacacttcgtccattcttgaattggacgggtccacctgagcccattgaggcagctgtggccaggttcttctcagccagctgtgttcccggtgcagataaaggacagttccccaacctgtgtcgcctgtgtgcggggacaggggaaaacaaatgtgccttctcctcccaggaaccgtacttcagctactctggtgccttcaagtgtctgagagacggggctggagacgtggcttttatcagagagagcacagtgtttgaggacctgtcagacgaggctgaaagggacgagtatgagttactctgcccagacaacactcggaagccagtggacaagttcaaagactgccatctggcccgggtcccttctcatgccgttgtggcacgaagtgtgaatggcaaggaggatgccatctggaatcttctccgccaggcacaggaaaagtttggaaaggacaagtcaccgaaattccagctctttggctcccctagtgggcagaaagatctgctgttcaaggactctgccattgggttttcgagggtgcccccgaggatagattctgggctgtaccttggctccggctacttcactgccatccagaacttgaggaaaagtgaggaggaagtggctgcccggcgtgcgcgggtcgtgtggtgtgcggtgggcgagcaggagctgcgcaagtgtaaccagtggagtggcttgagcgaaggcagcgtgacctgctcctcggcctccaccacagaggactgcatcgccctggtgctgaaaggagaagctgatgccatgagtttggatggaggatatgtgtacactgcaggcaaatgtggtttggtgcctgtcctggcagagaactacaaatcccaacaaagcagtgaccctgatcctaactgtgtggatagacctgtggaaggatatcttgctgtggcggtggttaggagatcagacactagccttacctggaactctgtgaaaggcaagaagtcctgccacaccgccgtggacaggactgcaggctggaatatccccatgggcctgctcttcaaccagacgggctcctgcaaatttgatgaatatttcagtcaaagctgtgcccctgggtctgacccgagatctaatctctgtgctctgtgtattggcgacgagcagggtgagaataagtgcgtgcccaacagcaacgagagatactacggctacactggggctttccggtgcctggctgagaatgctggagacgttgcatttgtgaaagatgtcactgtcttgcagaacactgatggaaataacaatgaggcatgggctaaggatttgaagctggcagactttgcgctgctgtgcctcgatggcaaacggaagcctgtgactgaggctagaagctgccatcttgccatggccccgaatcatgccgtggtgtctcggatggataaggtggaacgcctgaaacaggtgttgctccaccaacaggctaaatttgggagaaatggatctgactgcccggacaagttttgcttattccagtctgaaaccaaaaaccttctgttcaatgacaacactgagtgtctggccagactccatggcaaaacaacatatgaaaaatatttgggaccacagtatgtcgcaggcattactaatctgaaaaagtgctcaacctcccccctcctggaagcctgtgaattcctcaggaagtaaaaccgaagaagatggcccagctccccaagaaagcctcagccattcactgcccccagctcttctccccaggtgtgttggggccttggcctcccctgctgaaggtggggattgcccatccatctgcttacaattccctgctgtcgtcttagcaagaagtaaaatgagaaattttgttgatattctctccttaaaaagtgtcactcatcttttctagaattttatactgaaatcacatgcctgacaaaatacctgtacagttggaccttcccttccaagtttttcaggtccagcccctcctctttcttgcagtcttgggtatgatgcccaagggtctggaatttaaggccaggccaagcaccggttttcctaaggggatcttgttggttattcacatagctgtctcagtgcacgtgcatgtatgtgcctgggagtgtgtgcgtgtccccaaggcagggcaggaagaacaagcataggaattataactgaaatgtaggttcagttgctcatcacttgcagagtctaattaacaagagctaggtttggtataaag

SEQ ID NO: 314750 - DNA, 2504 bp, Homo sapiens
aagccagtctcggcctcttttactttcggaaaacagggccgatgctgtgacccttgatggtggtttcatatacgaggcaggcctggccccctacaaactgcgacctgtagcggcggaagtctacgggaccgaaagacagccacgaactcactattatgccgtggctgtggtgaagaagggcggcagctttcagctgaacgaactgcaaggtctgaagtcctgccacacaggccttcgcaggaccgctggatggaatgtccctatagggacacttcgtccattcttgaattggacgggtccacctgagcccattgaggcagctgtggccaggttcttctcagccagctgtgttcccggtgcagataaaggacagttccccaacctgtgtcgcctgtgtgcggggacaggggaaaacaaatgtgccttctcctcccaggaaccgtacttcagctactctggtgccttcaagtgtctgagagacggggctggagacgtggcttttatcagagagagcacagtgtttgaggacctgtcagacgaggctgaaagggacgagtatgagttactctgcccagacaacactcggaagccagtggacaagttcaaagactgccatctggcccgggtcccttctcatgccgttgtggcacgaagtgtgaatggcaaggaggatgccatctggaatcttctccgccaggcacaggaaaagtttggaaaggacaagtcaccgaaattccagctctttggctcccctagtgggcagaaagatctgctgttcaaggactctgccattgggttttcgagggtgcccccgaggatagattctgggctgtaccttggctccggctacttcactgccatccagaacttgaggaaaagtgaggaggaagtggctgcccggcgtgcgcgggtcgtgtggtgtgcggtgggcgagcaggagctgcgcaagtgtaaccagtggagtggcttgagcgaaggcagcgtgacctgctcctcggcctccaccacagaggactgcatcgccctggtgctgaaaggagaagctgatgccatgagtttggatggaggatatgtgtacactgcaggcaaatgtggtttggtgcctgtcctggcagagaactacaaatcccaacaaagcagtgaccctgatcctaactgtgtggatagacctgtggaaggatatcttgctgtggcggtggttaggagatcagacactagccttacctggaactctgtgaaaggcaagaagtcctgccacaccgccgtggacaggactgcaggctggaatatccccatgggcctgctcttcaaccagacgggctcctgcaaatttgatgaatatttcagtcaaagctgtgcccctgggtctgacccgagatctaatctctgtgctctgtgtattggcgacgagcagggtgagaataagtgcgtgcccaacagcaacgagagatactacggctacactggggctttccggtgcctggctgagaatgctggagacgttgcatttgtgaaagatgtcactgtcttgcagaacactgatggaaataacaatgaggcatgggctaaggatttgaagctggcagactttgcgctgctgtgcctcgatggcaaacggaagcctgtgactgaggctagaagctgccatcttgccatggccccgaatcatgccgtggtgtctcggatggataaggtggaacgcctgaaacaggtgttgctccaccaacaggctaaatttgggagaaatggatctgactgcccggacaagttttgcttattccagtctgaaaccaaaaaccttctgttcaatgacaacactgagtgtctggccagactccatggcaaaacaacatatgaaaaatatttgggaccacagtatgtcgcaggcattactaatctgaaaaagtgctcaacctcccccctcctggaagcctgtgaattcctcaggaagtaaaaccgaagaagatggcccagctccccaagaaagcctcagccattcactgcccccagctcttctccccaggtgtgttggggccttggcctcccctgctgaaggtggggattgcccatccatctgcttacaattccctgctgtcgtcttagcaagaagtaaaatgagaaattttgttgatattctctccttaaaaagtgtcactcatcttttctagaattttatactgaaatcacatgcctgacaaaatacctgtacagttggaccttcccttccaagtttttcaggtccagcccctcctctttcttgcagtcttgggtatgatgcccaagggtctggaatttaaggccaggccaagcaccggttttcctaaggggatcttgttggttattcacatagctgtctcagtgcacgtgcatgtatgtgcctgggagtgtgtgcgtgtccccaaggcagggcaggaagaacaagcataggaattataactgaaatgtaggttcagttgctcatcacttgcagagtctaattaacaagagctaggtttggtataaag

SEQ ID NO: 314751 - DNA, 2418 bp, Homo sapiens
tacttgaggatcctttcgactgacacgtggaagtctacgggaccgaaagacagccacgaactcactattatgccgtggctgtggtgaagaagggcggcagctttcagctgaacgaactgcaaggtctgaagtcctgccacacaggccttcgcaggaccgctggatggaatgtccctatagggacacttcgtccattcttgaattggacgggtccacctgagcccattgaggcagctgtggccaggttcttctcagccagctgtgttcccggtgcagataaaggacagttccccaacctgtgtcgcctgtgtgcggggacaggggaaaacaaatgtgccttctcctcccaggaaccgtacttcagctactctggtgccttcaagtgtctgagagacggggctggagacgtggcttttatcagagagagcacagtgtttgaggacctgtcagacgaggctgaaagggacgagtatgagttactctgcccagacaacactcggaagccagtggacaagttcaaagactgccatctggcccgggtcccttctcatgccgttgtggcacgaagtgtgaatggcaaggaggatgccatctggaatcttctccgccaggcacaggaaaagtttggaaaggacaagtcaccgaaattccagctctttggctcccctagtgggcagaaagatctgctgttcaaggactctgccattgggttttcgagggtgcccccgaggatagattctgggctgtaccttggctccggctacttcactgccatccagaacttgaggaaaagtgaggaggaagtggctgcccggcgtgcgcgggtcgtgtggtgtgcggtgggcgagcaggagctgcgcaagtgtaaccagtggagtggcttgagcgaaggcagcgtgacctgctcctcggcctccaccacagaggactgcatcgccctggtgctgaaaggagaagctgatgccatgagtttggatggaggatatgtgtacactgcaggcaaatgtggtttggtgcctgtcctggcagagaactacaaatcccaacaaagcagtgaccctgatcctaactgtgtggatagacctgtggaaggatatcttgctgtggcggtggttaggagatcagacactagccttacctggaactctgtgaaaggcaagaagtcctgccacaccgccgtggacaggactgcaggctggaatatccccatgggcctgctcttcaaccagacgggctcctgcaaatttgatgaatatttcagtcaaagctgtgcccctgggtctgacccgagatctaatctctgtgctctgtgtattggcgacgagcagggtgagaataagtgcgtgcccaacagcaacgagagatactacggctacactggggctttccggtgcctggctgagaatgctggagacgttgcatttgtgaaagatgtcactgtcttgcagaacactgatggaaataacaatgaggcatgggctaaggatttgaagctggcagactttgcgctgctgtgcctcgatggcaaacggaagcctgtgactgaggctagaagctgccatcttgccatggccccgaatcatgccgtggtgtctcggatggataaggtggaacgcctgaaacaggtgttgctccaccaacaggctaaatttgggagaaatggatctgactgcccggacaagttttgcttattccagtctgaaaccaaaaaccttctgttcaatgacaacactgagtgtctggccagactccatggcaaaacaacatatgaaaaatatttgggaccacagtatgtcgcaggcattactaatctgaaaaagtgctcaacctcccccctcctggaagcctgtgaattcctcaggaagtaaaaccgaagaagatggcccagctccccaagaaagcctcagccattcactgcccccagctcttctccccaggtgtgttggggccttggcctcccctgctgaaggtggggattgcccatccatctgcttacaattccctgctgtcgtcttagcaagaagtaaaatgagaaattttgttgatattctctccttaaaaagtgtcactcatcttttctagaattttatactgaaatcacatgcctgacaaaatacctgtacagttggaccttcccttccaagtttttcaggtccagcccctcctctttcttgcagtcttgggtatgatgcccaagggtctggaatttaaggccaggccaagcaccggttttcctaaggggatcttgttggttattcacatagctgtctcagtgcacgtgcatgtatgtgcctgggagtgtgtgcgtgtccccaaggcagggcaggaagaacaagcataggaattataactgaaatgtaggttcagttgctcatcacttgcagagtctaattaacaagagctaggtttggtataaag

SEQ ID NO: 314752 - DNA, 2597 bp, Homo sapiens
gactcctaggggcttgcagacctagtgggagagaaagaacatcgcagcagccaggcagaaccaggacaggtgaggtgcaggctggctttcctctcgcagcgcggtgtggagtcctgtcctgcctcagggcttttcggagcctggatcctcaaggaacaagtagacctggccgcggggagtggggagggaaggggtgtctattgggcaacagggcggcaaagccctgaataaaggggcgcagggcaggcgcaagtgcagagccttcgtttgccaagtcgcctccagaccgcagacatgaaacttgtcttcctcgtcctgctgttcctcggggccctcggactgtgtctggctggccgtaggagaaggagtgttcagtggtgcgccgtatcccaacccgaggccacaaaatgcttccaatggcaaaggaatatgagaaaagtgcgtggccctcctgtcagctgcataaagagagactcccccatccagtgtatccaggccattgcggaaaacagggccgatgctgtgacccttgatggtggtttcatatacgaggcaggcctggccccctacaaactgcgacctgtagcggcggaagtctacgggaccgaaagacagccacgaactcactattatgccgtggctgtggtgaagaagggcggcagctttcagctgaacgaactgcaaggtctgaagtcctgccacacaggccttcgcaggaccgctggatggaatgtccctatagggacacttcgtccattcttgaattggacgggtccacctgagcccattgaggcagctgtggccaggttcttctcagccagctgtgttcccggtgcagataaaggacagttccccaacctgtgtcgcctgtgtgcggggacaggggaaaacaaatgtgccttctcctcccaggaaccgtacttcagctactctggtgccttcaagtgtctgagagacggggctggagacgtggcttttatcagagagagcacagtgtttgaggacctgtcagacgaggctgaaagggacgagtatgagttactctgcccagacaacactcggaagccagtggacaagttcaaagactgccatctggcccgggtcccttctcatgccgttgtggcacgaagtgtgaatggcaaggaggatgccatctggaatcttctccgccaggcacaggaaaagtttggaaaggacaagtcaccgaaattccagctctttggctcccctagtgggcagaaagatctgctgttcaaggactctgccattgggttttcgagggtgcccccgaggatagattctgggctgtaccttggctccggctacttcactgccatccagaacttgaggaaaagtgaggaggaagtggctgcccggcgtgcgcgggtcgtgtggtgtgcggtgggcgagcaggagctgcgcaagtgtaaccagtggagtggcttgagcgaaggcagcgtgacctgctcctcggcctccaccacagaggactgcatcgccctggtgctgaaaggagaagctgatgccatgagtttggatggaggatatgtgtacactgcaggcaaatgtggtttggtgcctgtcctggcagagaactacaaatcccaacaaagcagtgaccctgatcctaactgtgtggatagacctgtggaaggatatcttgctgtggcggtggttaggagatcagacactagccttacctggaactctgtgaaaggcaagaagtcctgccacaccgccgtggacaggactgcaggctggaatatccccatgggcctgctcttcaaccagacgggctcctgcaaatttgatgaatatttcagtcaaagctgtgcccctgggtctgacccgagatctaatctctgtgctctgtgtattggcgacgagcagggtgagaataagtgcgtgcccaacagcaacgagagatactacggctacactggggctttccggtgcctggctgagaatgctggagacgttgcatttgtgaaagatgtcactgtcttgcagaacactgatggaaataacaatgaggcatgggctaaggatttgaagctggcagactttgcgctgctgtgcctcgatggcaaacggaagcctgtgactgaggctagaagctgccatcttgccatggccccgaatcatgccgtggtgtctcggatggataaggtggaacgcctgaaacaggtgttgctccaccaacaggctaaatttgggagaaatggatctgactgcccggacaagttttgcttattccagtctgaaaccaaaaaccttctgttcaatgacaacactgagtgtctggccagactccatggcaaaacaacatatgaaaaatatttgggaccacagtatgtcgcaggcattactaatctgaaaaagtgctcaacctcccccctcctggaagcctgtgaattcctcaggaagtaaaaccgaagaagatggcccagctccccaagaaagcctcagccattcactgcccccagctcttctccccaggtgtgttggggccttggcctcccctgctgaaggtggggattgcccatccatctgcttacaattccctgctgtgctgccgtgctgtgtctgcagcagga

SEQ ID NO: 314753 - DNA, 2571 bp, Homo sapiens
gactcctaggggcttgcagacctagtgggagagaaagaacatcgcagcagccaggcagaaccaggacaggtgaggtgcaggctggctttcctctcgcagcgcggtgtggagtcctgtcctgcctcagggcttttcggagcctggatcctcaaggaacaagtagacctggccgcggggagtggggagggaaggggtgtctattgggcaacagggcggcaaagccctgaataaaggggcgcagggcaggcgcaagtgcagagccttcgtttgccaagtcgcctccagaccgcagacatgaaacttgtcttcctcgtcctgctgttcctcggggccctcggactgtgtctggctggccgtaggagaaggagtgttcagtggtgcgccgtatcccaacccgaggccacaaaatgcttccaatggcaaaggaatatgagaaaagtgcgtggccctcctgtcagctgcataaagagagactcccccatccagtgtatccaggccattgcggaaaacagggccgatgctgtgacccttgatggtggtttcatatacgaggcaggcctggccccctacaaactgcgacctgtagcggcggaagtctacgggaccgaaagacagccacgaactcactattatgccgtggctgtggtgaagaagggcggcagctttcagctgaacgaactgcaaggtctgaagtcctgccacacaggccttcgcaggaccgctggatggaatgtccctatagggacacttcgtccattcttgaattggacgggtccacctgagcccattgaggcagctgtggccaggttcttctcagccagctgtgttcccggtgcagataaaggacagttccccaacctgtgtcgcctgtgtgcggggacaggggaaaacaaatgtgccttctcctcccaggaaccgtacttcagctactctggtgccttcaagtgtctgagagacggggctggagacgtggcttttatcagagagagcacagtgtttgaggacctgtcagacgaggctgaaagggacgagtatgagttactctgcccagacaacactcggaagccagtggacaagttcaaagactgccatctggcccgggtcccttctcatgccgttgtggcacgaagtgtgaatggcaaggaggatgccatctggaatcttctccgccaggcacaggaaaagtttggaaaggacaagtcaccgaaattccagctctttggctcccctagtgggcagaaagatctgctgttcaaggactctgccattgggttttcgagggtgcccccgaggatagattctgggctgtaccttggctccggctacttcactgccatccagaacttgaggaaaagtgaggaggaagtggctgcccggcgtgcgcgggtcgtgtggtgtgcggtgggcgagcaggagctgcgcaagtgtaaccagtggagtggcttgagcgaaggcagcgtgacctgctcctcggcctccaccacagaggactgcatcgccctggtgctgaaaggagaagctgatgccatgagtttggatggaggatatgtgtacactgcaggcaaatgtggtttggtgcctgtcctggcagagaactacaaatcccaacaaagcagtgaccctgatcctaactgtgtggatagacctgtggaaggatatcttgctgtggcggtggttaggagatcagacactagccttacctggaactctgtgaaaggcaagaagtcctgccacaccgccgtggacaggactgcaggctggaatatccccatgggcctgctcttcaaccagacgggctcctgcaaatttgatgaatatttcagtcaaagctgtgcccctgggtctgacccgagatctaatctctgtgctctgtgtattggcgacgagcagggtgagaataagtgcgtgcccaacagcaacgagagatactacggctacactggggctttccggtgcctggctgagaatgctggagacgttgcatttgtgaaagatgtcactgtcttgcagaacactgatggaaataacaatgaggcatgggctaaggatttgaagctggcagactttgcgctgctgtgcctcgatggcaaacggaagcctgtgactgaggctagaagctgccatcttgccatggccccgaatcatgccgtggtgtctcggatggataaggtggaacgcctgaaacaggtgttgctccaccaacaggctaaatttgggagaaatggatctgactgcccggacaagttttgcttattccagtctgaaaccaaaaaccttctgttcaatgacaacactgagtgtctggccagactccatggcaaaacaacatatgaaaaatatttgggaccacagtatgtcgcaggcattactaatctgaaaaagtgctcaacctcccccctcctggaagcctgtgaattcctcaggaagtaaaaccgaagaagatggcccagctccccaagaaagcctcagccattcactgcccccagctcttctcccagttgttggcatgctcctctgaagtgggatgccatccattcccacacaccgcagatcctgtagagtcaccccagc

SEQ ID NO: 314754 - DNA, 1922 bp, Homo sapiens
  misc_feature (5)..(5): n is a, c, g, or t
tagantcgagctcggtaccagattcccttgccatctggcccgggtcccttctcatgccgttgtggcacgaagtgtgaatggcaaggaggatgccatctggaatcttctccgccaggcacaggaaaagtttggaaaggacaagtcaccgaaattccagctctttggctcccctagtgggcagaaagatctgctgttcaaggactctgccattgggttttcgagggtgcccccgaggatagattctgggctgtaccttggctccggctacttcactgccatccagaacttgaggaaaagtgaggaggaagtggctgcccggcgtgcgcgggtcgtgtggtgtgcggtgggcgagcaggagctgcgcaagtgtaaccagtggagtggcttgagcgaaggcagcgtgacctgctcctcggcctccaccacagaggactgcatcgccctggtgctgaaaggagaagctgatgccatgagtttggatggaggatatgtgtacactgcaggcaaatgtggtttggtgcctgtcctggcagagaactacaaatcccaacaaagcagtgaccctgatcctaactgtgtggatagacctgtggaaggatatcttgctgtggcggtggttaggagatcagacactagccttacctggaactctgtgaaaggcaagaagtcctgccacaccgccgtggacaggactgcaggctggaatatccccatgggcctgctcttcaaccagacgggctcctgcaaatttgatgaatatttcagtcaaagctgtgcccctgggtctgacccgagatctaatctctgtgctctgtgtattggcgacgagcagggtgagaataagtgcgtgcccaacagcaacgagagatactacggctacactggggctttccggtgcctggctgagaatgctggagacgttgcatttgtgaaagatgtcactgtcttgcagaacactgatggaaataacaatgaggcatgggctaaggatttgaagctggcagactttgcgctgctgtgcctcgatggcaaacggaagcctgtgactgaggctagaagctgccatcttgccatggccccgaatcatgccgtggtgtctcggatggataaggtggaacgcctgaaacaggtgttgctccaccaacaggctaaatttgggagaaatggatctgactgcccggacaagttttgcttattccagtctgaaaccaaaaaccttctgttcaatgacaacactgagtgtctggccagactccatggcaaaacaacatatgaaaaatatttgggaccacagtatgtcgcaggcattactaatctgaaaaagtgctcaacctcccccctcctggaagcctgtgaattcctcaggaagtaaaaccgaagaagatggcccagctccccaagaaagcctcagccattcactgcccccagctcttctccccaggtgtgttggggccttggcctcccctgctgaaggtggggattgcccatccatctgcttacaattccctgctgtcgtcttagcaagaagtaaaatgagaaattttgttgatattctctccttaaaaagtgtcactcatcttttctagaattttatactgaaatcacatgcctgacaaaatacctgtacagttggaccttcccttccaagtttttcaggtccagcccctcctctttcttgcagtcttgggtatgatgcccaagggtctggaatttaaggccaggccaagcaccggttttcctaaggggatcttgttggttattcacatagctgtctcagtgcacgtgcatgtatgtgcctgggagtgtgtgcgtgtccccaaggcagggcaggaagaacaagcataggaattataactgaaatgtaggttcagttgctcatcacttgcagagtctaattaacaagagctaggtttggtataaag

SEQ ID NO: 314755 - DNA, 2530 bp, Homo sapiens
gactcctaggggcttgcagacctagtgggagagaaagaacatcgcagcagccaggcagaaccaggacaggtgaggtgcaggctggctttcctctcgcagcgcggtgtggagtcctgtcctgcctcagggcttttcggagcctggatcctcaaggaacaagtagacctggccgcggggagtggggagggaaggggtgtctattgggcaacagggcggcaaagccctgaataaaggggcgcagggcaggcgcaagtgcagagccttcgtttgccaagtcgcctccagaccgcagacatgaaacttgtcttcctcgtcctgctgttcctcggggccctcggactgtgtctggctggccgtaggagaaggagtgttcagtggtgcgccgtatcccaacccgaggccacaaaatgcttccaatggcaaaggaatatgagaaaagtgcgtggccctcctgtcagctgcataaagagagactcccccatccagtgtatccaggccattgcggaaaacagggccgatgctgtgacccttgatggtggtttcatatacgaggcaggcctggccccctacaaactgcgacctgtagcggcggaagtctacgggaccgaaagacagccacgaactcactattatgccgtggctgtggtgaagaagggcggcagctttcagctgaacgaactgcaaggtctgaagtcctgccacacaggccttcgcaggaccgctggatggaatgtccctatagggacacttcgtccattcttgaattggacgggtccacctgagcccattgaggcagctgtggccaggttcttctcagccagctgtgttcccggtgcagataaaggacagttccccaacctgtgtcgcctgtgtgcggggacaggggaaaacaaatgtgccttctcctcccaggaaccgtacttcagctactctggtgccttcaagtgtctgagagacggggctggagacgtggcttttatcagagagagcacagtgtttgaggacctgtcagacgaggctgaaagggacgagtatgagttactctgcccagacaacactcggaagccagtggacaagttcaaagactgccatctggcccgggtcccttctcatgccgttgtggcacgaagtgtgaatggcaaggaggatgccatctggaatcttctccgccaggcacaggaaaagtttggaaaggacaagtcaccgaaattccagctctttggctcccctagtgggcagaaagatctgctgttcaaggactctgccattgggttttcgagggtgcccccgaggatagattctgggctgtaccttggctccggctacttcactgccatccagaacttgaggaaaagtgaggaggaagtggctgcccggcgtgcgcgggtcgtgtggtgtgcggtgggcgagcaggagctgcgcaagtgtaaccagtggagtggcttgagcgaaggcagcgtgacctgctcctcggcctccaccacagaggactgcatcgccctggtgctgaaaggagaagctgatgccatgagtttggatggaggatatgtgtacactgcaggcaaatgtggtttggtgcctgtcctggcagagaactacaaatcccaacaaagcagtgaccctgatcctaactgtgtggatagacctgtggaaggatatcttgctgtggcggtggttaggagatcagacactagccttacctggaactctgtgaaaggcaagaagtcctgccacaccgccgtggacaggactgcaggctggaatatccccatgggcctgctcttcaaccagacgggctcctgcaaatttgatgaatatttcagtcaaagctgtgcccctgggtctgacccgagatctaatctctgtgctctgtgtattggcgacgagcagggtgagaataagtgcgtgcccaacagcaacgagagatactacggctacactggggctttccggtgcctggctgagaatgctggagacgttgcatttgtgaaagatgtcactgtcttgcagaacactgatggaaataacaatgaggcatgggctaaggatttgaagctggcagactttgcgctgctgtgcctcgatggcaaacggaagcctgtgactgaggctagaagctgccatcttgccatggccccgaatcatgccgtggtgtctcggatggataaggtggaacgcctgaaacaggtgttgctccaccaacaggctaaatttgggagaaatggatctgactgcccggacaagttttgcttattccagtctgaaaccaaaaaccttctgttcaatgacaacactgagtgtctggccagactccatggcaaaacaacatatgaaaaatatttgggaccacagtatgtcgcaggcattactaatctgaaaaagtgctcaacctcccccctcctggaagcctgtgaattcctcaggaagtaaaaccgaagaagatggatgggcaatccccaccttcagcaggggaggccaaggccccaaaacacctggggagaagagctgggggcagtgaatggctgaggct

SEQ ID NO: 314756 - DNA, 2556 bp, Homo sapiens
gactcctaggggcttgcagacctagtgggagagaaagaacatcgcagcagccaggcagaaccaggacaggtgaggtgcaggctggctttcctctcgcagcgcggtgtggagtcctgtcctgcctcagggcttttcggagcctggatcctcaaggaacaagtagacctggccgcggggagtggggagggaaggggtgtctattgggcaacagggcggcaaagccctgaataaaggggcgcagggcaggcgcaagtgcagagccttcgtttgccaagtcgcctccagaccgcagacatgaaacttgtcttcctcgtcctgctgttcctcggggccctcggactgtgtctggctggccgtaggagaaggagtgttcagtggtgcgccgtatcccaacccgaggccacaaaatgcttccaatggcaaaggaatatgagaaaagtgcgtggccctcctgtcagctgcataaagagagactcccccatccagtgtatccaggccattgcggaaaacagggccgatgctgtgacccttgatggtggtttcatatacgaggcaggcctggccccctacaaactgcgacctgtagcggcggaagtctacgggaccgaaagacagccacgaactcactattatgccgtggctgtggtgaagaagggcggcagctttcagctgaacgaactgcaaggtctgaagtcctgccacacaggccttcgcaggaccgctggatggaatgtccctatagggacacttcgtccattcttgaattggacgggtccacctgagcccattgaggcagctgtggccaggttcttctcagccagctgtgttcccggtgcagataaaggacagttccccaacctgtgtcgcctgtgtgcggggacaggggaaaacaaatgtgccttctcctcccaggaaccgtacttcagctactctggtgccttcaagtgtctgagagacggggctggagacgtggcttttatcagagagagcacagtgtttgaggacctgtcagacgaggctgaaagggacgagtatgagttactctgcccagacaacactcggaagccagtggacaagttcaaagactgccatctggcccgggtcccttctcatgccgttgtggcacgaagtgtgaatggcaaggaggatgccatctggaatcttctccgccaggcacaggaaaagtttggaaaggacaagtcaccgaaattccagctctttggctcccctagtgggcagaaagatctgctgttcaaggactctgccattgggttttcgagggtgcccccgaggatagattctgggctgtaccttggctccggctacttcactgccatccagaacttgaggaaaagtgaggaggaagtggctgcccggcgtgcgcgggtcgtgtggtgtgcggtgggcgagcaggagctgcgcaagtgtaaccagtggagtggcttgagcgaaggcagcgtgacctgctcctcggcctccaccacagaggactgcatcgccctggtgctgaaaggagaagctgatgccatgagtttggatggaggatatgtgtacactgcaggcaaatgtggtttggtgcctgtcctggcagagaactacaaatcccaacaaagcagtgaccctgatcctaactgtgtggatagacctgtggaaggatatcttgctgtggcggtggttaggagatcagacactagccttacctggaactctgtgaaaggcaagaagtcctgccacaccgccgtggacaggactgcaggctggaatatccccatgggcctgctcttcaaccagacgggctcctgcaaatttgatgaatatttcagtcaaagctgtgcccctgggtctgacccgagatctaatctctgtgctctgtgtattggcgacgagcagggtgagaataagtgcgtgcccaacagcaacgagagatactacggctacactggggctttccggtgcctggctgagaatgctggagacgttgcatttgtgaaagatgtcactgtcttgcagaacactgatggaaataacaatgaggcatgggctaaggatttgaagctggcagactttgcgctgctgtgcctcgatggcaaacggaagcctgtgactgaggctagaagctgccatcttgccatggccccgaatcatgccgtggtgtctcggatggataaggtggaacgcctgaaacaggtgttgctccaccaacaggctaaatttgggagaaatggatctgactgcccggacaagttttgcttattccagtctgaaaccaaaaaccttctgttcaatgacaacactgagtgtctggccagactccatggcaaaacaacatatgaaaaatatttgggaccacagtatgtcgcaggcattactaatctgattctacccgttaacagtggactttgctttgcataaaggaagggcagtttggcagagtttgccctaagaaataatgaatgtgccatgatccagtgctatctgggtcatctcctacacagcgacctctgcctggagcacttgtcctttttctttttcttttttctttctttcttttttata

SEQ ID NO: 314757 - DNA, 1277 bp, Homo sapiens
tgcatcaacgcgttgggagctctcatattgtcgacctgcaggcggcgcgaattcactagtgattagccatgttggccgggccaaccagacgggctcctgcaaatttgatgaatatttcagtcaaagctgtgcccctgggtctgacccgagatctaatctctgtgctctgtgtattggcgacgagcagggtgagaataagtgcgtgcccaacagcaacgagagatactacggctacactggggctttccggtgcctggctgagaatgctggagacgttgcatttgtgaaagatgtcactgtcttgcagaacactgatggaaataacaatgaggcatgggctaaggatttgaagctggcagactttgcgctgctgtgcctcgatggcaaacggaagcctgtgactgaggctagaagctgccatcttgccatggccccgaatcatgccgtggtgtctcggatggataaggtggaacgcctgaaacaggtgttgctccaccaacaggctaaatttgggagaaatggatctgactgcccggacaagttttgcttattccagtctgaaaccaaaaaccttctgttcaatgacaacactgagtgtctggccagactccatggcaaaacaacatatgaaaaatatttgggaccacagtatgtcgcaggcattactaatctgaaaaagtgctcaacctcccccctcctggaagcctgtgaattcctcaggaagtaaaaccgaagaagatggcccagctccccaagaaagcctcagccattcactgcccccagctcttctccccaggtgtgttggggccttggcctcccctgctgaaggtggggattgcccatccatctgcttacaattccctgctgtcgtcttagcaagaagtaaaatgagaaattttgttgatattctctccttaaaaagtgtcactcatcttttctagaattttatactgaaatcacatgcctgacaaaatacctgtacagttggaccttcccttccaagtttttcaggtccagcccctcctctttcttgcagtcttgggtatgatgcccaagggtctggaatttaaggccaggccaagcaccggttttcctaaggggatcttgttggttattcacatagctgtctcagtgcacgtgcatgtatgtgcctgggagtgtgtgcgtgtccccaaggcagggcaggaagaacaagcataggaattataactgaaatgtaggttcagttgctcatcacttgcagagtctaattaacaagagctaggtttggtataaag

SEQ ID NO: 314758 - DNA, 2604 bp, Homo sapiens
gactcctaggggcttgcagacctagtgggagagaaagaacatcgcagcagccaggcagaaccaggacaggtgaggtgcaggctggctttcctctcgcagcgcggtgtggagtcctgtcctgcctcagggcttttcggagcctggatcctcaaggaacaagtagacctggccgcggggagtggggagggaaggggtgtctattgggcaacagggcggcaaagccctgaataaaggggcgcagggcaggcgcaagtgcagagccttcgtttgccaagtcgcctccagaccgcagacatgaaacttgtcttcctcgtcctgctgttcctcggggccctcggactgtgtctggctggccgtaggagaaggagtgttcagtggtgcgccgtatcccaacccgaggccacaaaatgcttccaatggcaaaggaatatgagaaaagtgcgtggccctcctgtcagctgcataaagagagactcccccatccagtgtatccaggccattgcggaaaacagggccgatgctgtgacccttgatggtggtttcatatacgaggcaggcctggccccctacaaactgcgacctgtagcggcggaagtctacgggaccgaaagacagccacgaactcactattatgccgtggctgtggtgaagaagggcggcagctttcagctgaacgaactgcaaggtctgaagtcctgccacacaggccttcgcaggaccgctggatggaatgtccctatagggacacttcgtccattcttgaattggacgggtccacctgagcccattgaggcagctgtggccaggttcttctcagccagctgtgttcccggtgcagataaaggacagttccccaacctgtgtcgcctgtgtgcggggacaggggaaaacaaatgtgccttctcctcccaggaaccgtacttcagctactctggtgccttcaagtgtctgagagacggggctggagacgtggcttttatcagagagagcacagtgtttgaggacctgtcagacgaggctgaaagggacgagtatgagttactctgcccagacaacactcggaagccagtggacaagttcaaagactgccatctggcccgggtcccttctcatgccgttgtggcacgaagtgtgaatggcaaggaggatgccatctggaatcttctccgccaggcacaggaaaagtttggaaaggacaagtcaccgaaattccagctctttggctcccctagtgggcagaaagatctgctgttcaaggactctgccattgggttttcgagggtgcccccgaggatagattctgggctgtaccttggctccggctacttcactgccatccagaacttgaggaaaagtgaggaggaagtggctgcccggcgtgcgcgggtcgtgtggtgtgcggtgggcgagcaggagctgcgcaagtgtaaccagtggagtggcttgagcgaaggcagcgtgacctgctcctcggcctccaccacagaggactgcatcgccctggtgctgaaaggagaagctgatgccatgagtttggatggaggatatgtgtacactgcaggcaaatgtggtttggtgcctgtcctggcagagaactacaaatcccaacaaagcagtgaccctgatcctaactgtgtggatagacctgtggaaggatatcttgctgtggcggtggttaggagatcagacactagccttacctggaactctgtgaaaggcaagaagtcctgccacaccgccgtggacaggactgcaggctggaatatccccatgggcctgctcttcaaccagacgggctcctgcaaatttgatgaatatttcagtcaaagctgtgcccctgggtctgacccgagatctaatctctgtgctctgtgtattggcgacgagcagggtgagaataagtgcgtgcccaacagcaacgagagatactacggctacactggggctttccggtgcctggctgagaatgctggagacgttgcatttgtgaaagatgtcactgtcttgcagaacactgatggtaggtgaaggtgtttccttttctccttcaaagcagagtctttggcatcacaacacatcttagtgttcagatttgcctttgggaaggttttataacattttccatatttgtgattaaaagaactccaaaattctttatctcaatagacaacatgataacatctgtaggtgtcatatggattttgaaacgaaattcatacacacacactctctctctttctctcacacacacacacacactcactctcacacacacagatactagccatgctcagtagcaaatgtctccctggcttcctctagtcaaccacagaaacacactgtctgcccacatgagatcatgcatgcctattggaaactgtggatgatgctacaaactgggtgaacatatgcaaatgaagcctccctttatgaaaaaggaagtagaggccttcattcatccccatgtgagccttggtctggagactccttgggagttagtgggaacaaaattacaggtggttgcagatgatggaagataatcttccagccaatgtttgaacaatcactctctctcctggtcctcagccatttgctaccttccaa

SEQ ID NO: 314759 - DNA, 2065 bp, Homo sapiens
gactcctaggggcttgcagacctagtgggagagaaagaacatcgcagcagccaggcagaaccaggacaggtgaggtgcaggctggctttcctctcgcagcgcggtgtggagtcctgtcctgcctcagggcttttcggagcctggatcctcaaggaacaagtagacctggccgcggggagtggggagggaaggggtgtctattgggcaacagggcggcaaagccctgaataaaggggcgcagggcaggcgcaagtgcagagccttcgtttgccaagtcgcctccagaccgcagacatgaaacttgtcttcctcgtcctgctgttcctcggggccctcggactgtgtctggctggccgtaggagaaggagtgttcagtggtgcgccgtatcccaacccgaggccacaaaatgcttccaatggcaaaggaatatgagaaaagtgcgtggccctcctgtcagctgcataaagagagactcccccatccagtgtatccaggccattgcggaaaacagggccgatgctgtgacccttgatggtggtttcatatacgaggcaggcctggccccctacaaactgcgacctgtagcggcggaagtctacgggaccgaaagacagccacgaactcactattatgccgtggctgtggtgaagaagggcggcagctttcagctgaacgaactgcaaggtctgaagtcctgccacacaggccttcgcaggaccgctggatggaatgtccctatagggacacttcgtccattcttgaattggacgggtccacctgagcccattgaggcagctgtggccaggttcttctcagccagctgtgttcccggtgcagataaaggacagttccccaacctgtgtcgcctgtgtgcggggacaggggaaaacaaatgtgccttctcctcccaggaaccgtacttcagctactctggtgccttcaagtgtctgagagacggggctggagacgtggcttttatcagagagagcacagtgtttgaggacctgtcagacgaggctgaaagggacgagtatgagttactctgcccagacaacactcggaagccagtggacaagttcaaagactgccatctggcccgggtcccttctcatgccgttgtggcacgaagtgtgaatggcaaggaggatgccatctggaatcttctccgccaggcacaggaaaagtttggaaaggacaagtcaccgaaattccagctctttggctcccctagtgggcagaaagatctgctgttcaaggactctgccattgggttttcgagggtgcccccgaggatagattctgggctgtaccttggctccggctacttcactgccatccagaacttgaggaaaagtgaggaggaagtggctgcccggcgtgcgcgggtcgtgtggtgtgcggtgggcgagcaggagctgcgcaagtgtaaccagtggagtggcttgagcgaaggcagcgtgacctgctcctcggcctccaccacagaggactgcatcgccctggtgctgaaaggagaagctgatgccatgagtttggatggaggatatgtgtacactgcaggcaaatgtggtttggtgcctgtcctggcagagaactacaaatcccaacaaagcagtgaccctgatcctaactgtgtggatagacctgtggaaggatatcttgctgtggcggtggttaggagatcagacactagccttacctggaactctgtgaaaggcaagaagtcctgccacaccgccgtggacaggactgcaggctggaatatccccatgggcctgctcttcaaccagacgggctcctgcaaatttgatgaatatttcagtcaaagctgtgcccctgggtctgacccgagatctaatctctgtgctctgtgtattggcgacgagcagggtgagaataagtgcgtgcccaacagcaacgagagatactacggctacactggggctttccggtgcctggctgagaatgctggagacgttgcatttgtgaaagatgtcactgtcttgcagaacactgatggaaataacaatgaggcacagatgcagtcgaggcacggattgcagt

SEQ ID NO: 314760 - DNA, 1906 bp, Homo sapiens
gactcctaggggcttgcagacctagtgggagagaaagaacatcgcagcagccaggcagaaccaggacaggtgaggtgcaggctggctttcctctcgcagcgcggtgtggagtcctgtcctgcctcagggcttttcggagcctggatcctcaaggaacaagtagacctggccgcggggagtggggagggaaggggtgtctattgggcaacagggcggcaaagccctgaataaaggggcgcagggcaggcgcaagtgcagagccttcgtttgccaagtcgcctccagaccgcagacatgaaacttgtcttcctcgtcctgctgttcctcggggccctcggactgtgtctggctggccgtaggagaaggagtgttcagtggtgcgccgtatcccaacccgaggccacaaaatgcttccaatggcaaaggaatatgagaaaagtgcgtggccctcctgtcagctgcataaagagagactcccccatccagtgtatccaggccattgcggaaaacagggccgatgctgtgacccttgatggtggtttcatatacgaggcaggcctggccccctacaaactgcgacctgtagcggcggaagtctacgggaccgaaagacagccacgaactcactattatgccgtggctgtggtgaagaagggcggcagctttcagctgaacgaactgcaaggtctgaagtcctgccacacaggccttcgcaggaccgctggatggaatgtccctatagggacacttcgtccattcttgaattggacgggtccacctgagcccattgaggcagctgtggccaggttcttctcagccagctgtgttcccggtgcagataaaggacagttccccaacctgtgtcgcctgtgtgcggggacaggggaaaacaaatgtgccttctcctcccaggaaccgtacttcagctactctggtgccttcaagtgtctgagagacggggctggagacgtggcttttatcagagagagcacagtgtttgaggacctgtcagacgaggctgaaagggacgagtatgagttactctgcccagacaacactcggaagccagtggacaagttcaaagactgccatctggcccgggtcccttctcatgccgttgtggcacgaagtgtgaatggcaaggaggatgccatctggaatcttctccgccaggcacaggaaaagtttggaaaggacaagtcaccgaaattccagctctttggctcccctagtgggcagaaagatctgctgttcaaggactctgccattgggttttcgagggtgcccccgaggatagattctgggctgtaccttggctccggctacttcactgccatccagaacttgaggaaaagtgaggaggaagtggctgcccggcgtgcgcgggtcgtgtggtgtgcggtgggcgagcaggagctgcgcaagtgtaaccagtggagtggcttgagcgaaggcagcgtgacctgctcctcggcctccaccacagaggactgcatcgccctggtgctgaaaggagaagctgatgccatgagtttggatggaggatatgtgtacactgcaggcaaatgtggtttggtgcctgtcctggcagagaactacaaatcccaacaaagcagtgaccctgatcctaactgtgtggatagacctgtggaaggatatcttgctgtggcggtggttaggagatcagacactagccttacctggaactctgtgaaaggcaagaagtcctgccacaccgccgtggacaggactgcaggctggaatatccccatgggcctgctcttcaaccagacgggctcctgcaaatttgatgaatatttcagtcaaagctgtgcccctgggtctgacccgagatctaatctctgtgcgtcttagcaagaagtaaaatgagaaattttgttgatat

SEQ ID NO: 314761 - DNA, 2074 bp, Homo sapiens
gactcctaggggcttgcagacctagtgggagagaaagaacatcgcagcagccaggcagaaccaggacaggtgaggtgcaggctggctttcctctcgcagcgcggtgtggagtcctgtcctgcctcagggcttttcggagcctggatcctcaaggaacaagtagacctggccgcggggagtggggagggaaggggtgtctattgggcaacagggcggcaaagccctgaataaaggggcgcagggcaggcgcaagtgcagagccttcgtttgccaagtcgcctccagaccgcagacatgaaacttgtcttcctcgtcctgctgttcctcggggccctcggactgtgtctggctggccgtaggagaaggagtgttcagtggtgcgccgtatcccaacccgaggccacaaaatgcttccaatggcaaaggaatatgagaaaagtgcgtggccctcctgtcagctgcataaagagagactcccccatccagtgtatccaggccattgcggaaaacagggccgatgctgtgacccttgatggtggtttcatatacgaggcaggcctggccccctacaaactgcgacctgtagcggcggaagtctacgggaccgaaagacagccacgaactcactattatgccgtggctgtggtgaagaagggcggcagctttcagctgaacgaactgcaaggtctgaagtcctgccacacaggccttcgcaggaccgctggatggaatgtccctatagggacacttcgtccattcttgaattggacgggtccacctgagcccattgaggcagctgtggccaggttcttctcagccagctgtgttcccggtgcagataaaggacagttccccaacctgtgtcgcctgtgtgcggggacaggggaaaacaaatgtgccttctcctcccaggaaccgtacttcagctactctggtgccttcaagtgtctgagagacggggctggagacgtggcttttatcagagagagcacagtgtttgaggacctgtcagacgaggctgaaagggacgagtatgagttactctgcccagacaacactcggaagccagtggacaagttcaaagactgccatctggcccgggtcccttctcatgccgttgtggcacgaagtgtgaatggcaaggaggatgccatctggaatcttctccgccaggcacaggaaaagtttggaaaggacaagtcaccgaaattccagctctttggctcccctagtgggcagaaagatctgctgttcaaggactctgccattgggttttcgagggtgcccccgaggatagattctgggctgtaccttggctccggctacttcactgccatccagaacttgaggaaaagtgaggaggaagtggctgcccggcgtgcgcgggtcgtgtggtgtgcggtgggcgagcaggagctgcgcaagtgtaaccagtggagtggcttgagcgaaggcagcgtgacctgctcctcggcctccaccacagaggactgcatcgccctggtgctgaaaggagaagctgatgccatgagtttggatggaggatatgtgtacactgcaggcaaatgtggtttggtgcctgtcctggcagagaactacaaatcccaacaaagcagtgaccctgatcctaactgtgtggatagacctgtggaaggatatcttgctgtggcggtggttaggagatcagacactagccttacctggaactctgtgaaaggcaagaagtcctgccacaccgccgtggacaggactgcaggctggaatatccccatgggcctgctcttcaaccagacgggctcctgcaaatttggtaaggagttccaaaggtgcggtgggtgggccaccctggagggtaggcatattgtgctgtggaaccttagggaagggaggggaggggatttgcaggctgatagtggcctgcaggcctcttccagcataaggaaattctccctgtggctgccccctggaggcgtgggtgcactgggggtttccctgcacagcacttcccatgccccattcaccccaccccaagattaaagattggaatatctgcctatttcgctgcaccctaaga

SEQ ID NO: 314762 - DNA, 1014 bp, Homo sapiens
gcagtgcagcttgatctcagtatctaaggatcccggtcacagttctgactgatggaaataacaatgaggcatgggctaaggatttgaagctggcagactttgcgctgctgtgcctcgatggcaaacggaagcctgtgactgaggctagaagctgccatcttgccatggccccgaatcatgccgtggtgtctcggatggataaggtggaacgcctgaaacaggtgttgctccaccaacaggctaaatttgggagaaatggatctgactgcccggacaagttttgcttattccagtctgaaaccaaaaaccttctgttcaatgacaacactgagtgtctggccagactccatggcaaaacaacatatgaaaaatatttgggaccacagtatgtcgcaggcattactaatctgaaaaagtgctcaacctcccccctcctggaagcctgtgaattcctcaggaagtaaaaccgaagaagatggcccagctccccaagaaagcctcagccattcactgcccccagctcttctccccaggtgtgttggggccttggcctcccctgctgaaggtggggattgcccatccatctgcttacaattccctgctgtcgtcttagcaagaagtaaaatgagaaattttgttgatattctctccttaaaaagtgtcactcatcttttctagaattttatactgaaatcacatgcctgacaaaatacctgtacagttggaccttcccttccaagtttttcaggtccagcccctcctctttcttgcagtcttgggtatgatgcccaagggtctggaatttaaggccaggccaagcaccggttttcctaaggggatcttgttggttattcacatagctgtctcagtgcacgtgcatgtatgtgcctgggagtgtgtgcgtgtccccaaggcagggcaggaagaacaagcataggaattataactgaaatgtaggttcagttgctcatcacttgcagagtctaattaacaagagctaggtttggtataaag

SEQ ID NO: 314763 - DNA, 1565 bp, Homo sapiens
gactcctaggggcttgcagacctagtgggagagaaagaacatcgcagcagccaggcagaaccaggacaggtgaggtgcaggctggctttcctctcgcagcgcggtgtggagtcctgtcctgcctcagggcttttcggagcctggatcctcaaggaacaagtagacctggccgcggggagtggggagggaaggggtgtctattgggcaacagggcggcaaagccctgaataaaggggcgcagggcaggcgcaagtgcagagccttcgtttgccaagtcgcctccagaccgcagacatgaaacttgtcttcctcgtcctgctgttcctcggggccctcggactgtgtctggctggccgtaggagaaggagtgttcagtggtgcgccgtatcccaacccgaggccacaaaatgcttccaatggcaaaggaatatgagaaaagtgcgtggccctcctgtcagctgcataaagagagactcccccatccagtgtatccaggccattgcggaaaacagggccgatgctgtgacccttgatggtggtttcatatacgaggcaggcctggccccctacaaactgcgacctgtagcggcggaagtctacgggaccgaaagacagccacgaactcactattatgccgtggctgtggtgaagaagggcggcagctttcagctgaacgaactgcaaggtctgaagtcctgccacacaggccttcgcaggaccgctggatggaatgtccctatagggacacttcgtccattcttgaattggacgggtccacctgagcccattgaggcagctgtggccaggttcttctcagccagctgtgttcccggtgcagataaaggacagttccccaacctgtgtcgcctgtgtgcggggacaggggaaaacaaatgtgccttctcctcccaggaaccgtacttcagctactctggtgccttcaagtgtctgagagacggggctggagacgtggcttttatcagagagagcacagtgtttgaggacctgtcagacgaggctgaaagggacgagtatgagttactctgcccagacaacactcggaagccagtggacaagttcaaagactgccatctggcccgggtcccttctcatgccgttgtggcacgaagtgtgaatggcaaggaggatgccatctggaatcttctccgccaggcacaggaaaagtttggaaaggacaagtcaccgaaattccagctctttggctcccctagtgggcagaaagatctgctgttcaaggactctgccattgggttttcgagggtgcccccgaggatagattctgggctgtaccttggctccggctacttcactgccatccagaacttgaggaaaagtgaggaggaagtggctgcccggcgtgcgcgggtcgtgtggtgtgcggtgggcgagcaggagctgcgcaagtgtaaccagtggagtggcttgagcgaaggcagcgtgacctgctcctcggcctccaccacagaggactgcatcgccctggtgctgaaagagaagctgatgccatgagtttggatgaaagggaatctgggccagctgatata

SEQ ID NO: 314764 - DNA, 1375 bp, Homo sapiens
gactcctaggggcttgcagacctagtgggagagaaagaacatcgcagcagccaggcagaaccaggacaggtgaggtgcaggctggctttcctctcgcagcgcggtgtggagtcctgtcctgcctcagggcttttcggagcctggatcctcaaggaacaagtagacctggccgcggggagtggggagggaaggggtgtctattgggcaacagggcggcaaagccctgaataaaggggcgcagggcaggcgcaagtgcagagccttcgtttgccaagtcgcctccagaccgcagacatgaaacttgtcttcctcgtcctgctgttcctcggggccctcggactgtgtctggctggccgtaggagaaggagtgttcagtggtgcgccgtatcccaacccgaggccacaaaatgcttccaatggcaaaggaatatgagaaaagtgcgtggccctcctgtcagctgcataaagagagactcccccatccagtgtatccaggccattgcggaaaacagggccgatgctgtgacccttgatggtggtttcatatacgaggcaggcctggccccctacaaactgcgacctgtagcggcggaagtctacgggaccgaaagacagccacgaactcactattatgccgtggctgtggtgaagaagggcggcagctttcagctgaacgaactgcaaggtctgaagtcctgccacacaggccttcgcaggaccgctggatggaatgtccctatagggacacttcgtccattcttgaattggacgggtccacctgagcccattgaggcagctgtggccaggttcttctcagccagctgtgttcccggtgcagataaaggacagttccccaacctgtgtcgcctgtgtgcggggacaggggaaaacaaatgtgccttctcctcccaggaaccgtacttcagctactctggtgccttcaagtgtctgagagacggggctggagacgtggcttttatcagagagagcacagtgtttgaggacctgtcagacgaggctgaaagggacgagtatgagttactctgcccagacaacactcggaagccagtggacaagttcaaagactgccatctggcccgggtcccttctcatgccgttgtggcacgaagtgtgaatggcaaggaggatgccatctggaatcttctccgccaggcacaggaaaagtttggaaaggacaagtcaccgaaattccagctctttggctcccctagtgggcagaaagatctgctgttcaaggactctgccattgggttttcgagggtgcccccgaggatagattctgggctgtaccttggctccggctacttcactgccatccagaacttgaggaaaagtgagtgagcccaggagggtc

SEQ ID NO: 314765 - DNA, 995 bp, Homo sapiens
gactggccaccataactggcctttatggagctcttaatgtgcacacacagtggtgctggtgagagagctgccgtgactgaggggtttgggtctcagtctccccacatgggagcctgggacagagcaggaacctgtgtgagggaggcagggtgaccgacctgcacactgagctggttagtggctgagcctgggttttcctagcagcctgcctctctagaagagctgcatattagaatgtcctgagcaattgacttgtgagggcagatctcaaaacccctccattgttgccttgtcacccataagaagttgtatgggaaaaggtcacaggttaagaaggaaggaaagatggcagatggtaggaggtaggaccagaagtggtgcgaggcctggatgctgcccaaggcgggcctgccaccaggagtgtggggtgggggactccactaaggaggtggaatgactccagaactcagctccttctgccccatggttttctcagggctgttcttgggtggaagaaatacccctttgcctcctttaacccacaaattcctcttttccttagctactcactgtctgcccttttgtcgcaggctaaatttgggagaaatggatctgactgcccggacaagttttgcttattccagtctgaaaccaaaaaccttctgttcaatgacaacactgagtgtctggccagactccatggcaaaacaacatatgaaaaatatttgggaccacagtatgtcgcaggcattactaatctgaaaaagtgctcaacctcccccctcctggaagcctgtgaattcctcaggaagtaaaaccgaagaagatggcccagctccccaagaaagcctcagccattcactgcccccagctcttctccccaggtgtgttggggccttggcctcccctgctgaaggtggggattgcccatccatctgcttacaattccctgctgtcgtcttagcaagaagtaaaatgagaaattttgttgatat

SEQ ID NO: 314766 - DNA, 472 bp, Homo sapiens
tgcaccattgcactccatcctgggcgacaagaccgatactccatcttgagcctgtgtctagacacaggctaaatttgggagaaatggatctgactgcccggacaagttttgcttattccagtctgaaaccaaaaaccttctgttcaatgacaacactgagtgtctggccagactccatggcaaaacaacatatgaaaaatatttgggaccacagtatgtcgcaggcattactaatctgaaaaagtgctcaacctcccccctcctggaagcctgtgaattcctcaggaagtaaaaccgaagaagatggcccagctccccaagaaagcctcagccattcactgcccccagctcttctccccaggtgtgttggggccttggcctcccctgctgaaggtggggattgcccatccatctgcttacaattccctgctgtcgtcttagcaagaagtaaaatgagaaattttgttgatat

SEQ ID NO: 314767 - DNA, 948 bp, Homo sapiens
  misc_feature (31)..(32): n is a, c, g, or t
ggtcgactactactactaaattcgcggccgnntctgctgctggtaacaaataggtagaggccagggatgctactaaacaaagcacagccagccccctgcaataaagggttattatcaggccccaaatgtcaatagtgccaaggttgagaaacccttttctgtattgacaaacaactcaggtcactgtgatgcaggtcaggaccaccctctgagaaatatggctacagggctcttcttgtgagcagccagctcaggactgcatagaccacatgcttcttgagggcaggccagtctatccatgctgtgtccccagcacttagcacagcaactcacacaaagcaggtgctcagtaaggatctgtgaatgaatgagtgaatctgcaggtgaacatgattgcaaacaggttcacattccgggagaagctagaggaccaccaatgtcttgtgaacttgagaatgtgacagtcgattcaatcagagacaagtgcagggtggttgtgtctctcaggccagagcagggaaacaccctggctggtgagggctagactctggctcccttgaacaccgtagtcgctaggagtaggggagtgggaatatgagtgtggcaagcactgactcagtgatgggagaagggcagagaaaactcttagtattctctttgatttattggattaaataactggtttaatggaagaaatcagtttctgaatctcttgctctgttgtgtcccacagccctcctggaagcctgtgaattcctcaggaagtaaaaccgaagaagatggcccagctccccaagaaagcctcagccattcactgcccccagctcttctccccaggtgtgttggggccttggcctcccctgctgaaggtggggattgcccatccatctgcttacaattccctgctgtcgtcttagcaagaagtaaaatgagaaattttgttgatat

SEQ ID NO: 314768 - DNA, 1570 bp, Homo sapiens
ttctctccccaccacaccccacactcatcctagtcagcatcagccacaccctgcctgctgtgggccccgtggcatggtgtgtagcacatcctcaatgtgactcccttcttgtatgggcgtctcctagggcaggggctccactgcatgggtttttgatcctggccggggcaggcagctttcacgtggctctgctcctcaccagctccatggcagcctctgagctgtagggaaactgccaggatggaatgggaactcccagcttttcctgaggttgacacatagtgtggctcttccagcagcagtgggagtctgataatgggtgacgtttgctcagtggggcagagctttcttgtcacctttgtttattctttcttgggttaaatcacacaatgaacgaattcagatcaggttcagctgcaaggaacagaaaactcctgaaatagtagaggcttaaacaagacagaagttaatttctgtgtcatgtagtccagaggtggtttgcctagggctggtatgaagacaatatggggtctggaacctgggctttaatcatttggctactctgccatttgtgtggctttcatgctcaaggtcacctcatggcccacattgcatctctaagtccagtccctgcttctgcattctatgtgcaggatgaagaaagagaaggagaagaaagggcaaaaggcatgtaccaattgtctttcaaggatgtttctgagaagctggcgcccaacactcctgctgatatttcactggcctatagctacccatatggccatatgagccccagggagtctgataagtctagtctttataccaaagggccaagcacccagatacaaagcagggtttccattactgataaaaacaaaatcagatcctggactaggcaactcacaggctctgctgcacacagccatcacggtcatgagctgagtccccagctcaaggctgtgatgacgggaccctccaggcagccacagctctcatccccagccttagttgggtgtccatctgtgcctacagtctgaatgaagcttttctggtgggtcctatgttggtgacaacatgttgctttgtgatggtgagtgtgttctatctagattgctgtcctgggaagtctaatgaactgaaaccaccctgcatcggctgttaggtaaaggttgcttgtgtggactcaggtttgaagagctgactccccgtgttccttctctccagatgaatatttcagtcaaagctgtgcccctgggtctgacccgagatctaatctctgtgctctgtgtattggcgacgagcagggtgagaataagtgcgtgcccaacagcaacgagagatactacggctacactggggctttccggtgagtctgtgactgagctccatcaggatggggacttacctcatccctcagcatgtcagcattgcagttctaaggagccagatgtgacctgtcacagcagagtgggggtcatcctgtgggtcagctcatgggtggccccagtgagggctgtccccaccacacccaccgccccagagagtggaggctggcaccagggctgtctgacct

SEQ ID NO: 314769 - DNA, 796 bp, Homo sapiens
cttcccatgggtgttggtcatccttctcttctctaagacagattgggactggccaggacccgactgttctcttcgcctcaagctccctggcgagtggcctgttgcacagggttagggccacctgggaggggcaggagaggaaggaagccttgccttcctggaagtggtcatgggctgtggtccaggattctggctcagagttgcaccactgggttttatattcacttggatctttagttgttttggcgcctactgaggtctgaagtttgaatcctgcagtcaattgggatggtggcttgtaccccaaagtgccattgcaacccttgtccttcctgaggaaagggtggcagttgccctgtggaattcctgccctgctccccgtgggtgtccaggctgacagaagttgggactgtgtctggctggccgtaggagaaggagtgttcagtggtgcgccgtatcccaacccgaggccacaaaatgcttccaatggcaaaggaatatgagaaaagtgcgtggccctcctgtcagctgcataaagagagactcccccatccagtgtatccaggccattgcggtgagtcaatgccgggtgttggttgggaccaagctgaatggaagggagagagaaatggaaaaagatagaacacgagctctccttacttcctctgccattggaagcattttgtggcctcgggttgggatacggcgcaccactgaacactccttctcctacggccagccagacacagtcctgggagaggtcgacgcggccgcgaatttagtagtagtaggcggc

SEQ ID NO: 314770 - DNA, 401 bp, Homo sapiens
aaggagaagctgatgccatgagtttggatggaggatatgtgtacactgcaggcaaatgtggtttggtgcctgtcctggcagagaactacagtaagtggagttagcatcctctggtatattccctctgggtcatgggagtggggctatgagtaatcccattcggtgaatgcaggtgaaacattatgatgaacagatacattcaaaagggagaatcagggaaagaagaaatgaaaggggccgtgttacccacaaagcctattgtgttgagaattaacaagggacaggttggttttatcttcttaattttccagaagatctcagtgaattataacatacaaacagaaaagtgcacataaatgtacaactcatggcacttcacacactgtacagtccatgctctc

SEQ ID NO: 314771 - DNA, 2786 bp, Homo sapiens
gaattccggctagaaatgaatatgtaagaaagcttatagtagtttaaatcatttgtagaaccagccgagtttcttgccaagtcgcctccagaccgcagacatgaaacttgtcttcctcgtcctgctgttcctcggggccctcggactgtgtctggctggccgtaggagaaggagtgttcagtggtgcgccgtatcccaacccgaggccacaaaatgcttccaatggcaaaggaatatgagaaaagtgcgtggccctcctgtcagctgcataaagagagactcccccatccagtgtatccaggccattgcggaaaacagggccgatgctgtgacccttgatggtggtttcatatacgaggcaggcctggccccctacaaactgcgacctgtagcggcggaagtctacgggaccgaaagacagccacgaactcactattatgccgtggctgtggtgaagaagggcggcagctttcagctgaacgaactgcaaggtctgaagtcctgccacacaggccttcgcaggaccgctggatggaatgtccctatagggacacttcgtccattcttgaattggacgggtccacctgagcccattgaggcagctgtggccaggttcttctcagccagctgtgttcccggtgcagataaaggacagttccccaacctgtgtcgcctgtgtgcggggacaggggaaaacaaatgtgccttctcctcccaggaaccgtacttcagctactctggtgccttcaagtgtctgagagacggggctggagacgtggcttttatcagagagagcacagtgtttgaggacctgtcagacgaggctgaaagggacgagtatgagttactctgcccagacaacactcggaagccagtggacaagttcaaagactgccatctggcccgggtcccttctcatgccgttgtggcacgaagtgtgaatggcaaggaggatgccatctggaatcttctccgccaggcacaggaaaagtttggaaaggacaagtcaccgaaattccagctctttggctcccctagtgggcagaaagatctgctgttcaaggactctgccattgggttttcgagggtgcccccgaggatagattctgggctgtaccttggctccggctacttcactgccatccagaacttgaggaaaagtgaggaggaagtggctgcccggcgtgcgcgggtcgtgtggtgtgcggtgggcgagcaggagctgcgcaagtgtaaccagtggagtggcttgagcgaaggcagcgtgacctgctcctcggcctccaccacagaggactgcatcgccctggtgctgaaaggagaagctgatgccatgagtttggatggaggatatgtgtacactgcaggcaaatgtggtttggtgcctgtcctggcagagaactacaaatcccaacaaagcagtgaccctgatcctaactgtgtggatagacctgtggaaggatatcttgctgtggcggtggttaggagatcagacactagccttacctggaactctgtgaaaggcaagaagtcctgccacaccgccgtggacaggactgcaggctggaatatccccatgggcctgctcttcaaccagacgggctcctgcaaatttgatgaatatttcagtcaaagctgtgcccctgggtctgacccgagatctaatctctgtgctctgtgtattggcgacgagcagggtgagaataagtgcgtgcccaacagcaacgagagatactacggctacactggggctttccggtgcctggctgagaatgctggagacgttgcatttgtgaaagatgtcactgtcttgcagaacactgatggaaataacaatgaggcatgggctaaggatttgaagctggcagactttgcgctgctgtgcctcgatggcaaacggaagcctgtgactgaggctagaagctgccatcttgccatggccccgaatcatgccgtggtgtctcggatggataaggtggaacgcctgaaacaggtgttgctccaccaacaggctaaatttgggagaaatggatctgactgcccggacaagttttgcttattccagtctgaaaccaaaaaccttctgttcaatgacaacactgagtgtctggccagactccatggcaaaacaacatatgaaaaatatttgggaccacagtatgtcgcaggcattactaatctgaaaaagtgctcaacctcccccctcctggaagcctgtgaattcctcaggaagtaaaaccgaagaagatggcccagctccccaagaaagcctcagccattcactgcccccagctcttctccccaggtgtgttggggccttggcctcccctgctgaaggtggggattgcccatccatctgcttacaattccctgctgtcgtcttagcaagaagtaaaatgagaaattttgttgatattctctccttaaaaagtgtcactcatcttttctagaattttatactgaaatcacatgcctgacaaaatacctgtacagttggaccttcccttccaagtttttcaggtccagcccctcctctttcttgcagtcttgggtatgatgcccaagggtctggaatttaaggccaggccaagcaccggttttcctaaggggatcttgttggttattcacatagctgtctcagtgcacgtgcatgtatgtgcctgggagtgtgtgcgtgtccccaaggcagggcaggaagaacaagcataggaattataactgaaatgtaggttcagttgctcatcacttgcagagtctaattaacaagagctaggtttggtataaag

SEQ ID NO: 314772 - DNA, 847 bp, Homo sapiens
  misc_feature (833)..(833): n is a, c, g, or t
  misc_feature (846)..(847): n is a, c, g, or t
ttctctccccaccacaccccacactcatcctagtcagcatcagccacaccctgcctgctgtgggccccgtggcatggtgtgtagcacatcctcaatgtgactcccttcttgtatgggcgtctcctagggcaggggctccactgcatgggtttttgatcctggccggggcaggcagctttcacgtggctctgctcctcaccagctccatggcagcctctgagctgtagggaaactgccaggatggaatgggaactcccagcttttcctgaggttgacacatagtgtggctcttccagcagcagtgggagtctgataatgggtgacgtttgctcagtggggcagagctttcttgtcacctttgtttattctttcttgggttaaatcacacaatgaacgaattcagatcaggttcagctgcaaggaacagaaaactcctgaaatagtagaggcttaaacaagacagaagttaatttctgtgtcatgtagtccagaggtggtttgcctagggctggtatgaagacaatatggggtctggaacctgggctttaatcatttggctactctgccatttgtgtggctttcatgctcaaggtcacctcatggcccacattgcatctctaagtccagtccctgcttctgcattctatgtgcaggatgaagaaagagaaggagaagaaagggcaaaaggcatgtaccaattgtctttcaaggatgtttctgagaagctggcgcccaacactcctgctgatatttcactggcctatagctacccatatggccatatgagccccagggagtctgataagtctagtctttataccaaaggaggtccncgggttggtggann

SEQ ID NO: 314773 - DNA, 2736 bp, Homo sapiens
gtggtacggcccggaatttagggatgccaagtcgcctccagaccgcagacatgaaacttgtcttcctcgtcctgctgttcctcggggccctcggactgtgtctggctggccgtaggagaaggagtgttcagtggtgcgccgtatcccaacccgaggccacaaaatgcttccaatggcaaaggaatatgagaaaagtgcgtggccctcctgtcagctgcataaagagagactcccccatccagtgtatccaggccattgcggaaaacagggccgatgctgtgacccttgatggtggtttcatatacgaggcaggcctggccccctacaaactgcgacctgtagcggcggaagtctacgggaccgaaagacagccacgaactcactattatgccgtggctgtggtgaagaagggcggcagctttcagctgaacgaactgcaaggtctgaagtcctgccacacaggccttcgcaggaccgctggatggaatgtccctatagggacacttcgtccattcttgaattggacgggtccacctgagcccattgaggcagctgtggccaggttcttctcagccagctgtgttcccggtgcagataaaggacagttccccaacctgtgtcgcctgtgtgcggggacaggggaaaacaaatgtgccttctcctcccaggaaccgtacttcagctactctggtgccttcaagtgtctgagagacggggctggagacgtggcttttatcagagagagcacagtgtttgaggacctgtcagacgaggctgaaagggacgagtatgagttactctgcccagacaacactcggaagccagtggacaagttcaaagactgccatctggcccgggtcccttctcatgccgttgtggcacgaagtgtgaatggcaaggaggatgccatctggaatcttctccgccaggcacaggaaaagtttggaaaggacaagtcaccgaaattccagctctttggctcccctagtgggcagaaagatctgctgttcaaggactctgccattgggttttcgagggtgcccccgaggatagattctgggctgtaccttggctccggctacttcactgccatccagaacttgaggaaaagtgaggaggaagtggctgcccggcgtgcgcgggtcgtgtggtgtgcggtgggcgagcaggagctgcgcaagtgtaaccagtggagtggcttgagcgaaggcagcgtgacctgctcctcggcctccaccacagaggactgcatcgccctggtgctgaaaggagaagctgatgccatgagtttggatggaggatatgtgtacactgcaggcaaatgtggtttggtgcctgtcctggcagagaactacaaatcccaacaaagcagtgaccctgatcctaactgtgtggatagacctgtggaaggatatcttgctgtggcggtggttaggagatcagacactagccttacctggaactctgtgaaaggcaagaagtcctgccacaccgccgtggacaggactgcaggctggaatatccccatgggcctgctcttcaaccagacgggctcctgcaaatttgatgaatatttcagtcaaagctgtgcccctgggtctgacccgagatctaatctctgtgctctgtgtattggcgacgagcagggtgagaataagtgcgtgcccaacagcaacgagagatactacggctacactggggctttccggtgcctggctgagaatgctggagacgttgcatttgtgaaagatgtcactgtcttgcagaacactgatggaaataacaatgaggcatgggctaaggatttgaagctggcagactttgcgctgctgtgcctcgatggcaaacggaagcctgtgactgaggctagaagctgccatcttgccatggccccgaatcatgccgtggtgtctcggatggataaggtggaacgcctgaaacaggtgttgctccaccaacaggctaaatttgggagaaatggatctgactgcccggacaagttttgcttattccagtctgaaaccaaaaaccttctgttcaatgacaacactgagtgtctggccagactccatggcaaaacaacatatgaaaaatatttgggaccacagtatgtcgcaggcattactaatctgaaaaagtgctcaacctcccccctcctggaagcctgtgaattcctcaggaagtaaaaccgaagaagatggcccagctccccaagaaagcctcagccattcactgcccccagctcttctccccaggtgtgttggggccttggcctcccctgctgaaggtggggattgcccatccatctgcttacaattccctgctgtcgtcttagcaagaagtaaaatgagaaattttgttgatattctctccttaaaaagtgtcactcatcttttctagaattttatactgaaatcacatgcctgacaaaatacctgtacagttggaccttcccttccaagtttttcaggtccagcccctcctctttcttgcagtcttgggtatgatgcccaagggtctggaatttaaggccaggccaagcaccggttttcctaaggggatcttgttggttattcacatagctgtctcagtgcacgtgcatgtatgtgcctgggagtgtgtgcgtgtccccaaggcagggcaggaagaacaagcataggaattataactgaaatgtaggttcagttgctcatcacttgcagagtctaattaacaagagctaggtttggtataaag

SEQ ID NO: 314774 - DNA, 2688 bp, Homo sapiens
cgaccacgcgtccgccctcgtcctgctgttcctcggggccctcgggactgtgtctggctggccgtaggagaaggagtgttcagtggtgcgccgtatcccaacccgaggccacaaaatgcttccaatggcaaaggaatatgagaaaagtgcgtggccctcctgtcagctgcataaagagagactcccccatccagtgtatccaggccattgcggaaaacagggccgatgctgtgacccttgatggtggtttcatatacgaggcaggcctggccccctacaaactgcgacctgtagcggcggaagtctacgggaccgaaagacagccacgaactcactattatgccgtggctgtggtgaagaagggcggcagctttcagctgaacgaactgcaaggtctgaagtcctgccacacaggccttcgcaggaccgctggatggaatgtccctatagggacacttcgtccattcttgaattggacgggtccacctgagcccattgaggcagctgtggccaggttcttctcagccagctgtgttcccggtgcagataaaggacagttccccaacctgtgtcgcctgtgtgcggggacaggggaaaacaaatgtgccttctcctcccaggaaccgtacttcagctactctggtgccttcaagtgtctgagagacggggctggagacgtggcttttatcagagagagcacagtgtttgaggacctgtcagacgaggctgaaagggacgagtatgagttactctgcccagacaacactcggaagccagtggacaagttcaaagactgccatctggcccgggtcccttctcatgccgttgtggcacgaagtgtgaatggcaaggaggatgccatctggaatcttctccgccaggcacaggaaaagtttggaaaggacaagtcaccgaaattccagctctttggctcccctagtgggcagaaagatctgctgttcaaggactctgccattgggttttcgagggtgcccccgaggatagattctgggctgtaccttggctccggctacttcactgccatccagaacttgaggaaaagtgaggaggaagtggctgcccggcgtgcgcgggtcgtgtggtgtgcggtgggcgagcaggagctgcgcaagtgtaaccagtggagtggcttgagcgaaggcagcgtgacctgctcctcggcctccaccacagaggactgcatcgccctggtgctgaaaggagaagctgatgccatgagtttggatggaggatatgtgtacactgcaggcaaatgtggtttggtgcctgtcctggcagagaactacaaatcccaacaaagcagtgaccctgatcctaactgtgtggatagacctgtggaaggatatcttgctgtggcggtggttaggagatcagacactagccttacctggaactctgtgaaaggcaagaagtcctgccacaccgccgtggacaggactgcaggctggaatatccccatgggcctgctcttcaaccagacgggctcctgcaaatttgatgaatatttcagtcaaagctgtgcccctgggtctgacccgagatctaatctctgtgctctgtgtattggcgacgagcagggtgagaataagtgcgtgcccaacagcaacgagagatactacggctacactggggctttccggtgcctggctgagaatgctggagacgttgcatttgtgaaagatgtcactgtcttgcagaacactgatggaaataacaatgaggcatgggctaaggatttgaagctggcagactttgcgctgctgtgcctcgatggcaaacggaagcctgtgactgaggctagaagctgccatcttgccatggccccgaatcatgccgtggtgtctcggatggataaggtggaacgcctgaaacaggtgttgctccaccaacaggctaaatttgggagaaatggatctgactgcccggacaagttttgcttattccagtctgaaaccaaaaaccttctgttcaatgacaacactgagtgtctggccagactccatggcaaaacaacatatgaaaaatatttgggaccacagtatgtcgcaggcattactaatctgaaaaagtgctcaacctcccccctcctggaagcctgtgaattcctcaggaagtaaaaccgaagaagatggcccagctccccaagaaagcctcagccattcactgcccccagctcttctccccaggtgtgttggggccttggcctcccctgctgaaggtggggattgcccatccatctgcttacaattccctgctgtcgtcttagcaagaagtaaaatgagaaattttgttgatattctctccttaaaaagtgtcactcatcttttctagaattttatactgaaatcacatgcctgacaaaatacctgtacagttggaccttcccttccaagtttttcaggtccagcccctcctctttcttgcagtcttgggtatgatgcccaagggtctggaatttaaggccaggccaagcaccggttttcctaaggggatcttgttggttattcacatagctgtctcagtgcacgtgcatgtatgtgcctgggagtgtgtgcgtgtccccaaggcagggcaggaagaacaagcataggaattataactgaaatgtaggttcagttgctcatcacttgcagagtctaattaacaagagctaggtttggtataaag

SEQ ID NO: 314775 - DNA, 3852 bp, Homo sapiens
gactcctaggggcttgcagacctagtgggagagaaagaacatcgcagcagccaggcagaaccaggacaggtgaggtgcaggctggctttcctctcgcagcgcggtgtggagtcctgtcctgcctcagggcttttcggagcctggatcctcaaggaacaagtagacctggccgcggggagtggggagggaaggggtgtctattgggcaacagggcggcaaagccctgaataaaggggcgcagggcaggcgcaagtgcagagccttcgtttgccaagtcgcctccagaccgcagacatgaaacttgtcttcctcgtcctgctgttcctcggggccctcggactgtgtctggctggccgtaggagaaggagtgttcagtggtgcgccgtatcccaacccgaggccacaaaatgcttccaatggcaaaggaatatgagaaaagtgcgtggccctcctgtcagctgcataaagagagactcccccatccagtgtatccaggccattgcggaaaacagggccgatgctgtgacccttgatggtggtttcatatacgaggcaggcctggccccctacaaactgcgacctgtagcggcggaagtctacgggaccgaaagacagccacgaactcactattatgccgtggctgtggtgaagaagggcggcagctttcagctgaacgaactgcaaggtctgaagtcctgccacacaggccttcgcaggaccgctggatggaatgtccctatagggacacttcgtccattcttgaattggacgggtccacctgagcccattgaggcagctgtggccaggttcttctcagccagctgtgttcccggtgcagataaaggacagttccccaacctgtgtcgcctgtgtgcggggacaggggaaaacaaatgtgccttctcctcccaggaaccgtacttcagctactctggtgccttcaagtgtctgagagacggggctggagacgtggcttttatcagagagagcacagtgtttgaggacctgtcagacgaggctgaaagggacgagtatgagttactctgcccagacaacactcggaagccagtggacaagttcaaagactgccatctggcccgggtcccttctcatgccgttgtggcacgaagtgtgaatggcaaggaggatgccatctggaatcttctccgccaggcacaggaaaagtttggaaaggacaagtcaccgaaattccagctctttggctcccctagtgggcagaaagatctgctgttcaaggactctgccattgggttttcgagggtgcccccgaggatagattctgggctgtaccttggctccggctacttcactgccatccagaacttgaggaaaagtgaggaggaagtggctgcccggcgtgcgcgggtcgtgtggtgtgcggtgggcgagcaggagctgcgcaagtgtaaccagtggagtggcttgagcgaaggcagcgtgacctgctcctcggcctccaccacagaggactgcatcgccctggtgctgaaaggagaagctgatgccatgagtttggatggaggatatgtgtacactgcaggcaaatgtggtttggtgcctgtcctggcagagaactacaaatcccaacaaagcagtgaccctgatcctaactgtgtggatagacctgtggaaggatatcttgctgtggcggtggttaggagatcagacactagccttacctggaactctgtgaaaggcaagaagtcctgccacaccgccgtggacaggactgcaggctggaatatccccatgggcctgctcttcaaccagacgggctcctgcaaatttgatgaatatttcagtcaaagctgtgcccctgggtctgacccgagatctaatctctgtgctctgtgtattggcgacgagcagggtgagaataagtgcgtgcccaacagcaacgagagatactacggctacactggggctttccggtgcctggctgagaatgctggagacgttgcatttgtgaaagatgtcactgtcttgcagaacactgatggaaataacaatgaggcatgggctaaggatttgaagctggcagactttgcgctgctgtgcctcgatggcaaacggaagcctgtgactgaggctagaagctgccatcttgccatggccccgaatcatgccgtggtgtctcggatggataaggtggaacgcctgaaacaggtgttgctccaccaacaggctaaatttgggagaaatggatctgactgcccggacaagttttgcttattccagtctgaaaccaaaaaccttctgttcaatgacaacactgagtgtctggccagactccatggcaaaacaacatatgaaaaatatttgggaccacagtatgtcgcaggcattactaatctgaaaaagtgctcaacctcccccctcctggaagcctgtgaattcctcaggaagtaaaaccgaagaagatggcccagctccccaagaaagcctcagccattcactgcccccagctcttctccccaggtgtgttggggccttggcctcccctgctgaaggtggggattgcccatccatctgcttacaattccctgctgtcgtcttagcaagaagtaaaatgagaaattttgttgatataaaaaaaaacaaaaaaaaaaaaaaaaaaaaaaaaaaaaaaaaaaagggggggggggggccaaaatttccccgcagagggcgccacaaggtttgacgcgtctaccccacggtttctatcgtgaacaagaggggggccccataatagggaggaccgtaatacatgaggcaaaggagcagcggagccagcagtaataaaaaaacagcgcatcgagagagtggggaacaaatcgcgtgcagcacagcggaactctgaggagaagacggagaccccctactcaccgcggggggggggcgcaagccaatatagtgggcggacaccacccctatccactcaccgaggacagatattaaacaacgcacccccagaggggggtagcaaccaataattaaacaagcttcgaacagagagagcgctatatgacggggcgggcccaaccaccaacgcacgagagcaatatagtcgcggccggccaggctaggagaaaacgttgctgagcgccccccacagcgcgggagatattgatgagatgtaaggagacaacatcaatatattcacacgcccggggaggcctctctaccacattaaataaaccgagagccaggccgagaacgacgatcgacgagaaacacagacaacacatgcaagacagagagcaagcaaagccaaccactgcgacacgacgagacagccaagaaggaggcgagcaaaaaccgacccgaacaagacaccagacagagggagaggggagagaggcgcgaggagaggaggagggcgagagaggaaggacgaacagaacaaagagacagaaggcaggcaagtaaagacagaaaaggaagaaagaggcagacaggaggagtactaagaagaacaaaggaagagaagaaaaatggcaacgacggagccggagagagaagcaaacaaacgagaacaccagcagacgacaagcgagcggagccacagacacacgaagaagacaacaagacggagaagagcaacgagagtaagcgagagcaagggacaagaaagacaagcagaaggagaaggtcaagacagagaaaagacgaacacacaagacagagcggcaggaagacacggagacacaaaagagcagaagacacgcaacagacccgccgaggaggagagcgaacagcaatgagcagccacagaaaaaggaacgaaaaagcgagagaagcacccgagacagagaagagaaagcagtgcgcaaacaacagacgaagagc

SEQ ID NO: 314776 - DNA, 2064 bp, Homo sapiens
  misc_feature (5)..(5): n is a, c, g, or t
tagantcgagctcggtaccagattccctgtgtctgagagacggggctggagacgtggcttttatcagagagagcacagtgtttgaggacctgtcagacgaggctgaaagggacgagtatgagttactctgcccagacaacactcggaagccagtggacaagttcaaagactgccatctggcccgggtcccttctcatgccgttgtggcacgaagtgtgaatggcaaggaggatgccatctggaatcttctccgccaggcacaggaaaagtttggaaaggacaagtcaccgaaattccagctctttggctcccctagtgggcagaaagatctgctgttcaaggactctgccattgggttttcgagggtgcccccgaggatagattctgggctgtaccttggctccggctacttcactgccatccagaacttgaggaaaagtgaggaggaagtggctgcccggcgtgcgcgggtcgtgtggtgtgcggtgggcgagcaggagctgcgcaagtgtaaccagtggagtggcttgagcgaaggcagcgtgacctgctcctcggcctccaccacagaggactgcatcgccctggtgctgaaaggagaagctgatgccatgagtttggatggaggatatgtgtacactgcaggcaaatgtggtttggtgcctgtcctggcagagaactacaaatcccaacaaagcagtgaccctgatcctaactgtgtggatagacctgtggaaggatatcttgctgtggcggtggttaggagatcagacactagccttacctggaactctgtgaaaggcaagaagtcctgccacaccgccgtggacaggactgcaggctggaatatccccatgggcctgctcttcaaccagacgggctcctgcaaatttgatgaatatttcagtcaaagctgtgcccctgggtctgacccgagatctaatctctgtgctctgtgtattggcgacgagcagggtgagaataagtgcgtgcccaacagcaacgagagatactacggctacactggggctttccggtgcctggctgagaatgctggagacgttgcatttgtgaaagatgtcactgtcttgcagaacactgatggaaataacaatgaggcatgggctaaggatttgaagctggcagactttgcgctgctgtgcctcgatggcaaacggaagcctgtgactgaggctagaagctgccatcttgccatggccccgaatcatgccgtggtgtctcggatggataaggtggaacgcctgaaacaggtgttgctccaccaacaggctaaatttgggagaaatggatctgactgcccggacaagttttgcttattccagtctgaaaccaaaaaccttctgttcaatgacaacactgagtgtctggccagactccatggcaaaacaacatatgaaaaatatttgggaccacagtatgtcgcaggcattactaatctgaaaaagtgctcaacctcccccctcctggaagcctgtgaattcctcaggaagtaaaaccgaagaagatggcccagctccccaagaaagcctcagccattcactgcccccagctcttctccccaggtgtgttggggccttggcctcccctgctgaaggtggggattgcccatccatctgcttacaattccctgctgtcgtcttagcaagaagtaaaatgagaaattttgttgatattctctccttaaaaagtgtcactcatcttttctagaattttatactgaaatcacatgcctgacaaaatacctgtacagttggaccttcccttccaagtttttcaggtccagcccctcctctttcttgcagtcttgggtatgatgcccaagggtctggaatttaaggccaggccaagcaccggttttcctaaggggatcttgttggttattcacatagctgtctcagtgcacgtgcatgtatgtgcctgggagtgtgtgcgtgtccccaaggcagggcaggaagaacaagcataggaattataactgaaatgtaggttcagttgctcatcacttgcagagtctaattaacaagagctaggtttggtataaag

SEQ ID NO: 314777 - DNA, 2555 bp, Homo sapiens
gactcctaggggcttgcagacctagtgggagagaaagaacatcgcagcagccaggcagaaccaggacaggtgaggtgcaggctggctttcctctcgcagcgcggtgtggagtcctgtcctgcctcagggcttttcggagcctggatcctcaaggaacaagtagacctggccgcggggagtggggagggaaggggtgtctattgggcaacagggcggcaaagccctgaataaaggggcgcagggcaggcgcaagtgcagagccttcgtttgccaagtcgcctccagaccgcagacatgaaacttgtcttcctcgtcctgctgttcctcggggccctcggactgtgtctggctggccgtaggagaaggagtgttcagtggtgcgccgtatcccaacccgaggccacaaaatgcttccaatggcaaaggaatatgagaaaagtgcgtggccctcctgtcagctgcataaagagagactcccccatccagtgtatccaggccattgcggaaaacagggccgatgctgtgacccttgatggtggtttcatatacgaggcaggcctggccccctacaaactgcgacctgtagcggcggaagtctacgggaccgaaagacagccacgaactcactattatgccgtggctgtggtgaagaagggcggcagctttcagctgaacgaactgcaaggtctgaagtcctgccacacaggccttcgcaggaccgctggatggaatgtccctatagggacacttcgtccattcttgaattggacgggtccacctgagcccattgaggcagctgtggccaggttcttctcagccagctgtgttcccggtgcagataaaggacagttccccaacctgtgtcgcctgtgtgcggggacaggggaaaacaaatgtgccttctcctcccaggaaccgtacttcagctactctggtgccttcaagtgtctgagagacggggctggagacgtggcttttatcagagagagcacagtgtttgaggacctgtcagacgaggctgaaagggacgagtatgagttactctgcccagacaacactcggaagccagtggacaagttcaaagactgccatctggcccgggtcccttctcatgccgttgtggcacgaagtgtgaatggcaaggaggatgccatctggaatcttctccgccaggcacaggaaaagtttggaaaggacaagtcaccgaaattccagctctttggctcccctagtgggcagaaagatctgctgttcaaggactctgccattgggttttcgagggtgcccccgaggatagattctgggctgtaccttggctccggctacttcactgccatccagaacttgaggaaaagtgaggaggaagtggctgcccggcgtgcgcgggtcgtgtggtgtgcggtgggcgagcaggagctgcgcaagtgtaaccagtggagtggcttgagcgaaggcagcgtgacctgctcctcggcctccaccacagaggactgcatcgccctggtgctgaaaggagaagctgatgccatgagtttggatggaggatatgtgtacactgcaggcaaatgtggtttggtgcctgtcctggcagagaactacaaatcccaacaaagcagtgaccctgatcctaactgtgtggatagacctgtggaaggatatcttgctgtggcggtggttaggagatcagacactagccttacctggaactctgtgaaaggcaagaagtcctgccacaccgccgtggacaggactgcaggctggaatatccccatgggcctgctcttcaaccagacgggctcctgcaaatttgatgaatatttcagtcaaagctgtgcccctgggtctgacccgagatctaatctctgtgctctgtgtattggcgacgagcagggtgagaataagtgcgtgcccaacagcaacgagagatactacggctacactggggctttccggtgcctggctgagaatgctggagacgttgcatttgtgaaagatgtcactgtcttgcagaacactgatggaaataacaatgaggcatgggctaaggatttgaagctggcagactttgcgctgctgtgcctcgatggcaaacggaagcctgtgactgaggctagaagctgccatcttgccatggccccgaatcatgccgtggtgtctcggatggataaggtggaacgcctgaaacaggtgttgctccaccaacaggctaaatttgggagaaatggatctgactgcccggacaagttttgcttattccagtctgaaaccaaaaaccttctgttcaatgacaacactgagtgtctggccagactccatggcaaaacaacatatgaaaaatatttgggaccacagtatgtcgcaggcattactaatctgaaaaagtgctcaacctcccccctcctggaagcctgtgaattcctcaggaagtaaaaccgaagaagatggcccagctccccaagaaagcctcagccattcactgcccccagctcttctccccgtatccacagacctcatcccactgaagatggatactgcccagcatcaacccacaacca

SEQ ID NO: 314778 - DNA, 1795 bp, Homo sapiens
tgtgtcctcagtcagtgagactgctccaggaaggtgtccccaaagtgccagggacacagaaaaggttttgctcagaggacagaggattagtgcaacctgtgcctggtctttccagttgaattgacagcccagaaagtaggcagggctgggagagaattagtggtgcacacggtgtttcctctggctgctcagtttgaatagtccatctctttctgctgtttcactggtcacctgacagaaaaccattctctcagagagctatatagacaggcaggacgggatgcagcctcactgtggtgctggagatctgctctgtctttgcagaaaggagaagctgatgccatgagtttggatggaggatatgtgtacactgcaggcaaatgtggtttggtgcctgtcctggcagagaactacaaatcccaacaaagcagtgaccctgatcctaactgtgtggatagacctgtggaaggatatcttgctgtggcggtggttaggagatcagacactagccttacctggaactctgtgaaaggcaagaagtcctgccacaccgccgtggacaggactgcaggctggaatatccccatgggcctgctcttcaaccagacgggctcctgcaaatttgatgaatatttcagtcaaagctgtgcccctgggtctgacccgagatctaatctctgtgctctgtgtattggcgacgagcagggtgagaataagtgcgtgcccaacagcaacgagagatactacggctacactggggctttccggtgcctggctgagaatgctggagacgttgcatttgtgaaagatgtcactgtcttgcagaacactgatggaaataacaatgaggcatgggctaaggatttgaagctggcagactttgcgctgctgtgcctcgatggcaaacggaagcctgtgactgaggctagaagctgccatcttgccatggccccgaatcatgccgtggtgtctcggatggataaggtggaacgcctgaaacaggtgttgctccaccaacaggctaaatttgggagaaatggatctgactgcccggacaagttttgcttattccagtctgaaaccaaaaaccttctgttcaatgacaacactgagtgtctggccagactccatggcaaaacaacatatgaaaaatatttgggaccacagtatgtcgcaggcattactaatctgaaaaagtgctcaacctcccccctcctggaagcctgtgaattcctcaggaagtaaaaccgaagaagatggcccagctccccaagaaagcctcagccattcactgcccccagctcttctccccaggtgtgttggggccttggcctcccctgctgaaggtggggattgcccatccatctgcttacaattccctgctgtcgtcttagcaagaagtaaaatgagaaattttgttgatattctctccttaaaaagtgtcactcatcttttctagaattttatactgaaatcacatgcctgacaaaatacctgtacagttggaccttcccttccaagtttttcaggtccagcccctcctctttcttgcagtcttgggtatgatgcccaagggtctggaatttaaggccaggccaagcaccggttttcctaaggggatcttgttggttattcacatagctgtctcagtgcacgtgcatgtatgtgcctgggagtgtgtgcgtgtccccaaggcagggcaggaagaacaagcataggaattataactgaaatgtaggttcagttgctcatcacttgcagagtctaattaacaagagctaggtttggtataaag

SEQ ID NO: 314779 - DNA, 2391 bp, Homo sapiens
ttctctccccaccacaccccacactcatcctagtcagcatcagccacaccctgcctgctgtgggccccgtggcatggtgtgtagcacatcctcaatgtgactcccttcttgtatgggcgtctcctagggcaggggctccactgcatgggtttttgatcctggccggggcaggcagctttcacgtggctctgctcctcaccagctccatggcagcctctgagctgtagggaaactgccaggatggaatgggaactcccagcttttcctgaggttgacacatagtgtggctcttccagcagcagtgggagtctgataatgggtgacgtttgctcagtggggcagagctttcttgtcacctttgtttattctttcttgggttaaatcacacaatgaacgaattcagatcaggttcagctgcaaggaacagaaaactcctgaaatagtagaggcttaaacaagacagaagttaatttctgtgtcatgtagtccagaggtggtttgcctagggctggtatgaagacaatatggggtctggaacctgggctttaatcatttggctactctgccatttgtgtggctttcatgctcaaggtcacctcatggcccacattgcatctctaagtccagtccctgcttctgcattctatgtgcaggatgaagaaagagaaggagaagaaagggcaaaaggcatgtaccaattgtctttcaaggatgtttctgagaagctggcgcccaacactcctgctgatatttcactggcctatagctacccatatggccatatgagccccagggagtctgataagtctagtctttataccaaagggccaagcacccagatacaaagcagggtttccattactgataaaaacaaaatcagatcctggactaggcaactcacaggctctgctgcacacagccatcacggtcatgagctgagtccccagctcaaggctgtgatgacgggaccctccaggcagccacagctctcatccccagccttagttgggtgtccatctgtgcctacagtctgaatgaagcttttctggtgggtcctatgttggtgacaacatgttgctttgtgatggtgagtgtgttctatctagattgctgtcctgggaagtctaatgaactgaaaccaccctgcatcggctgttaggtaaaggttgcttgtgtggactcaggtttgaagagctgactccccgtgttccttctctccagatgaatatttcagtcaaagctgtgcccctgggtctgacccgagatctaatctctgtgctctgtgtattggcgacgagcagggtgagaataagtgcgtgcccaacagcaacgagagatactacggctacactggggctttccggtgcctggctgagaatgctggagacgttgcatttgtgaaagatgtcactgtcttgcagaacactgatggaaataacaatgaggcatgggctaaggatttgaagctggcagactttgcgctgctgtgcctcgatggcaaacggaagcctgtgactgaggctagaagctgccatcttgccatggccccgaatcatgccgtggtgtctcggatggataaggtggaacgcctgaaacaggtgttgctccaccaacaggctaaatttgggagaaatggatctgactgcccggacaagttttgcttattccagtctgaaaccaaaaaccttctgttcaatgacaacactgagtgtctggccagactccatggcaaaacaacatatgaaaaatatttgggaccacagtatgtcgcaggcattactaatctgaaaaagtgctcaacctcccccctcctggaagcctgtgaattcctcaggaagtaaaaccgaagaagatggcccagctccccaagaaagcctcagccattcactgcccccagctcttctccccaggtgtgttggggccttggcctcccctgctgaaggtggggattgcccatccatctgcttacaattccctgctgtcgtcttagcaagaagtaaaatgagaaattttgttgatattctctccttaaaaagtgtcactcatcttttctagaattttatactgaaatcacatgcctgacaaaatacctgtacagttggaccttcccttccaagtttttcaggtccagcccctcctctttcttgcagtcttgggtatgatgcccaagggtctggaatttaaggccaggccaagcaccggttttcctaaggggatcttgttggttattcacatagctgtctcagtgcacgtgcatgtatgtgcctgggagtgtgtgcgtgtccccaaggcagggcaggaagaacaagcataggaattataactgaaatgtaggttcagttgctcatcacttgcagagtctaattaacaagagctaggtttggtataaag

SEQ ID NO: 314780 - DNA, 2168 bp, Homo sapiens
gactcctaggggcttgcagacctagtgggagagaaagaacatcgcagcagccaggcagaaccaggacaggtgaggtgcaggctggctttcctctcgcagcgcggtgtggagtcctgtcctgcctcagggcttttcggagcctggatcctcaaggaacaagtagacctggccgcggggagtggggagggaaggggtgtctattgggcaacagggcggcaaagccctgaataaaggggcgcagggcaggcgcaagtgcagagccttcgtttgccaagtcgcctccagaccgcagacatgaaacttgtcttcctcgtcctgctgttcctcggggccctcggactgtgtctggctggccgtaggagaaggagtgttcagtggtgcgccgtatcccaacccgaggccacaaaatgcttccaatggcaaaggaatatgagaaaagtgcgtggccctcctgtcagctgcataaagagagactcccccatccagtgtatccaggccattgcggaaaacagggccgatgctgtgacccttgatggtggtttcatatacgaggcaggcctggccccctacaaactgcgacctgtagcggcggaagtctacgggaccgaaagacagccacgaactcactattatgccgtggctgtggtgaagaagggcggcagctttcagctgaacgaactgcaaggtctgaagtcctgccacacaggccttcgcaggaccgctggatggaatgtccctatagggacacttcgtccattcttgaattggacgggtccacctgagcccattgaggcagctgtggccaggttcttctcagccagctgtgttcccggtgcagataaaggacagttccccaacctgtgtcgcctgtgtgcggggacaggggaaaacaaatgtgccttctcctcccaggaaccgtacttcagctactctggtgccttcaagtgtctgagagacggggctggagacgtggcttttatcagagagagcacagtgtttgaggacctgtcagacgaggctgaaagggacgagtatgagttactctgcccagacaacactcggaagccagtggacaagttcaaagactgccatctggcccgggtcccttctcatgccgttgtggcacgaagtgtgaatggcaaggaggatgccatctggaatcttctccgccaggcacaggaaaagtttggaaaggacaagtcaccgaaattccagctctttggctcccctagtgggcagaaagatctgctgttcaaggactctgccattgggttttcgagggtgcccccgaggatagattctgggctgtaccttggctccggctacttcactgccatccagaacttgaggaaaagtgaggaggaagtggctgcccggcgtgcgcgggtcgtgtggtgtgcggtgggcgagcaggagctgcgcaagtgtaaccagtggagtggcttgagcgaaggcagcgtgacctgctcctcggcctccaccacagaggactgcatcgccctggtgctgaaaggagaagctgatgccatgagtttggatggaggatatgtgtacactgcaggcaaatgtggtttggtgcctgtcctggcagagaactacaaatcccaacaaagcagtgaccctgatcctaactgtgtggatagacctgtggaaggatatcttgctgtggcggtggttaggagatcagacactagccttacctggaactctgtgaaaggcaagaagtcctgccacaccgccgtggacaggactgcaggctggaatatccccatgggcctgctcttcaaccagacgggctcctgcaaatttgatgaatatttcagtcaaagctgtgcccctgggtctgacccgagatctaatctctgtgctctgtgtattggcgacgagcagggtgagaataagtgcgtgcccaacagcaacgagagatactacggctacactggggctttccggtgcctggctgagaatgctggagacgttgcatttgtgaaagatgtcactgtcttgcagaacactgatggaaataacaatgaggcatgggctaaggatttgaagctggcagactttgcgctgctgtgcctcgatggcaaacggaagccaaggttgtgcagatgacgaccgtatgatcgacggtccacgtgatacgcggtacgctttcaatgaacggg

SEQ ID NO: 314781 - DNA, 1981 bp, Homo sapiens
gactcctaggggcttgcagacctagtgggagagaaagaacatcgcagcagccaggcagaaccaggacaggtgaggtgcaggctggctttcctctcgcagcgcggtgtggagtcctgtcctgcctcagggcttttcggagcctggatcctcaaggaacaagtagacctggccgcggggagtggggagggaaggggtgtctattgggcaacagggcggcaaagccctgaataaaggggcgcagggcaggcgcaagtgcagagccttcgtttgccaagtcgcctccagaccgcagacatgaaacttgtcttcctcgtcctgctgttcctcggggccctcggactgtgtctggctggccgtaggagaaggagtgttcagtggtgcgccgtatcccaacccgaggccacaaaatgcttccaatggcaaaggaatatgagaaaagtgcgtggccctcctgtcagctgcataaagagagactcccccatccagtgtatccaggccattgcggaaaacagggccgatgctgtgacccttgatggtggtttcatatacgaggcaggcctggccccctacaaactgcgacctgtagcggcggaagtctacgggaccgaaagacagccacgaactcactattatgccgtggctgtggtgaagaagggcggcagctttcagctgaacgaactgcaaggtctgaagtcctgccacacaggccttcgcaggaccgctggatggaatgtccctatagggacacttcgtccattcttgaattggacgggtccacctgagcccattgaggcagctgtggccaggttcttctcagccagctgtgttcccggtgcagataaaggacagttccccaacctgtgtcgcctgtgtgcggggacaggggaaaacaaatgtgccttctcctcccaggaaccgtacttcagctactctggtgccttcaagtgtctgagagacggggctggagacgtggcttttatcagagagagcacagtgtttgaggacctgtcagacgaggctgaaagggacgagtatgagttactctgcccagacaacactcggaagccagtggacaagttcaaagactgccatctggcccgggtcccttctcatgccgttgtggcacgaagtgtgaatggcaaggaggatgccatctggaatcttctccgccaggcacaggaaaagtttggaaaggacaagtcaccgaaattccagctctttggctcccctagtgggcagaaagatctgctgttcaaggactctgccattgggttttcgagggtgcccccgaggatagattctgggctgtaccttggctccggctacttcactgccatccagaacttgaggaaaagtgaggaggaagtggctgcccggcgtgcgcgggtcgtgtggtgtgcggtgggcgagcaggagctgcgcaagtgtaaccagtggagtggcttgagcgaaggcagcgtgacctgctcctcggcctccaccacagaggactgcatcgccctggtgctgaaaggagaagctgatgccatgagtttggatggaggatatgtgtacactgcaggcaaatgtggtttggtgcctgtcctggcagagaactacaaatcccaacaaagcagtgaccctgatcctaactgtgtggatagacctgtggaaggatatcttgctgtggcggtggttaggagatcagacactagccttacctggaactctgtgaaaggcaagaagtcctgccacaccgccgtggacaggactgcaggctggaatatccccatgggcctgctcttcaaccagacgggctcctgcaaatttgatgaatatttcagtcaaagctgtgcccctgggtctgacccgagatctaatctctgtgcaggtgtgttggggccttggcctcccctgctgaaggtggggattgcccatccatctgcttacaattccctgctgtcgtcttagcaagaagtaaaatgagaaattttgttgatat

SEQ ID NO: 314782 - DNA, 1866 bp, Homo sapiens
  misc_feature (1834)..(1834): n is a, c, g, or t
gactcctaggggcttgcagacctagtgggagagaaagaacatcgcagcagccaggcagaaccaggacaggtgaggtgcaggctggctttcctctcgcagcgcggtgtggagtcctgtcctgcctcagggcttttcggagcctggatcctcaaggaacaagtagacctggccgcggggagtggggagggaaggggtgtctattgggcaacagggcggcaaagccctgaataaaggggcgcagggcaggcgcaagtgcagagccttcgtttgccaagtcgcctccagaccgcagacatgaaacttgtcttcctcgtcctgctgttcctcggggccctcggactgtgtctggctggccgtaggagaaggagtgttcagtggtgcgccgtatcccaacccgaggccacaaaatgcttccaatggcaaaggaatatgagaaaagtgcgtggccctcctgtcagctgcataaagagagactcccccatccagtgtatccaggccattgcggaaaacagggccgatgctgtgacccttgatggtggtttcatatacgaggcaggcctggccccctacaaactgcgacctgtagcggcggaagtctacgggaccgaaagacagccacgaactcactattatgccgtggctgtggtgaagaagggcggcagctttcagctgaacgaactgcaaggtctgaagtcctgccacacaggccttcgcaggaccgctggatggaatgtccctatagggacacttcgtccattcttgaattggacgggtccacctgagcccattgaggcagctgtggccaggttcttctcagccagctgtgttcccggtgcagataaaggacagttccccaacctgtgtcgcctgtgtgcggggacaggggaaaacaaatgtgccttctcctcccaggaaccgtacttcagctactctggtgccttcaagtgtctgagagacggggctggagacgtggcttttatcagagagagcacagtgtttgaggacctgtcagacgaggctgaaagggacgagtatgagttactctgcccagacaacactcggaagccagtggacaagttcaaagactgccatctggcccgggtcccttctcatgccgttgtggcacgaagtgtgaatggcaaggaggatgccatctggaatcttctccgccaggcacaggaaaagtttggaaaggacaagtcaccgaaattccagctctttggctcccctagtgggcagaaagatctgctgttcaaggactctgccattgggttttcgagggtgcccccgaggatagattctgggctgtaccttggctccggctacttcactgccatccagaacttgaggaaaagtgaggaggaagtggctgcccggcgtgcgcgggtcgtgtggtgtgcggtgggcgagcaggagctgcgcaagtgtaaccagtggagtggcttgagcgaaggcagcgtgacctgctcctcggcctccaccacagaggactgcatcgccctggtgctgaaaggagaagctgatgccatgagtttggatggaggatatgtgtacactgcaggcaaatgtggtttggtgcctgtcctggcagagaactacaaatcccaacaaagcagtgaccctgatcctaactgtgtggatagacctgtggaaggatatcttgctgtggcggtggttaggagatcagacactagccttacctggaactctgtgaaaggcaagaagtcctgccacaccgccgtggacaggactgcaggctggaatatccccatgggcctgctcttcaaccagacgggctcctgcaaatttgatgaatatttcagtcaaagctgcnacgaaggcatacctcagggtccgcacgatcga

SEQ ID NO: 314783 - DNA, 1911 bp, Homo sapiens
gactcctaggggcttgcagacctagtgggagagaaagaacatcgcagcagccaggcagaaccaggacaggtgaggtgcaggctggctttcctctcgcagcgcggtgtggagtcctgtcctgcctcagggcttttcggagcctggatcctcaaggaacaagtagacctggccgcggggagtggggagggaaggggtgtctattgggcaacagggcggcaaagccctgaataaaggggcgcagggcaggcgcaagtgcagagccttcgtttgccaagtcgcctccagaccgcagacatgaaacttgtcttcctcgtcctgctgttcctcggggccctcggactgtgtctggctggccgtaggagaaggagtgttcagtggtgcgccgtatcccaacccgaggccacaaaatgcttccaatggcaaaggaatatgagaaaagtgcgtggccctcctgtcagctgcataaagagagactcccccatccagtgtatccaggccattgcggaaaacagggccgatgctgtgacccttgatggtggtttcatatacgaggcaggcctggccccctacaaactgcgacctgtagcggcggaagtctacgggaccgaaagacagccacgaactcactattatgccgtggctgtggtgaagaagggcggcagctttcagctgaacgaactgcaaggtctgaagtcctgccacacaggccttcgcaggaccgctggatggaatgtccctatagggacacttcgtccattcttgaattggacgggtccacctgagcccattgaggcagctgtggccaggttcttctcagccagctgtgttcccggtgcagataaaggacagttccccaacctgtgtcgcctgtgtgcggggacaggggaaaacaaatgtgccttctcctcccaggaaccgtacttcagctactctggtgccttcaagtgtctgagagacggggctggagacgtggcttttatcagagagagcacagtgtttgaggacctgtcagacgaggctgaaagggacgagtatgagttactctgcccagacaacactcggaagccagtggacaagttcaaagactgccatctggcccgggtcccttctcatgccgttgtggcacgaagtgtgaatggcaaggaggatgccatctggaatcttctccgccaggcacaggaaaagtttggaaaggacaagtcaccgaaattccagctctttggctcccctagtgggcagaaagatctgctgttcaaggactctgccattgggttttcgagggtgcccccgaggatagattctgggctgtaccttggctccggctacttcactgccatccagaacttgaggaaaagtgaggaggaagtggctgcccggcgtgcgcgggtcgtgtggtgtgcggtgggcgagcaggagctgcgcaagtgtaaccagtggagtggcttgagcgaaggcagcgtgacctgctcctcggcctccaccacagaggactgcatcgccctggtgctgaaaggagaagctgatgccatgagtttggatggaggatatgtgtacactgcaggcaaatgtggtttggtgcctgtcctggcagagaactacaaatcccaacaaagcagtgaccctgatcctaactgtgtggatagacctgtggaaggatatcttgctgtggcggtggttaggagatcagacactagccttacctggaactctgtgaaaggcaagaagtcctgccacaccgccgtggacaggactgcaggctggaatatccccatgctgactaaagtcagcgccctgctgcggcggctggcccgcattggggtgctggatgagggcaagatgaagctggattacatcctgggcctgaagatagaaggattttttaaaagagacgcctgcagacccaggtcttca

SEQ ID NO: 314784 - DNA, 1384 bp, Homo sapiens
  misc_feature (1359)..(1359): n is a, c, g, or t
  misc_feature (1363)..(1363): n is a, c, g, or t
gactcctaggggcttgcagacctagtgggagagaaagaacatcgcagcagccaggcagaaccaggacaggtgaggtgcaggctggctttcctctcgcagcgcggtgtggagtcctgtcctgcctcagggcttttcggagcctggatcctcaaggaacaagtagacctggccgcggggagtggggagggaaggggtgtctattgggcaacagggcggcaaagccctgaataaaggggcgcagggcaggcgcaagtgcagagccttcgtttgccaagtcgcctccagaccgcagacatgaaacttgtcttcctcgtcctgctgttcctcggggccctcggactgtgtctggctggccgtaggagaaggagtgttcagtggtgcgccgtatcccaacccgaggccacaaaatgcttccaatggcaaaggaatatgagaaaagtgcgtggccctcctgtcagctgcataaagagagactcccccatccagtgtatccaggccattgcggaaaacagggccgatgctgtgacccttgatggtggtttcatatacgaggcaggcctggccccctacaaactgcgacctgtagcggcggaagtctacgggaccgaaagacagccacgaactcactattatgccgtggctgtggtgaagaagggcggcagctttcagctgaacgaactgcaaggtctgaagtcctgccacacaggccttcgcaggaccgctggatggaatgtccctatagggacacttcgtccattcttgaattggacgggtccacctgagcccattgaggcagctgtggccaggttcttctcagccagctgtgttcccggtgcagataaaggacagttccccaacctgtgtcgcctgtgtgcggggacaggggaaaacaaatgtgccttctcctcccaggaaccgtacttcagctactctggtgccttcaagtgtctgagagacggggctggagacgtggcttttatcagagagagcacagtgtttgaggacctgtcagacgaggctgaaagggacgagtatgagttactctgcccagacaacactcggaagccagtggacaagttcaaagactgccatctggcccgggtcccttctcatgccgttgtggcacgaagtgtgaatggcaaggaggatgccatctggaatcttctccgccaggcacaggaaaagtttggaaaggacaagtcaccgaaattccagctctttggctcccctagtgggcagaaagatctgctgttcaaggactctgccattgggttttcgagggtgcccccgaggatagattctgggctgtaccttggctccggctacttcactgccatccagaacttgaggaaaagtganaggnaaggcttatagagaggaaagg

SEQ ID NO: 314785 - DNA, 1838 bp, Homo sapiens
gactcctaggggcttgcagacctagtgggagagaaagaacatcgcagcagccaggcagaaccaggacaggtgaggtgcaggctggctttcctctcgcagcgcggtgtggagtcctgtcctgcctcagggcttttcggagcctggatcctcaaggaacaagtagacctggccgcggggagtggggagggaaggggtgtctattgggcaacagggcggcaaagccctgaataaaggggcgcagggcaggcgcaagtgcagagccttcgtttgccaagtcgcctccagaccgcagacatgaaacttgtcttcctcgtcctgctgttcctcggggccctcggactgtgtctggctggccgtaggagaaggagtgttcagtggtgcgccgtatcccaacccgaggccacaaaatgcttccaatggcaaaggaatatgagaaaagtgcgtggccctcctgtcagctgcataaagagagactcccccatccagtgtatccaggccattgcggaaaacagggccgatgctgtgacccttgatggtggtttcatatacgaggcaggcctggccccctacaaactgcgacctgtagcggcggaagtctacgggaccgaaagacagccacgaactcactattatgccgtggctgtggtgaagaagggcggcagctttcagctgaacgaactgcaaggtctgaagtcctgccacacaggccttcgcaggaccgctggatggaatgtccctatagggacacttcgtccattcttgaattggacgggtccacctgagcccattgaggcagctgtggccaggttcttctcagccagctgtgttcccggtgcagataaaggacagttccccaacctgtgtcgcctgtgtgcggggacaggggaaaacaaatgtgccttctcctcccaggaaccgtacttcagctactctggtgccttcaagtgtctgagagacggggctggagacgtggcttttatcagagagagcacagtgtttggtaagagcagggtaatgagccgtgggtactgaccccttttatcttacttgatcatgactctgacctttgagctaattagattcctaagttcatggcagaccattttcaagattcctacagggcacagctctgattttatgatctttcatattttaaatgatcagttttcttcaaacctcctgtgcctactgcctttctcttcccctcatagacacccatgcctaggtgcttggcaatgcgtcctccagtcctccaagacacatgtgctcatgcagaacagattgtgctggtttgtgtttccggtttctgggttcatagaggttttagtgagcattagaaatcctgctacttgggttttctgctcagcattttgttttagaggtttatcggtattgttgtatacatgtctagctcaggggtcctaacagttgaggagtgttccgtggaatacatccaccttttacttctctgtcaccatagtgatggacagaggttgtgctctcttttcctctaccacatgcagccacacgactgataccttcacctgtgttccttacttacctgctggacagcgtccctcctggacttataataaagcagttgatgagtatgtagaggctaaacacactgcacccaggactagtggacataagctcactacatttcatgcaagaccaatagagacagggctactatattccacccagggccactagagaaagtgacagacacccacattcactcaggaccatcagagacacaccccacatctacccaggaaccggggataatcactagtgaattcgcgccgcctgcagttcgacaatatgggagagct

SEQ ID NO: 314786 - DNA, 1314 bp, Homo sapiens
gactcctaggggcttgcagacctagtgggagagaaagaacatcgcagcagccaggcagaaccaggacaggtgaggtgcaggctggctttcctctcgcagcgcggtgtggagtcctgtcctgcctcagggcttttcggagcctggatcctcaaggaacaagtagacctggccgcggggagtggggagggaaggggtgtctattgggcaacagggcggcaaagccctgaataaaggggcgcagggcaggcgcaagtgcagagccttcgtttgccaagtcgcctccagaccgcagacatgaaacttgtcttcctcgtcctgctgttcctcggggccctcggactgtgtctggctggccgtaggagaaggagtgttcagtggtgcgccgtatcccaacccgaggccacaaaatgcttccaatggcaaaggaatatgagaaaagtgcgtggccctcctgtcagctgcataaagagagactcccccatccagtgtatccaggccattgcggaaaacagggccgatgctgtgacccttgatggtggtttcatatacgaggcaggcctggccccctacaaactgcgacctgtagcggcggaagtctacgggaccgaaagacagccacgaactcactattatgccgtggctgtggtgaagaagggcggcagctttcagctgaacgaactgcaaggtctgaagtcctgccacacaggccttcgcaggaccgctggatggaatgtccctatagggacacttcgtccattcttgaattggacgggtccacctgagcccattgaggcagctgtggccaggttcttctcagccagctgtgttcccggtgcagataaaggacagttccccaacctgtgtcgcctgtgtgcggggacaggggaaaacaaatgtgccttctcctcccaggaaccgtacttcagctactctggtgccttcaagtgtctgagagacggggctggagacgtggcttttatcagagagagcacagtgtttggtaagagcagggtaatgagccgtgggtactgaccccttttatcttacttgatcatgactctgacctttgagctaattagattcctaagttcatggcagaccattttcaagattcctacagggcacagctctgattttatgatctttcatattttaaatgatcagttttcttcaaacctcctgtgcctactgcctttctcttcccctcatagacacccatgcctaggtgcttggcaatgcgtcctccagtcctccaagacacatgtgctcatgcagaacagattgtgctggtacccggcgtctgtttatcctcta

SEQ ID NO: 314787 - DNA, 310 bp, Homo sapiens
  misc_feature (57)..(57): n is a, c, g, or t
  misc_feature (73)..(73): n is a, c, g, or t
  misc_feature (112)..(112): n is a, c, g, or t
taaaaaaaaaaaaaaaaaaaaaccccccccacaatttttaaagggggaggaaggggnaaaaaaaagggttttnaaaaaaaaaaaaaaaggggggaaaaccccccaaaaattntcaagcccaactggtctaagcagcatttaattgaagaatatgtgatacagcctcttcaatcagattgtaagttacctgaaagctgcagttcacaggctcctctctccaccaaattaggatagaataattgctggataaacaaattcagaatatcaacagatgatcacaataaacatctgtttctcattcattacagtc

SEQ ID NO: 314788 - DNA, 1278 bp, Homo sapiens
  misc_feature (2)..(3): n is a, c, g, or t
gnngagccaattagagctccagttgtcactcctacccacactgggcctgggggtgaagggaagtgtttattaggggtacatgtgaagccgtccagaagtgtcagagtctttgtagctttgaaagtcacctaggttatttgggcatgctctcctgagtcctctgctagttaagctctctgaaaagaaggtggcagacccggtttgctgatcgccccagggatcaggaggctgatcccaaagttgtcagatggagagtaaatacaaggagatactcttgctaacaggcctggataacatcactgatgaggaactggataggtttaagttctttctttcagacgagtttaatattgccacaggcaaactacatactgcaaacagaatacaagtagctaccttgatgattcaaaatgctggggcggtgtctgcagtgatgaagaccattcgtatttttcagaagttgaattatatgcttttggcaaaacgtcttcaggaggagaaggagaaagttgataagcaatacaaatcggtaacaaaaccaaagccactaagtcaagctgaaatgagtcctgctgcatctgcagccatcagaaatgatgtcgcaaagcaacgtgctgcaccaaaagtctctcctcatgttaagcctgaacagaaacagatggtggcccagcaggaatctatcagagaagggtttcagaagcgctgtttgccagttatggtactgaaagcaaagaagcccttcacgtttgagacccaagaagaaaagctggtgaaaccccgaagatcaacacgcttcaaactcagccccttggaacaattgtgaatggtttgtttgtagtccagaaggtaacagaaaagaagaaaaacatattatttgacctaagtgacaacactgggaaaatggaagtactgggggttagaaacgaggacacaatgaaatgtaaggaaggagataaggttcgacttacattcttcacactgtcaaaaaatggagaaaaactacagctgacatctggagttcatagcaccataaaggttattaaggccaaaaaaaaaacatagagaagtaaaaaggaccaattcaagccaactggtctaagcagcatttaattgaagaatatgtgatacagcctcttcaatcagattgtaagttacctgaaagctgcagttcacaggctcctctctccaccaaattaggatagaataattgctggataaacaaattcagaatatcaacagatgatcacaataaacatctgtttctcattcattacagtc

SEQ ID NO: 314789 - DNA, 1495 bp, Homo sapiens
  misc_feature (2)..(3): n is a, c, g, or t
gnngagccaattagagctccagttgtcactcctacccacactgggcctgggggtgaagggaagtgtttattaggggtacatgtgaagccgtccagaagtgtcagagtctttgtagctttgaaagtcacctaggttatttgggcatgctctcctgagtcctctgctagttaagctctctgaaaagaaggtggcagacccggtttgctgatcgccccagggatcaggaggctgatcccaaagttgtcagatggagagtaaatacaaggagatactcttgctaacaggcctggataacatcactgatgaggaactggataggtttaagttctttctttcagacgagtttaatattgccacaggcaaactacatactgcaaacagaatacaagtagctaccttgatgattcaaaatgctggggcggtgtctgcagtgatgaagaccattcgtatttttcagaagttgaattatatgcttttggcaaaacgtcttcaggaggagaaggagaaagttgataagcaatacaaatcggtaacaaaaccaaagccactaagtcaagctgaaatgagtcctgctgcatctgcagccatcagaaatgatgtcgcaaagcaacgtgctgcaccaaaagtctctcctcatgttaagcctgaacagaaacagatggtggcccagcaggaatctatcagagaagggtttcagaagcgctgtttgccagttatggtactgaaagcaaagaagcccttcacgtttgagacccaagaaggcaagcaggagatgtttcatgctacagtggctacagaaaaggaattcttctttgtaaaagtttttaatacactgctgaaagataaattcattccaaagagaataattataatagcaagatattatcggcacagtggtttcttagaggtaaatagcgcctcacgtgtgttagatgctgaatctgaccaaaaggttaatgtcccgctgaacattatcagaaaagctggtgaaaccccgaagatcaacacgcttcaaactcagccccttggaacaattgtgaatggtttgtttgtagtccagaaggtaacagaaaagaagaaaaacatattatttgacctaagtgacaacactgggaaaatggaagtactgggggttagaaacgaggacacaatgaaatgtaaggaaggagataaggttcgacttacattcttcacactgtcaaaaaatggagaaaaactacagctgacatctggagttcatagcaccataaaggttattaaggccaaaaaaaaaacatagagaagtaaaaaggaccaattcaagccaactggtctaagcagcatttaattgaagaatatgtgatacagcctcttcaatcagattgtaagttacctgaaagctgcagttcacaggctcctctctccaccaaattaggatagaataattgctggataaacaaattcagaatatcaacagatgatcacaataaacatctgtttctcattcattacagtc

SEQ ID NO: 314790 - DNA, 1931 bp, Homo sapiens
  misc_feature (841)..(841): n is a, c, g, or t
tctctggaacagttgagagacaaatgcataagcattttagaaagaccaaatgtgaagccatactccaaatattcaacatcactgcagttatttttgagtttatcaagatgtgattacaggagagtcttactgtagtcctgcttttatgtttccaaggtgtttgtgcatggactttcctcttttccaatagccaaacttgtttggatgtgatccaagatgtaccaaaaggtattgaaaattaaatgtaagagtagtcttctagcaatattgcaccattcccaggcagtttccaacgtgcatcagcatgtctgtctccagtggaacaagataacttccagcccctgaacccctggggaaactccttccctctttactgtatgttgttgccactgtaggagaaatctctcctctgcctgactctgcagctgctttacccagaacctcaggaggaactctgagtccagagccaggctgagttcagccaggcaagtctggccttggggctgtatatatctgtctcagacatcgtctgtgttttcatatattttttgactttttaaaagatgacccagaccacaatagtatgttctatttttgttttgttgtgttgtgtttttccattacattgcttagtacagtatttctaggatagaaaatttgctttcttggtctgccttggaacatacctaccaattacaacattgattttccataaaaattgagtttaaagttccaacttgcaaatgaacttttggatagccatccatttgttagtgggaaagtgtgtctgatttaggtattttcttagtaaataaccactaaaatgaatgtttaaatatcntattttgcttaagtcagggatctcactgtactgtaataaccgtttgggtacaccactgattgataacttaatgcagatagtggaggattaacataaactgtgtgcttgttacatcctcaatgaaaacaaaactaatggtttaaaatgtcctagtgtcaccacaagatggtgcatgtgacgaggaaaaaaaacatgtcttaatatggtttcaaaccaaaatccatatatttgtttaatctgtagttgtactctaactgtatatatatttttttctcatatttaactcccttctacaaagaatagcaacatcagattttaatacaggataccaaatagctattgctgttgctattccctggttgtatacctgccctcattgactattagtgggtcttagattttgacttcatccaggcttatttcgtaagttcaggaccatcctatttcatacctcctgttcctatttttctaattgaaacttcattgacattggagccaggtgtttttttcctaacacttattcctagtgttgctgatagccagtcaggccagatgagatctgatagtgacctccacggagtgcactaaagaagggtcagaagtctcctttactctttcaaccccagaggccttaatttattaatagcatctctttgaaaaagacaatctctgcatattcaagaaatgttaccagtggacactgctgaggattggaaggggccaaaagcatggtggcttttgtttttaccttgttctcttttgcattacttaaaatttttatcatgaccaagtagtaattttctaaaaataaatatttgataaaaacagtaaaattaagcaaagtattatgtcatcctcaaataaattagtatctacaacatgatcaaagaaattgtgactatacaggatatttgcataaaagaccaaaaagaaaatactaaaacttttctttctcttttttgacacagaatctcactctgttgcccaggctagattgcagtggcatgatctctgctcactgcagccttgagcttccaggctcaaacaatcctcctacctcagcctccctgggacttcggtcacatgccac

SEQ ID NO: 314791 - DNA, 461 bp, Homo sapiens
atttgcataaaagaccaaaaagaaaatactaaaacttttctttctcttttttgacacagaatctcactctgttgcccaggctagattgcagtggcatgatctctgctcactgcagccttgagcttccaggctcaaacaatcctcctacctcagcctccctgggacttcggtcacatgccaccacgcctggctgatttttgtatttttggtagagacggggttttgccatgttgcccatgttgctcttgaactcctgagctcaagtgatctgcccaccttggcctcccaaagtgctgggaatgcaggcatgcgccaccgcacctggccaaaaataccaacacttaatcgtgatcatttctggttatgtaaatacgggtaaattttctttttctttgtggttttctatttttttgaaagtgctatggtaaacatctgttgcctttgtaataaaaaatttttct

SEQ ID NO: 314792 - DNA, 2202 bp, Homo sapiens
ccagatgatcacttgagcccaggaggtagaggctgcagtgagctataatggtaccattgcaatccagcctgggcaacagagtgagaccctgtctcaaaaaaaataaaaaagtagaaagatggagtggaagcctgcccagggttgtgagcatgcacgggaaaggcacccaggtcaggggggatccccgaggagatgcctgagctgaaggattgtggttggggaaagcgtagtcccagcaaggaagcagtttgtgggtaagtgctgggaggtgagtggagtgagcttgtcagggagctgctggtggagcctggaggggaaggagggaggcagtgagagagatcggggtgggggttggggggatgtcgccagagctcaggggtggggacagccttgtgcgcatcagtcctgaggcctggggcacctttcgtctgatgagcctctgcatggagagaggctgagggctaaacacagctggatgtcacctgagttcatttataggaagagagaaatgtcgaggtgaaacgtaaaagcatctggcaggaaggtgagtctgaagccctgcacccgcgttccgactatcagtggggagctgttagcacgtaggattcttcagagcagctgggctggagctcccctgagctcaggaagccccagggtgcaagggcaaggaaatgaggggtggtgggtcagtgaagatctgggcagaccttgtgtggggaaggggtgctgctgtgacttcagggtctgaggtccaaagacagcatttgaaaagaggctctgaagccagtgtttgaagaatttgttcctgaagtacctcctgggggtaggctagaggcttctggcttcagggtcctgaagaacacattgaggtgccgtctgacactggaatagggtgcccttcattcctatgcctgagtccttaactatatttccaacctccagtgaggaggagaagattcggaaatgtgacaggagagcaaacaggacagtttgcatgtgtgtgtgcgcacacatacatgtgcgtgaaagattatcaataaaagtgcataaatttgttgatctggtaagagtttctagcaggaaggtcgagccacttactgtaggtcaagaagttgctagttgcggagttttttcttgcagttagactttacctagtggtagcagggccaccaaagctctgtgtcccagatggtgtatggcccataatccacccaacagcagcaaaggaccaggcaaaggagaacaggagcagaagcctcccagccactagccttttgggctcagtctctccaataatcctggagaggggcttcgttgggtctggacacctaccatgcattctgtgacctttccctagcttccaataaataactgtttgacgcccagagtacaggataccacaatgcactcttcctgcgtagagcacatgttcccatctgctcccattcctcaggaaccttgaattctagctctgctggcctttgagcccatgccagtaaatgtcctgatgggcattgcctactatctccagggcagctgcctttgtcctcctaacagctttattggagtacagttcacttaccatacaatccacaattgaccctgcacaatttgatgccggtttagtatagtcacagttcagcagccatcagcacagtcagtcttagagtttactacccccaaaagaaatccagccccccttagtcaccaccccaacctccccatccctaggcacccctaggctactttgatctctgtagacttgcctcttctggacatgacatagagaaaggagtcataaattctccaaggtgtctgtttcttctttaatgtcattccctgtttctcctcacattccctccccatttcctgggcccagtctcacactggtccttgcttaccctaaatgctattaattccatcactctgagtatggtgtttgctgtccgctgaatgccaagagcttcaagagtgtgtgtaaataaagccacacctttatttttgtattattctgaaccatggctaataaattgtttcaccaagaaatgtctctctaagaacagatgccctccacgctgtgcccctcccacctcttcagctcgtctcctgagtgtgcagaggtggttccggttgggaaagaagcagcggagcatctaaccatgcctgtgtccaggccgattatgcacgcagaacgcgcctaac

SEQ ID NO: 314793 - DNA, 2041 bp, Homo sapiens
ccagatgatcacttgagcccaggaggtagaggctgcagtgagctataatggtaccattgcaatccagcctgggcaacagagtgagaccctgtctcaaaaaaaataaaaaagtagaaagatggagtggaagcctgcccagggttgtgagcatgcacgggaaaggcacccaggtcaggggggatccccgaggagatgcctgagctgaaggattgtggttggggaaagcgtagtcccagcaaggaagcagtttgtgggtaagtgctgggaggtgagtggagtgagcttgtcagggagctgctggtggagcctggaggggaaggagggaggcagtgagagagatcggggtgggggttggggggatgtcgccagagctcaggggtggggacagccttgtgcgcatcagtcctgaggcctggggcacctttcgtctgatgagcctctgcatggagagaggctgagggctaaacacagctggatgtcacctgagttcatttataggaagagagaaatgtcgaggtgaaacgtaaaagcatctggcaggaaggtgagtctgaagccctgcacccgcgttccgactatcagtggggagctgttagcacgtaggattcttcagagcagctgggctggagctcccctgagctcaggaagccccagggtgcaagggcaaggaaatgaggggtggtgggtcagtgaagatctgggcagaccttgtgtggggaaggggtgctgctgtgacttcagggtctgaggtccaaagacagcatttgaaaagaggctctgaagccagtgtttgaagaatttgttcctgaagtacctcctgggggtaggctagaggcttctggcttcagggtcctgaagaacacattgaggtgccgtctgacactggaatagggtgcccttcattcctatgcctgagtccttaactatatttccaacctccagtgaggaggagaagattcggaaatgtgacaggagagcaaacaggacagtttgcatgtgtgtgtgcgcacacatacatgtgcgtgaaagattatcaataaaagtgcataaatttgttgatctggtaagagtttctagcaggaaggtcgagccacttactgtaggtcaagaagttgctagttgcggagttttttcttgcagttagactttacctagtggtagcagggccaccaaagctctgtgtcccagatggtgtatggcccataatccacccaacagcagcaaaggaccaggcaaaggagaacaggagcagaagcctcccagccactagccttttgggctcagtctctccaataatcctggagaggggcttcgttgggtctggacacctaccatgcattctgtgacctttccctagcttccaataaataactgtttgacgcccagagtacaggataccacaatgcactcttcctgcgtagagcacatgttcccatctgctcccattcctcaggaaccttgaattctagctctgctggcctttgagcccatgccagtaaatgtcctgatgggcattgcctactatctccagggcagctgcctttgtcctcctaacagctttattggagtacagttcacttaccatacaatccacaattgaccctgcacaatttgatgccggtttagtatagtcacagttcagcagccatcagcacagtcagtcttagagtttactacccccaaaagaaatccagccccccttagtcaccaccccaacctccccatccctaggcacccctaggctactttgatctctgtagacttgcctcttctggacatgacatagagaaaggagtcataaattctccaaggtgtctgtttcttctttaatgtcattccctgtttctcctcacattccctccccatttcctgggcccagtctcacactggtccttgcttaccctaaatgctattaattccatcactctgagtatggtgtttgctgtccgctgaatgccaagagcttcaagagtgtgtgtaaataaagccacacctttatttttgtattattctgaaccatggctaataaattgtttcacca

SEQ ID NO: 314794 - DNA, 2056 bp, Homo sapiens
ccagatgatcacttgagcccaggaggtagaggctgcagtgagctataatggtaccattgcaatccagcctgggcaacagagtgagaccctgtctcaaaaaaaataaaaaagtagaaagatggagtggaagcctgcccagggttgtgagcatgcacgggaaaggcacccaggtcaggggggatccccgaggagatgcctgagctgaaggattgtggttggggaaagcgtagtcccagcaaggaagcagtttgtgggtaagtgctgggaggtgagtggagtgagcttgtcagggagctgctggtggagcctggaggggaaggagggaggcagtgagagagatcggggtgggggttggggggatgtcgccagagctcaggggtggggacagccttgtgcgcatcagtcctgaggcctggggcacctttcgtctgatgagcctctgcatggagagaggctgagggctaaacacagctggatgtcacctgagttcatttataggaagccccagggtgcaagggcaaggaaatgaggggtggtgggtcagtgaagatctgggcagaccttgtgtggggaaggggtgctgctgtgacttcagggtctgaggtccaaagacagcatttgaaaagaggctctgaagccagtgtttgaagaatttgttcctgaagtacctcctgggggtaggctagaggcttctggcttcagggtcctgaagaacacattgaggtgccgtctgacactggaatagggtgcccttcattcctatgcctgagtccttaactatatttccaacctccagtgaggaggagaagattcggaaatgtgacaggagagcaaacaggacagtttgcatgtgtgtgtgcgcacacatacatgtgcgtgaaagattatcaataaaagtgcataaatttgttgatctggtaagagtttctagcaggaaggtcgagccacttactgtaggtcaagaagttgctagttgcggagttttttcttgcagttagactttacctagtggtagcagggccaccaaagctctgtgtcccagatggtgtatggcccataatccacccaacagcagcaaaggaccaggcaaaggagaacaggagcagaagcctcccagccactagccttttgggctcagtctctccaataatcctggagaggggcttcgttgggtctggacacctaccatgcattctgtgacctttccctagcttccaataaataactgtttgacgcccagagtacaggataccacaatgcactcttcctgcgtagagcacatgttcccatctgctcccattcctcaggaaccttgaattctagctctgctggcctttgagcccatgccagtaaatgtcctgatgggcattgcctactatctccagggcagctgcctttgtcctcctaacagctttattggagtacagttcacttaccatacaatccacaattgaccctgcacaatttgatgccggtttagtatagtcacagttcagcagccatcagcacagtcagtcttagagtttactacccccaaaagaaatccagccccccttagtcaccaccccaacctccccatccctaggcacccctaggctactttgatctctgtagacttgcctcttctggacatgacatagagaaaggagtcataaattctccaaggtgtctgtttcttctttaatgtcattccctgtttctcctcacattccctccccatttcctgggcccagtctcacactggtccttgcttaccctaaatgctattaattccatcactctgagtatggtgtttgctgtccgctgaatgccaagagcttcaagagtgtgtgtaaataaagccacacctttatttttgtattattctgaaccatggctaataaattgtttcaccaagaaatgtctctctaagaacagatgccctccacgctgtgcccctcccacctcttcagctcgtctcctgagtgtgcagaggtggttccggttgggaaagaagcagcggagcatctaaccatgcctgtgtccaggccgattatgcacgcagaacgcgcctaac

SEQ ID NO: 314795 - DNA, 2100 bp, Homo sapiens
gcgtgctggcccggggtggcaggagccgcagaggcttgggctgcagaaaaaggatcctgtttgctgtgtaatcctgagaatggactgcaagagaggaaaaactgggcgtctgcttgggaatctattgtggaaacccagggtgtttcccgaccagtccctgggcgccaactagagtatggactgaccaggtacctggatggagacctgagctggagaaggagatgcgcttgggaggaaattgcagaggccgtcaacatggaaaagcagccccagaacagcaggagaggcctcgccccccgagaggtgccgccagctgttgggctgctgctgatcatggccctgatgaatactctactctacctctgcctcgaccacttcttcatcgctcctcgacaatccactgtggaccccacacactgtccctatggtcacttcaggataggacagatgaaaaactgctcaccttggctgtcctgcgaggagctgagaacagaagtgagacagctgaagcgtgttggggaaggagctgtaaagagagtctttctgtctgagtggaaggagcacaaagttgcactctcacagctcaccagcctggagatgaaagatgatttcctccatggactgcagatgctgaaatctctccaaggcacacatgttgtcacgctgcttggctattgtgaggatgacaacactatgcttactgaatatcaccctctaggttccttgagtaacctggaagaaacactaaacctttcaaagtaccaaaatgtgaacacgtggcagcacaggctggagctggccatggactatgtcagcatcattaattacctgcaccacagccctgtgggcacacgggtcatgtgcgactccaacgacctgccgaagacactgtcccagtatctgctaacaagcaacttcagcattttggcaaatgacttggacgccttacccctggtgaaccacagctccgggatgctggtgaagtgcggccacagggagctgcatggggatttcgtggctccagagcaactgtggccctatggagaggacgtgcctttccacgatgatctcatgccctcatatgatgagaagattgacatttggaagatcccagacatctccagtttccttctggggcacattgaagggagtgatatggtccgattccatttgtttgatattcacaaagcatgcaagagccagactccctcagaaagacccactgcccaggacgttctggagacctaccagaaggtcttggatacacttagagatgccatgatgtctcaggcaagagagatgctgtgaaaaccagtccagccaatgaaggtgggattgaagggctgaatggaagttacagcattctactctgatggtggagttttttgcctgagtttcgtgttttattgttttttttatggcttagccatgtggttcgttgtccacatccacatgtacgtttgtatgtagtccacattggttgttagattttttttttttttctttgagatgcggtcttgctctgttgctgaggctggagtgcagtgatgtgatcttggctcactgcagcctctgcctcccaggttcaagcaattctcccacctcggcctcccaaagtgctgggattacaggcgtgagccactgcgcccggccacattcagttcttatcaaagaaataacccagacttaatcttgaatgatacgattatgcccaatattaagtaaaaaatataagaaaaggttatcttaaatagatcttaggcaaaataccagctgatgaaggcatctgatgccttcatctgttcagtcatctccaaaaacagtaaaaataaccactttttgttgggcaatatgaaatttttaaaggagtagaataccaaatgatagaaacagactgcctgaattgagaattttgatttcttaaagtgtgtttctttctaaattgctgttccttaatttgattaatttaattcatgtattatgattaaatctgaggcagatgagcttacaagtattgaaataattactaattaatcacaaatgtgaagttatgcatgatgtaaaaaatacaaacattctaattaaaggctttgcaacaca

SEQ ID NO: 314796 - DNA, 517 bp, Homo sapiens
aggcagactctagaggatgctcagcctacagcgccttacctacagcgcccttaacttactgcgcccggccacattcagttcttatcaaagaaataacccagacttaatcttgaatgatacgattatgcccaatattaagtaaaaaatataagaaaaggttatcttaaatagatcttaggcaaaataccagctgatgaaggcatctgatgccttcatctgttcagtcatctccaaaaacagtaaaaataaccactttttgttgggcaatatgaaatttttaaaggagtagaataccaaatgatagaaacagactgcctgaattgagaattttgatttcttaaagtgtgtttctttctaaattgctgttccttaatttgattaatttaattcatgtattatgattaaatctgaggcagatgagcttacaagtattgaaataattactaattaatcacaaatgtgaagttatgcatgatgtaaaaaatacaaacattctaattaaaggctttgcaacaca

SEQ ID NO: 314797 - DNA, 367 bp, Homo sapiens
tgaggcaggagacttgcttgaacccgggaggtggaggttgcagaggattgcgccactgcacttcagcctgggcgacagagcgagactctgtctcaaataaatacataaaaaaatagaactaatactggtgaaaatttacctaaaaccttggttatcaaatacatctccagtacattccgttctttttttttttttcgagactccatctcaaaaaaaaaaaggaatcggacgaagaaccacaggatgttgaagacaactgtctgaagtattcgtgagggacagcgatgtggccctctgtgttaagaataacgtgtcggggtttggcagagagaagaaaatagccactgcccgctttcaaggcaagata

SEQ ID NO: 314798 - DNA, 1520 bp, Homo sapiens
caccctggtcagcctagcactctgacctagcagtcaacatgaaggctctcattgttctggggcttgtcctcctttctgttacggtccagggcaaggtctttgaaaggtgtgagttggccagaactctgaaaagattgggaatggatggctacaggggaatcagcctagcaaactggatgtgtttggccaaatgggagagtggttacaacacacgagctacaaactacaatgctggagacagaagcactgattatgggatatttcagatcaatagccgctactggtgtaatgatggcaaaaccccaggagcagttaatgcctgtcatttatcctgcagtgctttgctgcaagataacatcgctgatgctgtagcttgtgcaaagagggttgtccgtgatccacaaggcattagagcatgggtggcatggagaaatcgttgtcaaaacagagatgtccgtcagtatgttcaaggttgtggagtgtaactccagaattttccttcttcagctcattttgtctctctcacattaagggagtaggaattaagtgaaaggtcacactaccattatttccccttcaaacaaataatatttttacagaagcaggagcaaaatatggcctttcttctaagagatataatgttcactaatgtggttattttatattaagcctacaacatttttcagtttgcaaatagaactaatactggtgaaaatttacctaaaaccttggttatcaaatacatctccagtacattccgttctttttttttttgagacagtctcgctctgtcgcccaggctggagtgcagtggcgcaatctcggctcactgcaacctccacctcccgggttcacgccattctcctgcctcagcctcccgagtagctgggattacgggcgcccgccaccacgcccggctaattttttgtatttttagtagagacagggtttcaccgtgttagccaggatggtctcgatctcctgaccttgtgatccacccacctcggcctcccaaagtgctgggattacaggcgtgagccactgcgcccggccacattcagttcttatcaaagaaataacccagacttaatcttgaatgatacgattatgcccaatattaagtaaaaaatataagaaaaggttatcttaaatagatcttaggcaaaataccagctgatgaaggcatctgatgccttcatctgttcagtcatctccaaaaacagtaaaaataaccactttttgttgggcaatatgaaatttttaaaggagtagaataccaaatgatagaaacagactgcctgaattgagaattttgatttcttaaagtgtgtttctttctaaattgctgttccttaatttgattaatttaattcatgtattatgattaaatctgaggcagatgagcttacaagtattgaaataattactaattaatcacaaatgtgaagttatgcatgatgtaaaaaatacaaacattctaattaaaggctttgcaacacacatgccttgtctgtttttat

SEQ ID NO: 314799 - DNA, 2011 bp, Homo sapiens
  misc_feature (1516)..(1516): n is a, c, g, or t
  misc_feature (1518)..(1518): n is a, c, g, or t
caccctggtcagcctagcactctgacctagcagtcaacatgaaggctctcattgttctggggcttgtcctcctttctgttacggtccagggcaaggtctttgaaaggtgtgagttggccagaactctgaaaagattgggaatggatggctacaggggaatcagcctagcaaactggatgtgtttggccaaatgggagagtggttacaacacacgagctacaaactacaatgctggagacagaagcactgattatgggatatttcagatcaatagccgctactggtgtaatgatggcaaaaccccaggagcagttaatgcctgtcatttatcctgcagtgctttgctgcaagataacatcgctgatgctgtagcttgtgcaaagagggttgtccgtgatccacaaggcattagagcatgggtggcatggagaaatcgttgtcaaaacagagatgtccgtcagtatgttcaaggttgtggagtgtaactccagaattttccttcttcagctcattttgtctctctcacattaagggagtaggaattaagtgaaaggtcacactaccattatttccccttcaaacaaataatatttttacagaagcaggagcaaaatatggcctttcttctaagagatataatgttcactaatgtggttattttatattaagcctacaacatttttcagtttgcaaatagaactaatactggtgaaaatttacctaaaaccttggttatcaaatacatctccagtacattccgttctttttttttttgagacagtctcgctctgtcgcccaggctggagtgcagtggcgcaatctcggctcactgcaacctccacctcccgggttcacgccattctcctgcctcagcctcccgagtagctgggattacgggcgcccgccaccacgcccggctaattttttgtatttttagtagagacagggtttcaccgtgttagccaggatggtctcgatctcctgaccttgtgatccacccacctcggcctcccaaagtgctgggattacaggcgtgagccactgcgcccggccacattcagttcttatcaaagaaataacccagacttaatcttgaatgatacgattatgcccaatattaagtaaaaaatataagaaaaggttatcttaaatagatcttaggcaaaataccagctgatgaaggcatctgatgccttcatctgttcagtcatctccaaaaacagtaaaaataaccactttttgttgggcaatatgaaatttttaaaggagtagaataccaaatgatagaaacagactgcctgaattgagaattttgatttcttaaagtgtgtttctttctaaattgctgttccttaatttgattaatttaattcatgtattatgattaaatctgaggcagatgagcttacaagtattgaaataattactaattaatcacaaatgtgaagttatgcatgatgtaaaaaatacaaacattctaattaaaggctttgcaacacaaaaaaaaaaaaaaaananaaaaaaaaaaaaaaaaaaaaaaaaaaaaaaaaaaaaaaaaaaaaaaaaaaaaaaaaaaaaaaaaaaaaaaaaaaaaaaaaaaaaaaaaaaggggaaaaaaaaaaaaaaaaaaaaaaaaaaaacctttggggcccccttggcccaaggtttttttattttggacaattttttttttcgggcccaattttgggcccttttggccaaatccccctttggggggggttttaaaaaatcctgggcccgggttttaacaccggggggggggaaaaacccgggggttccccaatttaattcctttgggaaaaaacccctttttccgagggggggaataagaggaaggcccccccccccacccccttctcccaaaatgtgccccctcttgtgggaaagggaaatttgaagccttaattttttgtaaaatcccgggtaaatttgttataaacggtctttttttaaccaagagcccgaaatcggaaaaacctctttaaaacac

SEQ ID NO: 314800 - DNA, 1471 bp, Homo sapiens
agtcctcggctgtaatttccggtcacgagggctccggttgttctgttacgtgatccagcgtggaccgtctttgaaaggtgtgagttggccagaactctgaaaagattgggaatggatggctacaggggaatcagcctagcaaactggatgtgtttggccaaatgggagagtggttacaacacacgagctacaaactacaatgctggagacagaagcactgattatgggatatttcagatcaatagccgctactggtgtaatgatggcaaaaccccaggagcagttaatgcctgtcatttatcctgcagtgctttgctgcaagataacatcgctgatgctgtagcttgtgcaaagagggttgtccgtgatccacaaggcattagagcatgggtggcatggagaaatcgttgtcaaaacagagatgtccgtcagtatgttcaaggttgtggagtgtaactccagaattttccttcttcagctcattttgtctctctcacattaagggagtaggaattaagtgaaaggtcacactaccattatttccccttcaaacaaataatatttttacagaagcaggagcaaaatatggcctttcttctaagagatataatgttcactaatgtggttattttatattaagcctacaacatttttcagtttgcaaatagaactaatactggtgaaaatttacctaaaaccttggttatcaaatacatctccagtacattccgttctttttttttttgagacagtctcgctctgtcgcccaggctggagtgcagtggcgcaatctcggctcactgcaacctccacctcccgggttcacgccattctcctgcctcagcctcccgagtagctgggattacgggcgcccgccaccacgcccggctaattttttgtatttttagtagagacagggtttcaccgtgttagccaggatggtctcgatctcctgaccttgtgatccacccacctcggcctcccaaagtgctgggattacaggcgtgagccactgcgcccggccacattcagttcttatcaaagaaataacccagacttaatcttgaatgatacgattatgcccaatattaagtaaaaaatataagaaaaggttatcttaaatagatcttaggcaaaataccagctgatgaaggcatctgatgccttcatctgttcagtcatctccaaaaacagtaaaaataaccactttttgttgggcaatatgaaatttttaaaggagtagaataccaaatgatagaaacagactgcctgaattgagaattttgatttcttaaagtgtgtttctttctaaattgctgttccttaatttgattaatttaattcatgtattatgattaaatctgaggcagatgagcttacaagtattgaaataattactaattaatcacaaatgtgaagttatgcatgatgtaaaaaatacaaacattctaattaaaggctttgcaacaca

SEQ ID NO: 314801 - DNA, 1402 bp, Homo sapiens
ttacatcgagctcgcaccctgccatttactccatggctgggaatggatggctacaggggaatcagcctagcaaactggatgtgtttggccaaatgggagagtggttacaacacacgagctacaaactacaatgctggagacagaagcactgattatgggatatttcagatcaatagccgctactggtgtaatgatggcaaaaccccaggagcagttaatgcctgtcatttatcctgcagtgctttgctgcaagataacatcgctgatgctgtagcttgtgcaaagagggttgtccgtgatccacaaggcattagagcatgggtggcatggagaaatcgttgtcaaaacagagatgtccgtcagtatgttcaaggttgtggagtgtaactccagaattttccttcttcagctcattttgtctctctcacattaagggagtaggaattaagtgaaaggtcacactaccattatttccccttcaaacaaataatatttttacagaagcaggagcaaaatatggcctttcttctaagagatataatgttcactaatgtggttattttatattaagcctacaacatttttcagtttgcaaatagaactaatactggtgaaaatttacctaaaaccttggttatcaaatacatctccagtacattccgttctttttttttttgagacagtctcgctctgtcgcccaggctggagtgcagtggcgcaatctcggctcactgcaacctccacctcccgggttcacgccattctcctgcctcagcctcccgagtagctgggattacgggcgcccgccaccacgcccggctaattttttgtatttttagtagagacagggtttcaccgtgttagccaggatggtctcgatctcctgaccttgtgatccacccacctcggcctcccaaagtgctgggattacaggcgtgagccactgcgcccggccacattcagttcttatcaaagaaataacccagacttaatcttgaatgatacgattatgcccaatattaagtaaaaaatataagaaaaggttatcttaaatagatcttaggcaaaataccagctgatgaaggcatctgatgccttcatctgttcagtcatctccaaaaacagtaaaaataaccactttttgttgggcaatatgaaatttttaaaggagtagaataccaaatgatagaaacagactgcctgaattgagaattttgatttcttaaagtgtgtttctttctaaattgctgttccttaatttgattaatttaattcatgtattatgattaaatctgaggcagatgagcttacaagtattgaaataattactaattaatcacaaatgtgaagttatgcatgatgtaaaaaatacaaacattctaattaaaggctttgcaacaca

SEQ ID NO: 314802 - DNA, 1274 bp, Homo sapiens
caccctggtcagcctagcactctgacctagcagtcaacatgaaggctctcattgttctggggcttgtcctcctttctgttacggtccagggcaaggtctttgaaaggtgtgagttggccagaactctgaaaagattgggaatggatggctacaggggaatcagcctagcaaactggatgtgtttggccaaatgggagagtggttacaacacacgagctacaaactacaatgctggagacagaagcactgattatgggatatttcagatcaatagccgctactggtgtaatgatggcaaaaccccaggagcagttaatgcctgtcatttatcctgcagtgctttgctgcaagataacatcgctgatgctgtagcttgtgcaaagagggttgtccgtgatccacaaggcattagagcatgggtggcatggagaaatcgttgtcaaaacagagatgtccgtcagtatgttcaaggttgtggagtgtaactccagaattttccttcttcagctcattttgtctctctcacattaagggagtaggaattaagtgaaaggtcacactaccattatttccccttcaaacaaataatatttttacagaagcaggagcaaaatatggcctttcttctaagagatataatgttcactaatgtggttattttatattaagcctacaacatttttcagtttgcaaatagaactaatactggtgaaaatttacctaaaaccttggttatcaaatacatctccagtacattccgttctttttttttttgagacagtctcgctctgtcgcccaggctggagtgcagtggcgcaatctcggctcactgcaacctccacctcccgggttcacgccattctcctgcctcagcctcccgagtagctgggattacgggcgcccgccaccacgcccggctaattttttgtatttttagtagagacagggtttcaccgtgttagccaggatggtctcgatctcctgaccttgtgatccacccacctcggcctcccaaagtgctgggattacaggcgtgagccactgcgcccggccacattcagttcttatcaaagaaataacccagacttaatcttgaatgatacgattatgcccaatattaagtaaaaaatataagaaaaggttatcttaaatagatcttaggcaaaataccagctgatgaaggcatctgatgccttcatctgttcagtcatctccaaaaacagtaaaaataaccactttttgttgggcacacattatgaggggtccgagccgat

SEQ ID NO: 314803 - DNA, 1457 bp, Homo sapiens
caccctggtcagcctagcactctgacctagcagtcaacatgaaggctctcattgttctggggcttgtcctcctttctgttacggtccagggcaaggtctttgaaaggtgtgagttggccagaactctgaaaagattgggaatggatggctacaggggaatcagcctagcaaactggatgtgtttggccaaatgggagagtggttacaacacacgagctacaaactacaatgctggagacagaagcactgattatgggatatttcagatcaatagccgctactggtgtaatgatggcctttgctgcaagataacatcgctgatgctgtagcttgtgcaaagagggttgtccgtgatccacaaggcattagagcatgggtggcatggagaaatcgttgtcaaaacagagatgtccgtcagtatgttcaaggttgtggagtgtaactccagaattttccttcttcagctcattttgtctctctcacattaagggagtaggaattaagtgaaaggtcacactaccattatttccccttcaaacaaataatatttttacagaagcaggagcaaaatatggcctttcttctaagagatataatgttcactaatgtggttattttatattaagcctacaacatttttcagtttgcaaatagaactaatactggtgaaaatttacctaaaaccttggttatcaaatacatctccagtacattccgttctttttttttttgagacagtctcgctctgtcgcccaggctggagtgcagtggcgcaatctcggctcactgcaacctccacctcccgggttcacgccattctcctgcctcagcctcccgagtagctgggattacgggcgcccgccaccacgcccggctaattttttgtatttttagtagagacagggtttcaccgtgttagccaggatggtctcgatctcctgaccttgtgatccacccacctcggcctcccaaagtgctgggattacaggcgtgagccactgcgcccggccacattcagttcttatcaaagaaataacccagacttaatcttgaatgatacgattatgcccaatattaagtaaaaaatataagaaaaggttatcttaaatagatcttaggcaaaataccagctgatgaaggcatctgatgccttcatctgttcagtcatctccaaaaacagtaaaaataaccactttttgttgggcaatatgaaatttttaaaggagtagaataccaaatgatagaaacagactgcctgaattgagaattttgatttcttaaagtgtgtttctttctaaattgctgttccttaatttgattaatttaattcatgtattatgattaaatctgaggcagatgagcttacaagtattgaaataattactaattaatcacaaatgtgaagttatgcatgatgtaaaaaatacaaacattctaattaaaggctttgcaacaca

SEQ ID NO: 314804 - DNA, 1421 bp, Homo sapiens
caccctggtcagcctagcactctgacctagcagtcaacatgaaggctctcattgttctggggcttgtcctcctttctgttacggtccagggcaaggtctttgaaaggtgtgagttggccagaactctgaaaagattgggaatggatggctacaggggaatcagcctagcaaactggatgtgtttggccaaatgggagagtggttacaacacacgagctacaaactacaatgctggagacagaagcactgattatgggatatttcagatcaatagccgctactggtgtaatgatggcaaaaccccaggagcagttaatgcctgtcatttatcctgcagtgggtggcatggagaaatcgttgtcaaaacagagatgtccgtcagtatgttcaaggttgtggagtgtaactccagaattttccttcttcagctcattttgtctctctcacattaagggagtaggaattaagtgaaaggtcacactaccattatttccccttcaaacaaataatatttttacagaagcaggagcaaaatatggcctttcttctaagagatataatgttcactaatgtggttattttatattaagcctacaacatttttcagtttgcaaatagaactaatactggtgaaaatttacctaaaaccttggttatcaaatacatctccagtacattccgttctttttttttttgagacagtctcgctctgtcgcccaggctggagtgcagtggcgcaatctcggctcactgcaacctccacctcccgggttcacgccattctcctgcctcagcctcccgagtagctgggattacgggcgcccgccaccacgcccggctaattttttgtatttttagtagagacagggtttcaccgtgttagccaggatggtctcgatctcctgaccttgtgatccacccacctcggcctcccaaagtgctgggattacaggcgtgagccactgcgcccggccacattcagttcttatcaaagaaataacccagacttaatcttgaatgatacgattatgcccaatattaagtaaaaaatataagaaaaggttatcttaaatagatcttaggcaaaataccagctgatgaaggcatctgatgccttcatctgttcagtcatctccaaaaacagtaaaaataaccactttttgttgggcaatatgaaatttttaaaggagtagaataccaaatgatagaaacagactgcctgaattgagaattttgatttcttaaagtgtgtttctttctaaattgctgttccttaatttgattaatttaattcatgtattatgattaaatctgaggcagatgagcttacaagtattgaaataattactaattaatcacaaatgtgaagttatgcatgatgtaaaaaatacaaacattctaattaaaggctttgcaacaca

SEQ ID NO: 314805 - DNA, 1256 bp, Homo sapiens
caccctggtcagcctagcactctgacctagcagtcaacatgaaggctctcattgttctggggcttgtcctcctttctgttacggtccagggcaaggtctttgaaaggtgtgagttggccagaactctgaaaagattgggaatggatggctacaggggaatcagcctagcaaactggtggcatggagaaatcgttgtcaaaacagagatgtccgtcagtatgttcaaggttgtggagtgtaactccagaattttccttcttcagctcattttgtctctctcacattaagggagtaggaattaagtgaaaggtcacactaccattatttccccttcaaacaaataatatttttacagaagcaggagcaaaatatggcctttcttctaagagatataatgttcactaatgtggttattttatattaagcctacaacatttttcagtttgcaaatagaactaatactggtgaaaatttacctaaaaccttggttatcaaatacatctccagtacattccgttctttttttttttgagacagtctcgctctgtcgcccaggctggagtgcagtggcgcaatctcggctcactgcaacctccacctcccgggttcacgccattctcctgcctcagcctcccgagtagctgggattacgggcgcccgccaccacgcccggctaattttttgtatttttagtagagacagggtttcaccgtgttagccaggatggtctcgatctcctgaccttgtgatccacccacctcggcctcccaaagtgctgggattacaggcgtgagccactgcgcccggccacattcagttcttatcaaagaaataacccagacttaatcttgaatgatacgattatgcccaatattaagtaaaaaatataagaaaaggttatcttaaatagatcttaggcaaaataccagctgatgaaggcatctgatgccttcatctgttcagtcatctccaaaaacagtaaaaataaccactttttgttgggcaatatgaaatttttaaaggagtagaataccaaatgatagaaacagactgcctgaattgagaattttgatttcttaaagtgtgtttctttctaaattgctgttccttaatttgattaatttaattcatgtattatgattaaatctgaggcagatgagcttacaagtattgaaataattactaattaatcacaaatgtgaagttatgcatgatgtaaaaaatacaaacattctaattaaaggctttgcaacaca

SEQ ID NO: 314806 - DNA, 1458 bp, Homo sapiens
caccctggtcagcctagcactctgacctagcagtcaacatgaaggctctcattgttctggggcttgtcctcctttctgttacggtccagggcaaggtctttgaaaggtgtgagttggccagaactctgaaaagattgggaatggatggctacaggggaatcagcctagcaaactggatgtgtttggccaaatgggagagtggttacaacacacgagctacaaactacaatgctggagacagaagcactgattatgggatatttcagatcaatagccgctactggtgtaatgatggcaaaaccccaggagcagttaatgcctgtcatttatcctgcagtgctttgctgcaagataacatcgctgatgctgtagcttgtgcaaagagggttgtccgtgatccacaaggcattagagcatgggtggcatggagaaatcgttgtcaaaacagagatgtccgtcagtatgttcaaggttgtggagtgtaactccagaattttccttcttcagctcattttgtctctctcacattaagggagtaggaattaatatttttacagaagcaggagcaaaatatggcctttcttctaagagatataatgttcactaatgtggttattttatattaagcctacaacatttttcagtttgcaaatagaactaatactggtgaaaatttacctaaaaccttggttatcaaatacatctccagtacattccgttctttttttttttgagacagtctcgctctgtcgcccaggctggagtgcagtggcgcaatctcggctcactgcaacctccacctcccgggttcacgccattctcctgcctcagcctcccgagtagctgggattacgggcgcccgccaccacgcccggctaattttttgtatttttagtagagacagggtttcaccgtgttagccaggatggtctcgatctcctgaccttgtgatccacccacctcggcctcccaaagtgctgggattacaggcgtgagccactgcgcccggccacattcagttcttatcaaagaaataacccagacttaatcttgaatgatacgattatgcccaatattaagtaaaaaatataagaaaaggttatcttaaatagatcttaggcaaaataccagctgatgaaggcatctgatgccttcatctgttcagtcatctccaaaaacagtaaaaataaccactttttgttgggcaatatgaaatttttaaaggagtagaataccaaatgatagaaacagactgcctgaattgagaattttgatttcttaaagtgtgtttctttctaaattgctgttccttaatttgattaatttaattcatgtattatgattaaatctgaggcagatgagcttacaagtattgaaataattactaattaatcacaaatgtgaagttatgcatgatgtaaaaaatacaaacattctaattaaaggctttgcaacaca

SEQ ID NO: 314807 - DNA, 1105 bp, Homo sapiens
catttgcttcatctttttctacaggtggcatggagaaatcgttgtcaaaacagagatgtccgtcagtatgttcaaggttgtggagtgtaactccagaattttccttcttcagctcattttgtctctctcacattaagggagtaggaattaagtgaaaggtcacactaccattatttccccttcaaacaaataatatttttacagaagcaggagcaaaatatggcctttcttctaagagatataatgttcactaatgtggttattttatattaagcctacaacatttttcagtttgcaaatagaactaatactggtgaaaatttacctaaaaccttggttatcaaatacatctccagtacattccgttctttttttttttgagacagtctcgctctgtcgcccaggctggagtgcagtggcgcaatctcggctcactgcaacctccacctcccgggttcacgccattctcctgcctcagcctcccgagtagctgggattacgggcgcccgccaccacgcccggctaattttttgtatttttagtagagacagggtttcaccgtgttagccaggatggtctcgatctcctgaccttgtgatccacccacctcggcctcccaaagtgctgggattacaggcgtgagccactgcgcccggccacattcagttcttatcaaagaaataacccagacttaatcttgaatgatacgattatgcccaatattaagtaaaaaatataagaaaaggttatcttaaatagatcttaggcaaaataccagctgatgaaggcatctgatgccttcatctgttcagtcatctccaaaaacagtaaaaataaccactttttgttgggcaatatgaaatttttaaaggagtagaataccaaatgatagaaacagactgcctgaattgagaattttgatttcttaaagtgtgtttctttctaaattgctgttccttaatttgattaatttaattcatgtattatgattaaatctgaggcagatgagcttacaagtattgaaataattactaattaatcacaaatgtgaagttatgcatgatgtaaaaaatacaaacattctaattaaaggctttgcaacaca

SEQ ID NO: 314808 - DNA, 875 bp, Homo sapiens
caccctggtcagcctagcactctgacctagcagtcaacatgaaggctctcattgttctggggcttgtcctcctttctgttacggtccagggcaaggtctttgaaaggtgtgagttggccagaactctgaaaagattgggaatggatggctacaggggaatcagcctagcaaactggatgtgtttggccaaatgggagagtggttacaacacacgagctacaaactacaatgctggagacagaagcactgattatgggatatttcagatcaatagccgctactggtgtaatgatggcaaaaccccaggagcagttaatgcctgtcatttatcctgcagtgctttgctgcaagataacatcgctgatgctgtagcttgtgcaaagagggttgtccgtgatccacaaggcattagagcatgggtggcatggagaaatcgttgtcaaaacagagatgtccgtcagtatgttcaaggttgtggagtgtaactccagaattttccttcttcagctcattttgtctctctcacattaagggagtaggaattaagtgaaaggtcacactaccattatttccccttcaaacaaataatatttttacagaagcaggagcaaaatatggcctttcttctaagagatataatgttcactaatgtggttattttatattaagcctacaacatttttcagtttgcaaatagaactaatactggtgaaaatttacctaaaaccttggttatcaaatacatctccagtacattccgttctttttttttttagacagcctgggtgacagagtgagattctgtctcgggggaaaaaaatgatacagttttggaggcataaaagatttcagagatccattgaattctctttaca

SEQ ID NO: 314809 - DNA, 846 bp, Homo sapiens
  misc_feature (114)..(114): n is a, c, g, or t
atcgggcgggatacaggcgtgagcactgcgccggcgcatcagttcttatcaaagaaataacccagacttaatcttgaatgatacgattatgcccaatattaagtaaaaaatatnagaaaaggttatcttaaatagatcttaggcaaaataccagctgatgaaggcatctgatgccttcatctgttcagtcatctccaaaaacagcaaagaaccacacggagtcccgagtagctgggattacgggcgcccgccaccacgcccggctaattttttgtatttttagtagagacagggtttcaccgtgttagccaggatggtctcgatctcctgaccttgtgatccacccacctcggcctcccaaagtgctgggattacaggcgtgagccactgcgcccggccacattcagttcttatcaaagaaataacccagacttaatcttgaatgatacgattatgcccaatattaagtaaaaaatataagaaaaggttatcttaaatagatcttaggcaaaataccagctgatgaaggcatctgatgccttcatctgttcagtcatctccaaaaacagtaaaaataaccactttttgttgggcaatatgaaatttttaaaggagtagaataccaaatgatagaaacagactgcctgaattgagaattttgatttcttaaagtgtgtttctttctaaattgctgttccttaatttgattaatttaattcatgtattatgattaaatctgaggcagatgagcttacaagtattgaaataattactaattaatcacaaatgtgaagttatgcatgatgtaaaaaatacaaacattctaattaaaggctttgcaacaca

SEQ ID NO: 314810 - DNA, 735 bp, Homo sapiens
tgaggcaggagacttgcttgaacccgggaggtggaggttgcagaggattgcgccactgcacttcagcctgggcgacagagcgagactctgtctcaaataaatacataaaatcccgagtagctgggattacgggcgcccgccaccacgcccggctaattttttgtatttttagtagagacagggtttcaccgtgttagccaggatggtctcgatctcctgaccttgtgatccacccacctcggcctcccaaagtgctgggattacaggcgtgagccactgcgcccggccacattcagttcttatcaaagaaataacccagacttaatcttgaatgatacgattatgcccaatattaagtaaaaaatataagaaaaggttatcttaaatagatcttaggcaaaataccagctgatgaaggcatctgatgccttcatctgttcagtcatctccaaaaacagtaaaaataaccactttttgttgggcaatatgaaatttttaaaggagtagaataccaaatgatagaaacagactgcctgaattgagaattttgatttcttaaagtgtgtttctttctaaattgctgttccttaatttgattaatttaattcatgtattatgattaaatctgaggcagatgagcttacaagtattgaaataattactaattaatcacaaatgtgaagttatgcatgatgtaaaaaatacaaacattctaattaaaggctttgcaacaca

SEQ ID NO: 314811 - DNA, 543 bp, Homo sapiens
cactagtagatggcaaagacataaaaaatagccaattaagttttctctgtaagagtgaagtaaagggattacaggcgtgagccactgcgcccggccacattcagttcttatcaaagaaataacccagacttaatcttgaatgatacgattatgcccaatattaagtaaaaaatataagaaaaggttatcttaaatagatcttaggcaaaataccagctgatgaaggcatctgatgccttcatctgttcagtcatctccaaaaacagtaaaaataaccactttttgttgggcaatatgaaatttttaaaggagtagaataccaaatgatagaaacagactgcctgaattgagaattttgatttcttaaagtgtgtttctttctaaattgctgttccttaatttgattaatttaattcatgtattatgattaaatctgaggcagatgagcttacaagtattgaaataattactaattaatcacaaatgtgaagttatgcatgatgtaaaaaatacaaacattctaattaaaggctttgcaacaca

SEQ ID NO: 314812 - DNA, 624 bp, Homo sapiens
caccctggtcagcctagcactctgacctagcagtcaacatgaaggctctcattgttctggggcttgtcctcctttctgttacggtccagggcaaggtctttgaaaggtgtgagttggccagaactctgaaaagattgggaatggatggctacaggggaatcagcctagcaaactggatgtgtttggccaaatgggagagtggttacaacacacgagctacaaactacaatgctggagacagaagcactgattatgggatatttcagatcaatagccgctactggtgtaatgatggcaaaaccccaggagcagttaatgcctgtcatttatcctgcagtgctttgctgcaagataacatcgctgatgctgtagcttgtgcaaagagggttgtccgtgatccacaaggcattagagcatgggtggcatggagaaatcgttgtcaaaacagagatgtccgtcagtatgttcaaggttgtggagtgtaactccagaatctctcctcatttgctcattcccgacccctcacaataaggaagctggattactctctaagcgaccatcccaacatacctcctcaaacacgttcccctgttacgccgctccttccatttaacggtctcattt

SEQ ID NO: 314813 - DNA, 607 bp, Homo sapiens
caccctggtcagcctagcactctgacctagcagtcaacatgaaggctctcattgttctggggcttgtcctcctttctgttacggtccagggcaaggtctttgaaaggtgtgagttggccagaactctgaaaagattgggaatggatggctacaggggaatcagcctagcaaactggtggcatggagaaatcgttgtcaaaacagagatgtccgtcagtatgttcaaggttgtggagtgtaactccagaattttccttcttcagctcattttgtctctctcacattaagggagtaggaattaagtgaaaggtcacactaccattatttccccttcaaacaaataatatttttacagaagcaggagcaaaatatggcctttcttctaagagatataatgttcactaatgtggttattttatattaagcctacaacatttttcagtttgcaaatagaactaatactggtgaaaatttacctaaaaccttggttatcaaatacatctccagtacattccgttcttttttttttttttttttttttttgggaaaaggtcccgctgggcccccagggggggggggcgggggcgcaatcggggcccggggaacc

SEQ ID NO: 314814 - DNA, 816 bp, Homo sapiens
caccctggtcagcctagcactctgacctagcagtcaacatgaaggctctcattgttctggggcttgtcctcctttctgttacggtccagggcaaggtctttgaaaggtgtgagttggccagaactctgaaaagattgggaatggatggctacaggggaatcagcctagcaaactggatgtgtttggccaaatgggagagtggttacaacacacgagctacaaactacaatgctggagacagaagcactgattatgggatatttcagatcaatagccgctactggtgtaatgatggcaaaaccccaggagcagttaatgcctgtcatttatcctgcagtggtaagacaagctaatatttgaccaatctggttatacttacaagaattgagactcaatacaaatgaaaaagccttgaaaggttcatgagggacctagaaaaactacatctcaacttccagaaagtcattattattttcctcataattccctgagtaagaaattaaagaagtggtatcataaaaggttgatgttttttaatatacagaagtttctggaatgacctattaatttactgtcaatggccttactgatgctttgtccagaacaatgccattgctcctgcttactttggggaggttttgggataatttagttgtatggtcctttttcaattgttttacttttttttttatgaaatgttctaaatgtatagaaaattagagacattagtataataaacagccatatgcccattatgcactttaaaagttgttaacattttgccatagttgcttcttctatgcctttttttttttt

SEQ ID NO: 314815 - DNA, 1500 bp, Homo sapiens
caccctggtcagcctagcactctgacctagcagtcaacatgaaggctctcattgttctggggcttgtcctcctttctgttacggtccagggcaaggtctttgaaaggtgtgagttggccagaactctgaaaagattgggaatggatggctacaggggaatcagcctagcaaactggatgtgtttggccaaatgggagagtggttacaacacacgagctacaaactacaatgctggagacagaagcactgattatgggatatttcagatcaatagccgctactggtgtaatgatggcaaaaccccaggagcagttaatgcctgtcatttatcctgcagtgctttgctgcaagataacatcgctgatgctgtagcttgtgcaaagagggttgtccgtgatccacaaggcattagagcatgggtggcatggagaaatcgttgtcaaaacagagatgtccgtcagtatgttcaaggttgtggagtgtaactccagaattttccttcttcagctcattttgtctctctcacattaagggagtaggaattaagtgaaaggtcacactaccattatttccccttcaaacaaataatatttttacagaagcaggagcaaaatatggcctttcttctaagagatataatgttcactaatgtggttattttatattaagcctacaacatttttcagtttgcaaatagaactaatactggtgaaaatttacctaaaaccttggttatcaaatacatctccagtacattccgttctttttttttttgagacagtctcgctctgtcgcccaggctggagtgcagtggcgcaatctcggctcactgcaacctccacctcccgggttcacgccattctcctgcctcagcctcccgagtagctgggattacgggcgcccgccaccacgcccggctaattttttgtatttttagtagagacagggtttcaccgtgttagccaggatggtctcgatctcctgaccttgtgatccacccacctcggcctcccaaagtgctgggattacaggcgtgagccactgcgcccggccacattcagttcttatcaaagaaataacccagacttaatcttgaatgatacgattatgcccaatattaagtaaaaaatataagaaaaggttatcttaaatagatcttaggcaaaataccagctgatgaaggcatctgatgccttcatctgttcagtcatctccaaaaacagtaaaaataaccactttttgttgggcaatatgaaatttttaaaggagtagaataccaaatgatagaaacagactgcctgaattgagaattttgatttcttaaagtgtgtttctttctaaattgctgttccttaatttgattaatttaattcatgtattatgattaaatctgaggcagatgagcttacaagtattgaaataattactaattaatcacaaatgtgaagttatgcatgatgtaaaaaatacaaacattctaattaaaggctttgcaacaca

SEQ ID NO: 314816 - DNA, 1538 bp, Homo sapiens
caccctggtcagcctagcactctgacctagcagtcaacatgaaggctctcattgttctggggcttgtcctcctttctgttacggtccagggcaaggtctttgaaaggtgtgagttggccagaactctgaaaagattgggaatggatggctacaggggaatcagcctagcaaactggatgtgtttggccaaatgggagagtggttacaacacacgagctacaaactacaatgctggagacagaagcactgattatgggatatttcagatcaatagccgctactggtgtaatgatggcaaaaccccaggagcagttaatgcctgtcatttatcctgcagtgctttgctgcaagataacatcgctgatgctgtagcttgtgcaaagagggttgtccgtgatccacaaggcattagagcatgggtggcatggagaaatcgttgtcaaaacagagatgtccgtcagtatgttcaaggttgtggagtgtaactccagaattttccttcttcagctcattttgtctctctcacattaagggagtaggaattaagtgaaaggtcacactaccattatttccccttcaaacaaataatatttttacagaagcaggagcaaaatatggcctttcttctaagagatataatgttcactaatgtggttattttatattaagcctacaacatttttcagtttgcaaatagaactaatactggtgaaaatttacctaaaaccttggttatcaaatacatctccagtacattccgttctttttttttttgagacagtctcgctctgtcgcccaggctggagtgcagtggcgcaatctcggctcactgcaacctccacctcccgggttcacgccattctcctgcctcagcctcccgagtagctgggattacgggcgcccgccaccacgcccggctaattttttgtatttttagtagagacagggtttcaccgtgttagccaggatggtctcgatctcctgaccttgtgatccacccacctcggcctcccaaagtgctgggattacaggcgtgagccactgcgcccggccacattcagttcttatcaaagaaataacccagacttaatcttgaatgatacgattatgcccaatattaagtaaaaaatataagaaaaggttatcttaaatagatcttaggcaaaataccagctgatgaaggcatctgatgccttcatctgttcagtcatctccaaaaacagtaaaaataaccactttttgttgggcaatatgaaatttttaaaggagtagaataccaaatgatagaaacagactgcctgaattgagaattttgatttcttaaagtgtgtttctttctaaattgctgttccttaatttgattaatttaattcatgtattatgattaaatctgaggcagatgagcttacaagtattgaaataattactaattaatcacaaatgtgaagttatgcatgatgtaaaaaatacaaacattctaattaaaggctttgcaacacaaaaaaaaaagaaactatacataaaaacttgtcggcggt

SEQ ID NO: 314817 - DNA, 1745 bp, Homo sapiens
  misc_feature (1516)..(1516): n is a, c, g, or t
  misc_feature (1518)..(1518): n is a, c, g, or t
caccctggtcagcctagcactctgacctagcagtcaacatgaaggctctcattgttctggggcttgtcctcctttctgttacggtccagggcaaggtctttgaaaggtgtgagttggccagaactctgaaaagattgggaatggatggctacaggggaatcagcctagcaaactggatgtgtttggccaaatgggagagtggttacaacacacgagctacaaactacaatgctggagacagaagcactgattatgggatatttcagatcaatagccgctactggtgtaatgatggcaaaaccccaggagcagttaatgcctgtcatttatcctgcagtgctttgctgcaagataacatcgctgatgctgtagcttgtgcaaagagggttgtccgtgatccacaaggcattagagcatgggtggcatggagaaatcgttgtcaaaacagagatgtccgtcagtatgttcaaggttgtggagtgtaactccagaattttccttcttcagctcattttgtctctctcacattaagggagtaggaattaagtgaaaggtcacactaccattatttccccttcaaacaaataatatttttacagaagcaggagcaaaatatggcctttcttctaagagatataatgttcactaatgtggttattttatattaagcctacaacatttttcagtttgcaaatagaactaatactggtgaaaatttacctaaaaccttggttatcaaatacatctccagtacattccgttctttttttttttgagacagtctcgctctgtcgcccaggctggagtgcagtggcgcaatctcggctcactgcaacctccacctcccgggttcacgccattctcctgcctcagcctcccgagtagctgggattacgggcgcccgccaccacgcccggctaattttttgtatttttagtagagacagggtttcaccgtgttagccaggatggtctcgatctcctgaccttgtgatccacccacctcggcctcccaaagtgctgggattacaggcgtgagccactgcgcccggccacattcagttcttatcaaagaaataacccagacttaatcttgaatgatacgattatgcccaatattaagtaaaaaatataagaaaaggttatcttaaatagatcttaggcaaaataccagctgatgaaggcatctgatgccttcatctgttcagtcatctccaaaaacagtaaaaataaccactttttgttgggcaatatgaaatttttaaaggagtagaataccaaatgatagaaacagactgcctgaattgagaattttgatttcttaaagtgtgtttctttctaaattgctgttccttaatttgattaatttaattcatgtattatgattaaatctgaggcagatgagcttacaagtattgaaataattactaattaatcacaaatgtgaagttatgcatgatgtaaaaaatacaaacattctaattaaaggctttgcaacacaaaaaaaaaaaaaaaananaaaaaaaaatttaaatataaaatttaactaaaaaatttatattattttatctgtataaaaaaaaaaataaatataaatatatttttcttgtgtggccccctctggcccaaattattttatagttgggacaaggttaatgatgggcccccaaattgggcctcattggcccatattgcctattggggtgtgtgaacaatataaacctctggacaaactaccttttgcag

SEQ ID NO: 314818 - DNA, 1434 bp, Homo sapiens
caccctggtcagcctagcactctgacctagcagtcaacatgaaggctctcattgttctggggcttgtcctcctttctgttacggtccagggcaaggtctttgaaaggtgtgagttggccagaactctgaaaagattgggaatggatggctacaggggaatcagcctagcaaactggatgtgtttggccaaatgggagagtggttacaacacacgagctacaaactacaatgctggagacagaagcactgattatgggatatttcagatcaatagccgctactggtgtaatgatggcaaaaccccaggagcagttaatgcctgtcatttatcctgcagtgctttgctgcaagataacatcgctgatgctgtagcttgtgcaaagagggttgtccgtgatccacaaggcattagagcatgggtggcatggagaaatcgttgtcaaaacagagatgtccgtcagtatgttcaaggttgtggagtgtaactccagaattttccttcttcagctcattttgtctctctcacattaagggagtaggaattaagtgaaaggtcacactaccattatttccccttcaaacaaataatatttttacagaagcaggagcaaaatatggcctttcttctaagagatataatgttcactaatgtggttattttatattaagcctacaacatttttcagtttgcaaatagaactaatactggtgaaaatttacctaaaaccttggttatcaaatacatctccagtacattccgttctttttttttttgagacagtctcgctctgtcgcccaggctggagtgcagtggcgcaatctcggctcactgcaacctccacctcccgggttcacgccattctcctgcctcagcctcccgagtagctgggattacgggcgcccgccaccacgcccggctaattttttgtatttttagtagagacagggtttcaccgtgttagccaggatggtctcgatctcctgaccttgtgatccacccacctcggcctcccaaagtgctgggattacaggcgtgagccactgcgcccggccacattcagttcttatcaaagaaataacccagacttaatcttgaatgatacgattatgcccaatattaagtaaaaaatataagaaaaggttatcttaaatagatcttaggcaaaataccagctgatgaaggcatctgatgccttcatctgttcagtcatctccaaaaacagtaaaaataaccactttttgttgggcaatatgaaatttttaaaggagtagaataccaaatgatagaaacagactgcctgaattgagaattttgatttcttaaagtgtgtttctttctaaattgctgttccttaatttgattaatttaattcatgtccccgtacatcgttagaagcttgaattcgagcagtagtagtagtagtaggcggccgc

SEQ ID NO: 314819 - DNA, 1448 bp, Homo sapiens
caccctggtcagcctagcactctgacctagcagtcaacatgaaggctctcattgttctggggcttgtcctcctttctgttacggtccagggcaaggtctttgaaaggtgtgagttggccagaactctgaaaagattgggaatggatggctacaggggaatcagcctagcaaactggatgtgtttggccaaatgggagagtggttacaacacacgagctacaaactacaatgctggagacagaagcactgattatgggatatttcagatcaatagccgctactggtgtaatgatggcaaaaccccaggagcagttaatgcctgtcatttatcctgcagtgctttgctgcaagataacatcgctgatgctgtagcttgtgcaaagagggttgtccgtgatccacaaggcattagagcatgggtggcatggagaaatcgttgtcaaaacagagatgtccgtcagtatgttcaaggttgtggagtgtaactccagaattttccttcttcagctcattttgtctctctcacattaagggagtaggaattaagtgaaaggtcacactaccattatttccccttcaaacaaataatatttttacagaagcaggagcaaaatatggcctttcttctaagagatataatgttcactaatgtggttattttatattaagcctacaacatttttcagtttgcaaatagaactaatactggtgaaaatttacctgagacagtctcgctctgtcgcccaggctggagtgcagtggcgcaatctcggctcactgcaacctccacctcccgggttcacgccattctcctgcctcagcctcccgagtagctgggattacgggcgcccgccaccacgcccggctaattttttgtatttttagtagagacagggtttcaccgtgttagccaggatggtctcgatctcctgaccttgtgatccacccacctcggcctcccaaagtgctgggattacaggcgtgagccactgcgcccggccacattcagttcttatcaaagaaataacccagacttaatcttgaatgatacgattatgcccaatattaagtaaaaaatataagaaaaggttatcttaaatagatcttaggcaaaataccagctgatgaaggcatctgatgccttcatctgttcagtcatctccaaaaacagtaaaaataaccactttttgttgggcaatatgaaatttttaaaggagtagaataccaaatgatagaaacagactgcctgaattgagaattttgatttcttaaagtgtgtttctttctaaattgctgttccttaatttgattaatttaattcatgtattatgattaaatctgaggcagatgagcttacaagtattgaaataattactaattaatcacaaatgtgaagttatgcatgatgtaaaaaatacaaacattctaattaaaggctttgcaacaca

SEQ ID NO: 314820 - DNA, 1447 bp, Homo sapiens
caccctggtcagcctagcactctgacctagcagtcaacatgaaggctctcattgttctggggcttgtcctcctttctgttacggtccagggcaaggtctttgaaaggtgtgagttggccagaactctgaaaagattgggaatggatggctacaggggaatcagcctagcaaactggatgtgtttggccaaatgggagagtggttacaacacacgagctacaaactacaatgctggagacagaagcactgattatgggatatttcagatcaatagccgctactggtgtaatgatggcaaaaccccaggagcagttaatgcctgtcatttatcctgcagtgctttgctgcaagataacatcgctgatgctgtagcttgtgcaaagagggttgtccgtgatccacaaggcattagagcatgggtggcatggagaaatcgttgtctttccttcttcagctcattttgtctctctcacattaagggagtaggaattaagtgaaaggtcacactaccattatttccccttcaaacaaataatatttttacagaagcaggagcaaaatatggcctttcttctaagagatataatgttcactaatgtggttattttatattaagcctacaacatttttcagtttgcaaatagaactaatactggtgaaaatttacctaaaaccttggttatcaaatacatctccagtacattccgttctttttttttttgagacagtctcgctctgtcgcccaggctggagtgcagtggcgcaatctcggctcactgcaacctccacctcccgggttcacgccattctcctgcctcagcctcccgagtagctgggattacgggcgcccgccaccacgcccggctaattttttgtatttttagtagagacagggtttcaccgtgttagccaggatggtctcgatctcctgaccttgtgatccacccacctcggcctcccaaagtgctgggattacaggcgtgagccactgcgcccggccacattcagttcttatcaaagaaataacccagacttaatcttgaatgatacgattatgcccaatattaagtaaaaaatataagaaaaggttatcttaaatagatcttaggcaaaataccagctgatgaaggcatctgatgccttcatctgttcagtcatctccaaaaacagtaaaaataaccactttttgttgggcaatatgaaatttttaaaggagtagaataccaaatgatagaaacagactgcctgaattgagaattttgatttcttaaagtgtgtttctttctaaattgctgttccttaatttgattaatttaattcatgtattatgattaaatctgaggcagatgagcttacaagtattgaaataattactaattaatcacaaatgtgaagttatgcatgatgtaaaaaatacaaacattctaattaaaggctttgcaacaca

SEQ ID NO: 314821 - DNA, 875 bp, Homo sapiens
caccctggtcagcctagcactctgacctagcagtcaacatgaaggctctcattgttctggggcttgtcctcctttctgttacggtccagggcaaggtctttgaaaggtgtgagttggccagaactctgaaaagattgggaatggatggctacaggggaatcagcctagcaaactggatgtgtttggccaaatgggagagtggttacaacacacgagctacaaactacaatgctggagacagaagcactgattatgggatatttcagatcaatagccgctactggtgtaatgatggcaaaaccccaggagcagttaatgcctgtcatttatcctgcagtgctttgctgcaagataacatcgctgatgctgtagcttgtgcaaagagggttgtccgtgatccacaaggcattagagcatgggtggcatggagaaatcgttgtcaaaacagagatgtccgtcagtatgttcaaggttgtggagtgtaactccagaattttccttcttcagctcattttgtctctctcacattaagggagtaggaattaagtgaaaggtcacactaccattatttccccttcaaacaaataatatttttacagaagcaggagcaaaatatggcctttcttctaagagatataatgttcactaatgtggttattttatattaagcctacaacatttttcagtttgcaaatagaactaatactggtgaaaatttacctaaaaccttggttatcaaatacatctccagtacattccgttctttttttttttagaacagcctcactccagctgggaagaccaaacgagactctgtttcacacaaatcctaattattcattcaaggtcttactggcaaaccaaacaaaaaaaaa

SEQ ID NO: 314822 - DNA, 1048 bp, Homo sapiens
tatgaatgttatcagtgtgggaggccttcagccagagtgcacactcgccccaacatgaaagaattcacactgaaaagaagccatatacatgcaaaacatgtggtaaggcctttagtcagcgcacatctcttattctacatgaaagaagtcatactggagagaaaccctatgaatgtaatgaatgtgggaaggcatttagcagtggctcagaccttattcgacatcagagaagtcattcttcagagaaaccctatgaatgtagtaaatgtgggaaggcatatagtcggagttcatccctgattcgacatcagaatacacattctgaagaaaaagcctaaggttgttttaaatctataaaatcaacgaatgaggctatcaaacatatggcaaatatgtatttgtctataatgtaaattttgtgtatatgggaccatttgatgatatgtcccactttgaaagccaaagagcaaaagtcattggtgattttgacctcaggatttgaaattaactgaaggaaactcagaagtttggtcagtcattgtgaatgaagatcatttttcatttgataagggattacaggcgtgagccactgcgcccggccacattcagttcttatcaaagaaataacccagacttaatcttgaatgatacgattatgcccaatattaagtaaaaaatataagaaaaggttatcttaaatagatcttaggcaaaataccagctgatgaaggcatctgatgccttcatctgttcagtcatctccaaaaacagtaaaaataaccactttttgttgggcaatatgaaatttttaaaggagtagaataccaaatgatagaaacagactgcctgaattgagaattttgatttcttaaagtgtgtttctttctaaattgctgttccttaatttgattaatttaattcatgtattatgattaaatctgaggcagatgagcttacaagtattgaaataattactaattaatcacaaatgtgaagttatgcatgatgtaaaaaatacaaacattctaattaaaggctttgcaacaca

SEQ ID NO: 314823 - DNA, 721 bp, Homo sapiens
caccctggtcagcctagcactctgacctagcagtcaacatgaaggctctcattgttctggggcttgtcctcctttctgttacggtccagggcaaggtctttgaaaggtgtgagttggccagaactctgaaaagattgggaatggatggctacaggggaatcagcctagcaaactggatgtgtttggccaaatgggagagtggttacaacacacgagctacaaactacaatgctggagacagaagcactgattatgggatatttcagatcaatagccgctactggtgtaatgatggcaaaaccccaggagcagttaatgcctgtcatttatcctgcagtgctttgctgcaagataacatcgctgatgctgtagcttgtgcaaagagggttgtccgtgatccacaaggcattagagcatgggtggcatggagaaatcgttgtcaaaacagagatgtccgtttttgttgggcaatatgaaatttttaaaggagtagaataccaaatgatagaaacagactgcctgaattgagaattttgatttcttaaagtgtgtttctttctaaattgctgttccttaatttgattaatttaattcatgtattatgattaaatctgaggcagatgagcttacaagtattgaaataattactaattaatcacaaatgtgaagttatgcatgatgtaaaaaatacaaacattctaattaaaggctttgcaacaca

SEQ ID NO: 314824 - DNA, 852 bp, Homo sapiens
  misc_feature (734)..(734): n is a, c, g, or t
  misc_feature (740)..(740): n is a, c, g, or t
  misc_feature (742)..(743): n is a, c, g, or t
tgtcgaagacacttccggtggcgacggaggtaggcttacgaggcctgtgtcgggtagaaagggtccttcctggaccgggaccctctgccacgaccatggaccgtaggaaaaagcctttggacgtcacggcctcctcgttggtagatcttaaggctgaactcttccgaaagcaagaagaattcaaacaagaaaaacttctaaaagattctggagtttttggaaaaccaaaaacaactaacaagaaaccaagtatctggagcaaacagaatgtaggcgtttcaaatcgagctgagaaggatgctgaacagaagattgaagaacagaagactttagacaaagcaagacaatgtatttcaaaggcattgaagcagggaaggttccctattttcctcatgcagatactatcatctattccatctctacagcaatttgcttccaggcagctgtcatggaagttcagactttgagaccatcttactggaagttccttttaagactcaccaagggcaaatttgctgtcatgaaccgaaaagtccttgatgtttttggtactggtgcatctaaacactttcaggatttcatccccaggttggatccaagatacacaactgttaacaccagagttgcccacagagtttcctgaagatgactgtacttattaatgtgactaaatgtttcatcttgaagagttaattatgttgacccaaggaggggccaagctcgaacttcagggngattcngnngaaaaaccctcattggttgggtctcatgaatccgaatcgaagcttggaaagtgcgaaaaaaggccccaccaaaaatcggtccggggggcggcatttttgggcaattgcc

SEQ ID NO: 314825 - DNA, 2968 bp, Homo sapiens
tgtcgaagacacttccggtggcgacggaggtaggcttacgaggcctgtgtcgggtagaaagggtccttcctggaccgggaccctctgccacgaccatggaccgtaggaaaaagcctttggacgtcacggcctcctcgttggtagatcttaaggctgaactcttccgaaagcaagaagaattcaaacaagaaaaacttctaaaagattctggagtttttggaaaaccaaaaacaactaacaagaaaccaagtatctggagcaaacagaatgtaggcgtttcaaatcgagctgagaaggatgctgaacagaagattgaagaacagaagactttagacaaagcaagggaaaaattggaagaaaaagccaaattatatgaaaaaatgactaaaggagactttatagatgaagaagtagaggatatgtaccttgtggatttcacacagaagatcatagacaagcgcaaagaaatggaggcatctggtgcccatagagattctcaaaaggcaggagaaagggacgacgatgaggaaaaccttcctgagggagagatccctcctccccaagaccccagtgaagaatgggtggattacgtggactctttggggcgttcccggcgctgtatgagaaaggatttgccagatctgctggagatggataaaaatcttcaggggagactttttattagtcctgctaatgaaaaaaccctattatctgaagatatgagaaaagaacttcagcgccagcaatgggaggaagaagaaagagaggccctgaagaggcccatggggcccgtacattatgaagacattcgggaaaatgaggcccggcaacttggtgttgggtattttgcctttgcccgagacaaagagttgagaaacaagcagatgaaaaccttagagatgctgcgtgaacagacaacagatcagagaacaaaacgagaaaacataaaggaaaagcgaaaggctatcttagaggcaagacttgccaaacttcgacaaaaaaagatgaaaaaatcaaaagaaggtggaacagaagaagaaaatagagatggagatgttattgggcctttgccaccggagccagaggctgtgccaaccccacgtcctgctgcccagagtagcaaagtagaagtcattgtccaggagaggaaggacaccaagcctggagtgccacacatccgggagtgggaccgcggaaaagaattttcctttggatactggtcgaagaggcagtcagatctccgggctgagagagatcctgagtttgccccgccgtcagattactttgtgggtcagaagagaactggtttttccagcagccaggcatggagcagacctgggccagcacagagtgacccagggcagtgccctgaccagagccacggacctagccctgaacatacgtcacccactcctgcccccgacaacccaccacaagcccccacagttactttcaaaactctggatgacatgatttcctattacaaacaagtgacatgatctttcaaagcacgctgacttgggtttgtactttgacagtgcctttctctcccagagggagaaataactttaggaactgaattgtacctttgtcctgtcctttccctaggaggcacagacttcgggttggatttgtcagcaaggaggaaagttatggaaactttggccacttggctgttcattttattctaagtgggatagggacatacctacctggatttacatgtgagctgcgatagaatagaagtatttattctgtaaaattagacactgagatgtgcttataaccctgtttcatatctactcccacgacttactcatatttaagggttcttttccattccttttgcaaatccgagcatgcaggtgtctttattccaagggttcagcttccagatcagccgatggaccataggtcacgaggaatttctccctgtcaagcagtggaaaactgcatgggaggcaaaatgctctgttctccaagaggacccggaagtaatcacataggaaatgataaggaagaccaggaggagctcttcgtagtccagaaaggtagaagtgggagttgtttacttaattttactgtcataccatgctattacctacactcctgtgtgcagtgggcattcagtaaatgtgtgttgaaggactgggacgtacgtggaggctgctggacctggtcagagactgatgtgccttagcggcaatggttagagcttttcagtgcatcccacctccctgtcgcccccatgctcggcttcctcacattcaggagcctgacttggatcagacttggggctgcacagtggagcaggtgggttcccatgtcattagtaataaggagagggttgggggtgggcagggctccagaaagtcagcagtgtgcctgggcacccaccccatcctctacctgccacacctcagagggttcctacagctgcacacaagcagttgagagttgatgaccaggcccatagggctcccacagctggttcccaggccagtgagtgctgtgagaatacagtagcacaagtccttgttctctgaagagtgggaaggagaggagtgagtgaagtagcctgtcccctgcaggtcctctgcgatggcattgtctcggttcccgcagtgctgcagtgtggaagggagtgccccatcctcattacagatgacacactggagtgtggaggggtcgatgacttgtgcagggtcatatggtacctaaggggcagatctcagacttaaacacaattgatgtctaacccctagacagtctttttagtgccctctgctctcagtcttgttgccctagtatcaagcaatcttagacaaacatcctgaattcttacaaacttacctctaaactctgaggataaagttgccagtccttttaatggtcagcctaatcattctgtcagcctaatcgggtaattgctttttttaataaatacacataaaaaccacaaaaacag

SEQ ID NO: 314826 - DNA, 2753 bp, Homo sapiens
tgtcgaagacacttccggtggcgacggaggtaggcttacgaggcctgtgtcgggtagaaagggtccttcctggaccgggaccctctgccacgaccatggaccgtaggaaaaagcctttggacgtcacggcctcctcgttggtagatcttaaggctgaactcttccgaaagcaagaagaattcaaacaagaaaaacttctaaaagattctggagtttttggaaaaccaaaaacaactaacaagaaaccaagtatctggagcaaacagaatgtaggcgtttcaaatcgagctgagaaggatgctgaacagaagattgaagaacagaagactttagacaaagcaagggaaaaattggaagaaaaagccaaattatatgaaaaaatgactaaaggagactttatagatgaagaagtagaggatatgtaccttgtggatttcacacagaagatcatagacaagcgcaaagaaatggaggcatctggtgcccatagagattctcaaaaggcaggagaaagggacgacgatgaggaaaaccttcctgagggagagatccctcctccccaagaccccagtgaagaatgggtggattacgtggactctttggggcgttcccggcgctgtatgagaaaggatttgccagatctgctggagatggataaaaatcttcaggggagactttttattagtcctgctaatgaaaaaaccctattatctgaagatatgagaaaagaacttcagcgccagcaatgggaggaagaagaaagagaggccctgaagaggcccatggggcccgtacattatgaagacattcgggaaaatgaggcccggcaacttggtgttgggtattttgcctttgcccgagacaaagagttgagaaacaagcagatgaaaaccttagagatgctgcgtgaacagacaacagatcagagaacaaaacgagaaaacataaaggaaaagcgaaaggctatcttagaggcaagacttgccaaacttcgacaaaaaaagatgaaaaaatcaaaagaaggtggaacagaagaagaaaatagagatggagatgttattgggcctttgccaccggagccagaggctgtgccaaccccacgtcctgctgcccagagtagcaaagtagaagtcattgtccaggagaggaaggacaccaagcctggagtgccacacatccgggagtgggaccgcggaaaagaattttcctttggatactggtcgaagaggcagtcagatctccgggctgagagagatcctgagtttgccccgccgtcagattactttgtgggtcagaagagaactggtttttccagcagccaggcatggagcagacctgggccagcacagagtgacccagggcagtgccctgaccagagccacggacctagccctgaacatacgtcacccactcctgcccccgacaacccaccacaagcccccacagttactttcaaaactctggatgacatgatttcctattacaaacaagtgacatgatctttcaaagcacgctgacttgggtttgtactttgacagtgcctttctctcccagagggagaaataactttaggaactgaattgtacctttgtcctgtcctttccctaggaggcacagacttcgggttggatttgtcagcaaggaggaaagttatggaaactttggccacttggctgttcattttattctaagtgggatagggacatacctacctggatttacatgtgagctgcgatagaatagaagtatttattctgtaaaattagacactgagatgtgcttataaccctgtttcatatctactcccacgacttactcatatttaagggttcttttccattccttttgcaaatccgagcatgcaggtgtctttattccaagggttcagcttccagatcagccgatggaccataggtcacgaggaatttctccctgtcaagcagtggaaaactgcatgggaggcaaaatgctctgttctccaagaggacccggaagtaatcacataggaaatgataaggaagaccaggaggagctcttcgtagtccagaaaggtagaagtgggagttgtttacttaattttactgtcataccatgctattacctacactcctgtgtgcagtgggcattcagtaaatgtgtgttgaaggactgggacgtacgtggaggctgctggacctggtcagagactgatgtgccttagcggcaatggttagagcttttcagtgcatcccacctccctgtcgcccccatgctcggcttcctcacattcaggagcctgacttggatcagacttggggctgcacagtggagcagaaattgacaagctaatcttaaaattcacatggaaatgcaaggaacccagaatagtcaaaacaatctagagaaaaaacaaagaggactcacacttcctgatttcaagattgaccacaaagctacgataatctacacagtgtggtagtggcataagaatagacacatagatcagtggaatagaggcgagagtccagaaataaaacatatatccgtggtcaattgatttttgacagtggtgccaggaccatccagtggggaaagagcagtcttttcaacaaatggttctgggacaagtgaatattccatgcaaaagaatgggtttggacttctgcctcacaccacatacaaaaaatcaactcacgatgaatcaaagacctaaatgtaagagctaaaactacaaaacctactgaaacagcttgtaggataaagagggaggagac

SEQ ID NO: 314827 - DNA, 2510 bp, Homo sapiens
  misc_feature (60)..(60): n is a, c, g, or t
  misc_feature (62)..(62): n is a, c, g, or t
  misc_feature (87)..(88): n is a, c, g, or t
aagaagaagatgataatataatttatgttacgcataagttaatgaagggtgtgaaaaagnangagtttgtgtaaacatgttcagtannagatccctcctccccaagaccccagtgaagaatgggtggattacgtggactctttggggcgttcccggcgctgtatgagaaaggatttgccagatctgctggagatggataaaaatcttcaggggagactttttattagtcctgctaatgaaaaaaccctattatctgaagatatgagaaaagaacttcagcgccagcaatgggaggaagaagaaagagaggccctgaagaggcccatggggcccgtacattatgaagacattcgggaaaatgaggcccggcaacttggtgttgggtattttgcctttgcccgagacaaagagttgagaaacaagcagatgaaaaccttagagatgctgcgtgaacagacaacagatcagagaacaaaacgagaaaacataaaggaaaagcgaaaggctatcttagaggcaagacttgccaaacttcgacaaaaaaagatgaaaaaatcaaaagaaggtggaacagaagaagaaaatagagatggagatgttattgggcctttgccaccggagccagaggctgtgccaaccccacgtcctgctgcccagagtagcaaagtagaagtcattgtccaggagaggaaggacaccaagcctggagtgccacacatccgggagtgggaccgcggaaaagaattttcctttggatactggtcgaagaggcagtcagatctccgggctgagagagatcctgagtttgccccgccgtcagattactttgtgggtcagaagagaactggtttttccagcagccaggcatggagcagacctgggccagcacagagtgacccagggcagtgccctgaccagagccacggacctagccctgaacatacgtcacccactcctgcccccgacaacccaccacaagcccccacagttactttcaaaactctggatgacatgatttcctattacaaacaagtgacatgatctttcaaagcacgctgacttgggtttgtactttgacagtgcctttctctcccagagggagaaataactttaggaactgaattgtacctttgtcctgtcctttccctaggaggcacagacttcgggttggatttgtcagcaaggaggaaagttatggaaactttggccacttggctgttcattttattctaagtgggatagggacatacctacctggatttacatgtgagctgcgatagaatagaagtatttattctgtaaaattagacactgagatgtgcttataaccctgtttcatatctactcccacgacttactcatatttaagggttcttttccattccttttgcaaatccgagcatgcaggtgtctttattccaagggttcagcttccagatcagccgatggaccataggtcacgaggaatttctccctgtcaagcagtggaaaactgcatgggaggcaaaatgctctgttctccaagaggacccggaagtaatcacataggaaatgataaggaagaccaggaggagctcttcgtagtccagaaaggtagaagtgggagttgtttacttaattttactgtcataccatgctattacctacactcctgtgtgcagtgggcattcagtaaatgtgtgttgaaggactgggacgtacgtggaggctgctggacctggtcagagactgatgtgccttagcggcaatggttagagcttttcagtgcatcccacctccctgtcgcccccatgctcggcttcctcacattcaggagcctgacttggatcagacttggggctgcacagtggagcaggtgggttcccatgtcattagtaataaggagagggttgggggtgggcagggctccagaaagtcagcagtgtgcctgggcacccaccccatcctctacctgccacacctcagagggttcctacagctgcacacaagcagttgagagttgatgaccaggcccatagggctcccacagctggttcccaggccagtgagtgctgtgagaatacagtagcacaagtccttgttctctgaagagtgggaaggagaggagtgagtgaagtagcctgtcccctgcaggtcctctgcgatggcattgtctcggttcccgcagtgctgcagtgtggaagggagtgccccatcctcattacagatgacacactggagtgtggaggggtcgatgacttgtgcagggtcatatggtacctaaggggcagatctcagacttaaacacaattgatgtctaacccctagacagtctttttagtgccctctgctctcagtcttgttgccctagtatcaagcaatcttagacaaacatcctgaattcttacaaacttacctctaaactctgaggataaagttgccagtccttttaatggtcagcctaatcattctgtcagcctaatcgggtaattgctttttttaataaatacacataaaaaccacaaaaacag

SEQ ID NO: 314828 - DNA, 2934 bp, Homo sapiens
tgtcgaagacacttccggtggcgacggaggtaggcttacgaggcctgtgtcgggtagaaagggtccttcctggaccgggaccctctgccacgaccatggaccgtaggaaaaagcctttggacgtcacggcctcctcgttggtagatcttaaggctgaactcttccgaaagcaagaagaattcaaacaagaaaaacttctaaaagattctggagtttttggaaaaccaaaaacaactaacaagaaaccaagtatctggagcaaacagaatgtaggcgtttcaaatcgagctgagaaggatgctgaacagaagattgaagaacagaagactttagacaaagcaagggaaaaattggaagaaaaagccaaattatatgaaaaaatgactaaaggagactttatagatgaagaagtagaggatatgtaccttgtggatttcacacagaagatcatagacaagcgcaaagaaatggaggcatctggtgcccatagagattctcaaaaggcaggagaaagggacgacgatgaggaaaaccttcctgagggagagatccctcctccccaagaccccagtgaagaatgggtggattacgtggactctttggggcgttcccggcgctgtatgagaaaggatttgccagatctgctggagatggataaaaatcttcaggggagactttttattagtcctgctaatgaaaaaaccctattatctgaagatatgagaaaagaacttcagcgccagcaatgggaggaagaagaaagagaggccctgaagaggcccatggggcccgtacattatgaagacattcgggaaaatgaggcccggcaacttggtgttgggtattttgcctttgcccgagacaaagagttgagaaacaagcagatgaaaaccttagagatgctgcgtgaacagacaacagatcagagaacaaaacgagaaaacataaaggaaaagcgaaaggctatcttagaggcaagacttgccaaacttcgacaaaaaaagatgaaaaaatcaaaagaaggtggaacagaagaagaaaatagagatggagatgttattgggcctttgccaccggagccagaggctgtgccaaccccacgtcctgctgcccagagtagcaaagtagaagtcattgtccaggagaggaaggacaccaagcctggaaattttcctttggatactggtcgaagaggcagtcagatctccgggctgagagagatcctgagtttgccccgccgtcagattactttgtgggtcagaagagaactggtttttccagcagccaggcatggagcagacctgggccagcacagagtgacccagggcagtgccctgaccagagccacggacctagccctgaacatacgtcacccactcctgcccccgacaacccaccacaagcccccacagttactttcaaaactctggatgacatgatttcctattacaaacaagtgacatgatctttcaaagcacgctgacttgggtttgtactttgacagtgcctttctctcccagagggagaaataactttaggaactgaattgtacctttgtcctgtcctttccctaggaggcacagacttcgggttggatttgtcagcaaggaggaaagttatggaaactttggccacttggctgttcattttattctaagtgggatagggacatacctacctggatttacatgtgagctgcgatagaatagaagtatttattctgtaaaattagacactgagatgtgcttataaccctgtttcatatctactcccacgacttactcatatttaagggttcttttccattccttttgcaaatccgagcatgcaggtgtctttattccaagggttcagcttccagatcagccgatggaccataggtcacgaggaatttctccctgtcaagcagtggaaaactgcatgggaggcaaaatgctctgttctccaagaggacccggaagtaatcacataggaaatgataaggaagaccaggaggagctcttcgtagtccagaaaggtagaagtgggagttgtttacttaattttactgtcataccatgctattacctacactcctgtgtgcagtgggcattcagtaaatgtgtgttgaaggactgggacgtacgtggaggctgctggacctggtcagagactgatgtgccttagcggcaatggttagagcttttcagtgcatcccacctccctgtcgcccccatgctcggcttcctcacattcaggagcctgacttggatcagacttggggctgcacagtggagcaggtgggttcccatgtcattagtaataaggagagggttgggggtgggcagggctccagaaagtcagcagtgtgcctgggcacccaccccatcctctacctgccacacctcagagggttcctacagctgcacacaagcagttgagagttgatgaccaggcccatagggctcccacagctggttcccaggccagtgagtgctgtgagaatacagtagcacaagtccttgttctctgaagagtgggaaggagaggagtgagtgaagtagcctgtcccctgcaggtcctctgcgatggcattgtctcggttcccgcagtgctgcagtgtggaagggagtgccccatcctcattacagatgacacactggagtgtggaggggtcgatgacttgtgcagggtcatatggtacctaaggggcagatctcagacttaaacacaattgatgtctaacccctagacagtctttttagtgccctctgctctcagtcttgttgccctagtatcaagcaatcttagacaaacatcctgaattcttacaaacttacctctaaactctgaggataaagttgccagtccttttaatggtcagcctaatcattctgtcagcctaatcgggtaattgctttttttaataaatacacataaaaaccacaaaaacag

SEQ ID NO: 314829 - DNA, 367 bp, Homo sapiens
taacaataaattcaactgattcgttaatcagttctaataactttctttcttatttttaccaaattttcctttggatactggtcgaagaggcagtcagatctccgggctgagagagatcctgagtttgccccgccgtcagattactttgtgggtcagaagagaactggtttttccagcagccaggcatggagcagacctgggccagcacagagtgacccagggcagtgccctgaccagagccacggacctagccctgaacatacgtcacccactcctgcccccgacaacccaccacaagcccccacagttactttcaaaactctggatgacatgatttcctattacaaacaagtgacatgatctttca

SEQ ID NO: 314830 - DNA, 1650 bp, Homo sapiens
tgtcgaagacacttccggtggcgacggaggtaggcttacgaggcctgtgtcgggtagaaagggtccttcctggaccgggaccctctgccacgaccatggaccgtaggaaaaagcctttggacgtcacggcctcctcgttggtagatcttaaggctgaactcttccgaaagcaagaagaattcaaacaagaaaaacttctaaaagattctggagtttttggaaaaccaaaaacaactaacaagaaaccaagtatctggagcaaacagaatgtaggcgtttcaaatcgagctgagaaggatgctgaacagaagattgaagaacagaagactttagacaaagcaagacaatgtatttcaaaggcattgaagcagggaaggttccctattttcctcatgcagatactatcatctattccatctctacagcaatttgcttccaggcagctgtcatggaagttcagactttgagaccatcttactggaagttccttttaagactcaccaagggcaaatttgctgtcatgaaccgaaaagtccttgatgtttttggtactggtgcatctaaacactttcaggatttcatccccaggttggatccaagatacacaactgttaacaccagagttgcccacagagtttcctgaagatgactgtacttattaatgtgactaaatgtttcatcttgaagagttaattatgttgacccaaggaggggccaagctcgaacttcagtgttatttcagttagagatactcttttcatttgttttgtttttcttatgaatcagaaattcagaagctttttaggaagatgttgcttaataattaagcttcctccatagccagaataagattctggatcactgtagtgactgacattatatattattgatcaaattatgtccacaagcaatattatataatctacgtagaagtgtaataacaaacaagagtacacttaaaattactttaaaagatgtctttagttcattccaatataattcttgattaaaattaggattatttctacattttaggatttacaaaggatcacgggtacatggatttggtctatatatttttttaaagttttgaattggtatctgtagtagtggaatgttatagatttgaagtaactctccacggacagtgctgctttcgtgtagagcaatttaattggagaagtggccattcttacttcagggatgcaaagatgggtctcataccatttggataaatgtcgtggtatccatgctttttttcaactaataacatcatctctcttcatgaccagttaattgggctatttggcagcccagtgaacctatgtactaatggcaagttaggggcaaatggaaatggacacatccgataaagttgaaatgtatgttttaatctttcacagaagtattacacttgaatatttaaaaacaaaacttttaaacttcctataggtttatgatgtttgttttcatttatatggacataatccttcatagctcagtttatatgccattgttgtattagaagggatcaaaatcctatggaacaaagtagtcttggcaagttggcagtttgtgtcctctcagctgtttaacttatgtaatggatgttttgcacctgaaaacactataaaaatccagtggttgtcg

SEQ ID NO: 314831 - DNA, 648 bp, Homo sapiens
tgtcgaagacacttccggtggcgacggaggtaggcttacgaggcctgtgtcgggtagaaagggtccttcctggaccgggaccctctgccacgaccatggaccgtaggaaaaagcctttggacgtcacggcctcctcgttggtagatcttaaggctgaactcttccgaaagcaagaagaattcaaacaagaaaaacttctaaaagattctggagtttttggaaaaccaaaaacaactaacaagaaaccaagtatctggagcaaacagaatgtaggcgtttcaaatcgagctgagaaggatgctgaacagaagattgaagaacagaagactttagacaaagcaagggaaaaaaaaaaaaaaaaaaaaaaaaaaaaaatttgtgggggggccttgggccttggaaaaagttttttaaacctttggtggggggggggggcccgtgggtacgtgtgcaactgtggggcaaacgagtgttccctaagggaaaccgcggcgcacaggcacaacgtgcgggggtttctccaccaaattaaaaacgcgcgggggggcaccggaggggttgtgaaaaattccagagggggtccggggggcatcaaggggctcttccagcgggaggtccaggagagccgattaattaacccggatgatg

SEQ ID NO: 314832 - DNA, 2740 bp, Homo sapiens
tgtcgaagacacttccggtggcgacggaggtaggcttacgaggcctgtgtcgggtagaaagggtccttcctggaccgggaccctctgccacgaccatggaccgtaggaaaaagcctttggacgtcacggcctcctcgttggtagatcttaaggctgaactcttccgaaagcaagaagaattcaaacaagaaaaacttctaaaagattctggagtttttggaaaaccaaaaacaactaacaagaaaccaagtatctggagcaaacagaatgtaggcgtttcaaatcgagctgagaaggatgctgaacagaagattgaagaacagaagactttagacaaagcaagggaaaaattggaagaaaaagccaaattatatgaaaaaatgactaaaggagactttatagatgaagaagtagaggatatgtaccttgtggatttcacacagaagatcatagacaagcgcaaagaaatggaggcatctggtgcccatagagattctcaaaaggcaggagaaagggacgacgatgaggaaaaccttcctgagggagagatccctcctccccaagaccccagtgaagaatgggtggattacgtggactctttggggcgttcccggcgctgtatgagaaaggatttgccagatctgctggagatggataaaaatcttcaggggagactttttattagtcctgctaatgaaaaaaccctattatctgaagatatgagaaaagaacttcagcgccagcaatgggaggaagaagaaagagaggccctgaagaggcccatggggcccgtacattatgaagacattcgggaaaatgatggagatgttattgggcctttgccaccggagccagaggctgtgccaaccccacgtcctgctgcccagagtagcaaagtagaagtcattgtccaggagaggaaggacaccaagcctggagtgccacacatccgggagtgggaccgcggaaaagaattttcctttggatactggtcgaagaggcagtcagatctccgggctgagagagatcctgagtttgccccgccgtcagattactttgtgggtcagaagagaactggtttttccagcagccaggcatggagcagacctgggccagcacagagtgacccagggcagtgccctgaccagagccacggacctagccctgaacatacgtcacccactcctgcccccgacaacccaccacaagcccccacagttactttcaaaactctggatgacatgatttcctattacaaacaagtgacatgatctttcaaagcacgctgacttgggtttgtactttgacagtgcctttctctcccagagggagaaataactttaggaactgaattgtacctttgtcctgtcctttccctaggaggcacagacttcgggttggatttgtcagcaaggaggaaagttatggaaactttggccacttggctgttcattttattctaagtgggatagggacatacctacctggatttacatgtgagctgcgatagaatagaagtatttattctgtaaaattagacactgagatgtgcttataaccctgtttcatatctactcccacgacttactcatatttaagggttcttttccattccttttgcaaatccgagcatgcaggtgtctttattccaagggttcagcttccagatcagccgatggaccataggtcacgaggaatttctccctgtcaagcagtggaaaactgcatgggaggcaaaatgctctgttctccaagaggacccggaagtaatcacataggaaatgataaggaagaccaggaggagctcttcgtagtccagaaaggtagaagtgggagttgtttacttaattttactgtcataccatgctattacctacactcctgtgtgcagtgggcattcagtaaatgtgtgttgaaggactgggacgtacgtggaggctgctggacctggtcagagactgatgtgccttagcggcaatggttagagcttttcagtgcatcccacctccctgtcgcccccatgctcggcttcctcacattcaggagcctgacttggatcagacttggggctgcacagtggagcaggtgggttcccatgtcattagtaataaggagagggttgggggtgggcagggctccagaaagtcagcagtgtgcctgggcacccaccccatcctctacctgccacacctcagagggttcctacagctgcacacaagcagttgagagttgatgaccaggcccatagggctcccacagctggttcccaggccagtgagtgctgtgagaatacagtagcacaagtccttgttctctgaagagtgggaaggagaggagtgagtgaagtagcctgtcccctgcaggtcctctgcgatggcattgtctcggttcccgcagtgctgcagtgtggaagggagtgccccatcctcattacagatgacacactggagtgtggaggggtcgatgacttgtgcagggtcatatggtacctaaggggcagatctcagacttaaacacaattgatgtctaacccctagacagtctttttagtgccctctgctctcagtcttgttgccctagtatcaagcaatcttagacaaacatcctgaattcttacaaacttacctctaaactctgaggataaagttgccagtccttttaatggtcagcctaatcattctgtcagcctaatcgggtaattgctttttttaataaatacacataaaaaccacaaaaacag

SEQ ID NO: 314833 - DNA, 2277 bp, Homo sapiens
cggccgctactactactaaattcgcggccgtcgaaaagaacttcagcgccagcaatgggaggaagaagaaagagaggccctgaagaggcccatggggcccgtacattatgaagacattcgggaaaatgaggcccggcaacttggtgttgggtattttgcctttgcccgagacaaagagttgagaaacaagcagatgaaaaccttagagatgctgcgtgaacagacaacagatcagagaacaaaacgagaaaacataaaggaaaagcgaaaggctatcttagaggcaagacttgccaaacttcgacaaaaaaagatgaaaaaatcaaaagaaggtggaacagaagaagaaaatagagatggagatgttattgggcctttgccaccggagccagaggctgtgccaaccccacgtcctgctgcccagagtagcaaagtagaagtcattgtccaggagaggaaggacaccaagcctggagtgccacacatccgggagtgggaccgcggaaaagaattttcctttggatactggtcgaagaggcagtcagatctccgggctgagagagatcctgagtttgccccgccgtcagattactttgtgggtcagaagagaactggtttttccagcagccaggcatggagcagacctgggccagcacagagtgacccagggcagtgccctgaccagagccacggacctagccctgaacatacgtcacccactcctgcccccgacaacccaccacaagcccccacagttactttcaaaactctggatgacatgatttcctattacaaacaagtgacatgatctttcaaagcacgctgacttgggtttgtactttgacagtgcctttctctcccagagggagaaataactttaggaactgaattgtacctttgtcctgtcctttccctaggaggcacagacttcgggttggatttgtcagcaaggaggaaagttatggaaactttggccacttggctgttcattttattctaagtgggatagggacatacctacctggatttacatgtgagctgcgatagaatagaagtatttattctgtaaaattagacactgagatgtgcttataaccctgtttcatatctactcccacgacttactcatatttaagggttcttttccattccttttgcaaatccgagcatgcaggtgtctttattccaagggttcagcttccagatcagccgatggaccataggtcacgaggaatttctccctgtcaagcagtggaaaactgcatgggaggcaaaatgctctgttctccaagaggacccggaagtaatcacataggaaatgataaggaagaccaggaggagctcttcgtagtccagaaaggtagaagtgggagttgtttacttaattttactgtcataccatgctattacctacactcctgtgtgcagtgggcattcagtaaatgtgtgttgaaggactgggacgtacgtggaggctgctggacctggtcagagactgatgtgccttagcggcaatggttagagcttttcagtgcatcccacctccctgtcgcccccatgctcggcttcctcacattcaggagcctgacttggatcagacttggggctgcacagtggagcaggtgggttcccatgtcattagtaataaggagagggttgggggtgggcagggctccagaaagtcagcagtgtgcctgggcacccaccccatcctctacctgccacacctcagagggttcctacagctgcacacaagcagttgagagttgatgaccaggcccatagggctcccacagctggttcccaggccagtgagtgctgtgagaatacagtagcacaagtccttgttctctgaagagtgggaaggagaggagtgagtgaagtagcctgtcccctgcaggtcctctgcgatggcattgtctcggttcccgcagtgctgcagtgtggaagggagtgccccatcctcattacagatgacacactggagtgtggaggggtcgatgacttgtgcagggtcatatggtacctaaggggcagatctcagacttaaacacaattgatgtctaacccctagacagtctttttagtgccctctgctctcagtcttgttgccctagtatcaagcaatcttagacaaacatcctgaattcttacaaacttacctctaaactctgaggataaagttgccagtccttttaatggtcagcctaatcattctgtcagcctaatcgggtaattgctttttttaataaatacacataaaaaccacaaaaacag

SEQ ID NO: 314834 - DNA, 2470 bp, Homo sapiens
ttgcataaaggtagttgccatactatttttgtgtttcaaattttataactgctcacaagtaacctgtgtaactttgatgttttaaatctggtcccaaatgtggtacttttggggtggcttggatgggaaaatagaaagttacttaaaggattaaggtgtaggacggaatgggttggttttcttgagtgttaaggcttgcaagatgctctgtgaactcttatgaaactttgtaagacatcagagggttcataggagagtacttcatagggcttcattgtgaggatctcaaggacagcttcttagaggtggcctgaagatcaattaactagtctatttttagaagaaaatttcatctttttggacaggaatattgcaaatttggcttcaagcaaataattttctgattttctgttcagacaacagatcagagaacaaaacgagaaaacataaaggaaaagcgaaaggctatcttagaggcaagacttgccaaacttcgacaaaaaaagatgaaaaaatcaaaagaaggtggaacagaagaagaaaatagagatggagatgttattgggcctttgccaccggagccagaggctgtgccaaccccacgtcctgctgcccagagtagcaaagtagaagtcattgtccaggagaggaaggacaccaagcctggagtgccacacatccgggagtgggaccgcggaaaagaattttcctttggatactggtcgaagaggcagtcagatctccgggctgagagagatcctgagtttgccccgccgtcagattactttgtgggtcagaagagaactggtttttccagcagccaggcatggagcagacctgggccagcacagagtgacccagggcagtgccctgaccagagccacggacctagccctgaacatacgtcacccactcctgcccccgacaacccaccacaagcccccacagttactttcaaaactctggatgacatgatttcctattacaaacaagtgacatgatctttcaaagcacgctgacttgggtttgtactttgacagtgcctttctctcccagagggagaaataactttaggaactgaattgtacctttgtcctgtcctttccctaggaggcacagacttcgggttggatttgtcagcaaggaggaaagttatggaaactttggccacttggctgttcattttattctaagtgggatagggacatacctacctggatttacatgtgagctgcgatagaatagaagtatttattctgtaaaattagacactgagatgtgcttataaccctgtttcatatctactcccacgacttactcatatttaagggttcttttccattccttttgcaaatccgagcatgcaggtgtctttattccaagggttcagcttccagatcagccgatggaccataggtcacgaggaatttctccctgtcaagcagtggaaaactgcatgggaggcaaaatgctctgttctccaagaggacccggaagtaatcacataggaaatgataaggaagaccaggaggagctcttcgtagtccagaaaggtagaagtgggagttgtttacttaattttactgtcataccatgctattacctacactcctgtgtgcagtgggcattcagtaaatgtgtgttgaaggactgggacgtacgtggaggctgctggacctggtcagagactgatgtgccttagcggcaatggttagagcttttcagtgcatcccacctccctgtcgcccccatgctcggcttcctcacattcaggagcctgacttggatcagacttggggctgcacagtggagcaggtgggttcccatgtcattagtaataaggagagggttgggggtgggcagggctccagaaagtcagcagtgtgcctgggcacccaccccatcctctacctgccacacctcagagggttcctacagctgcacacaagcagttgagagttgatgaccaggcccatagggctcccacagctggttcccaggccagtgagtgctgtgagaatacagtagcacaagtccttgttctctgaagagtgggaaggagaggagtgagtgaagtagcctgtcccctgcaggtcctctgcgatggcattgtctcggttcccgcagtgctgcagtgtggaagggagtgccccatcctcattacagatgacacactggagtgtggaggggtcgatgacttgtgcagggtcatatggtacctaaggggcagatctcagacttaaacacaattgatgtctaacccctagacagtctttttagtgccctctgctctcagtcttgttgccctagtatcaagcaatcttagacaaacatcctgaattcttacaaacttacctctaaactctgaggataaagttgccagtccttttaatggtcagcctaatcattctgtcagcctaatcgggtaattgctttttttaataaatacacataaaaaccacaaaaacag

SEQ ID NO: 314835 - DNA, 869 bp, Homo sapiens
tggtgagcaagagtctggcccgagttagctagagctgttgccatgacaagcattttcttaagaaagctctgctgttgagatcgtccaaagctgggggctgggagggggggcacgaacttcgtggggcaccatccctccgaagagagcaagatcagagacacccgcccagctctcctgcaccctttttctttcaggaacctgagaggtccttcccattggaggggcagggggaggagacccagcccactccccggccttagccagaaaggcaagagagcaaagccagcgtctctagcttggttgccacactggggagactggtgggtggtcaccccaccctaccctcatccatggaaacccggagggagagtcccgcctgaagaaacctggatctttgctagaaagagaggtaggcttgcagagaatgaattgacttgtgatttgcaaactttgtttctttcttttctctcaatggcttctaaaactccccgattttcctctttctagaatatttcatgcgactgggtttggaggattttttttaaaatatgtgtgtgtgcacagatttgtcaaatactgttttacctattatcagttctgagaaaccatatagtcgaacaagtgatttatctctcttttcctagttcttgtcattcctgggctatggggtagggtaatggagggttctctttttgacaccaaaattgagctcttggaaaaaatatttatctcccctccctcaacccattccgttcctgccctccccttccccccttggcttgggaatgagacgcaggatggaaaactgttgcaaaaatattttccgtgtctgttccctttctcgaaagcccaaaagagagatggaaaaa

SEQ ID NO: 314836 - DNA, 1330 bp, Homo sapiens
ggctgggcgttgggactccatggcaaattgttccctaagtgaagtatgatatgcaattaacgtttttctccttctcctcaccattgctttttgtgggagggaagctctctctgctctctcctgtccccttttcccatctacttccattcctgcttccccaaccttccatgaccctcccttcctctttcttcacctctctcggactgactgtggagcaaagctgtctcactctctgattctttgcagatcgacgtaattaacacattccagacgggagcctcttttaagggagtcctaaggcgacagaacatgggtcaacaccttgatgtaaaacttgttcctagttcatcctatgtagcagttgcaccagtcaaatcttcccccaccacttctgttcctgctgtttcatctcctcctatgggcagtgagtgatagtctattatgatgcatgatttgctaaaatgaccacaagagagcacgtggcatccactttaaccaaccatggttatcttttccttttggtttttccctttgatattttgacttaagggaagaaaaagacaaaaatcctactctaaaaccagactgtgtgcccttgtattttatttttgtaatgtagaaaagctattaaaccttaactgttttaaagacaataattctgttttctgattgttcctctgcattgctcatttcttccttttcttgagttttgttttgttttgctttgccttttttgtttgtctgtttgttgctttgctgggatatgttgttgttcctctcttctcctcctgctcctttgagtctgaactctacctcctaagcttagatgtgaggttaggccagaggaaaacccaagagctttctttacatgggggcaaagtttgggatcttttgaggaaaggtaggaagggagctaatgtgcccatgggtgtgttttgactagtggacctgtcataattgagccagtattaaacttggtcaataataatagtccatttggccaccactgtattgctgactggcaattttagcataaaagttgtagctggctgggcacgatggctcacgcctgtaatcccaacactttgggaggccaaagcagatcacgaggtcaggagatcaagaccatcctggctaacatggtgaaaccccgtctctactaaaaatacaaaaaattagctgggcgtggtggcgggcacctgtagtcctatagctactcgggaggctaagacaggagaatcacttgaactcaggaggcggaggttacagtgagccaagtggagagccactgcactccaccctgggcgatagagcaagactctgtctcaaa

SEQ ID NO: 314837 - DNA, 609 bp, Homo sapiens
gacctacaggagctttaggtagactaacctcactgctgaaaacccagaggggcgtggcacactcgcttgtgtggaaaagcctctaaatgcatcccttcctttctttcctgcttcctttgccttacaattgaagcagcccgtggtaccatcacagtatgcagagacttcctcacctttcatatctagggaccacccccgatgcattggtgagggtgggcacttataaatgcctgctattgttaagccattccagcctcttcctctgaatagaccagacgccctttcacttagttcagtgccagtccttttgccttcccaaccctgctgttaggtctacctggccaggtagacctaactggtccacaagagaaaatgagagactcgatttggctgccaggaacacctgggcctaggcaagaacacaagaggtttctgggggtggggaggaaataggtctcgctgaaggtgacagatcccttggggggcgtccagctgtctggatcactgtccagggactgtggccagcccaagatacctccgaggtgagtcctagatcactaggagcagcagtctgtcggtgggatgcgatggatggttaggtctacctgg

SEQ ID NO: 314838 - DNA, 789 bp, Homo sapiens
gaatagatgctatctggaagggtctttgtaaaagaaactcaccttgttatatctcccccattcaaagtgtaaggccatggtggggaatctgatggtttcatgtgtaaaaatgacaatagtctcttgatgtctgagcatcttttgcaggattcagacttgcttcctgacaaggaggaagcaataatttcttcaagcctcttcccttcttgcaatttctgaaatgggatagaagccacccctgctgctcttatgtcccctgtctatagccccacaataacttttattttttccactttccatgcatcaattgtaactactttctcctgggtgaatgcgctgatctaagcattgataattctgtcttcccctgctctcaccccccatagctttattgttttaatcctgagattttccatttcaaaaacactgtaaattccaagatctcaagggtggtctccagaaaacaggcgtatttctctctgctgattggctagagatcttcaaaataagtttcactgtctaaaactggccttgcaaatgttttagaaagttccccagtcggccaggcatggtggctcacgcctgtaatcccagcactttgggaggccaaggtgggtggatcacctgaggtcgggagttcaagaccagcctgaccaacatggagaaaccgcgtctctactaaaaatccaaaattagccgggcgtagtggcacatgcctgtaatcccagctactcgggaggctgaggcagaagaattacttgaacccgggaggcagaggttgtagtgagc

SEQ ID NO: 314839 - DNA, 420 bp, Homo sapiens
gctactactactaaattcgcggccgcgtcgactgggattggagaacttctgtggggccagttcatctccgcaatacctacccgatccctgaagttcctgaaggaggctgggcatggcaccaccaaagaggagatcaccaaggatgccgagggactggatgagattgaccatgctgagatggagctgcgccgaggccagatcctctggttccggggcctgaaccgtatccagactcaggtactctgatagtggtctgtccttcccttgggagaagcagcttcccatcttggaaggtgttgggagggtagcagttcttgtcggccagcatctcttcccttccaaaggctcactactgatgggcagccctagatcctcagcttcaggacagacacgcaaaaggatctgtgtggggtcctctga

SEQ ID NO: 314840 - DNA, 493 bp, Homo sapiens
  misc_feature (479)..(479): n is a, c, g, or t
gctgccatactactactcctagaacaaatgcagagtttctcaaaggtgtcggaataacatgggcttaagtgagatactggcagtggcaacagaaatgtgagaatttggaggtagaatagacaggatttgctctctaccttttaattagtttccaaggttgagggagtaggaggggagggtgaaagggatatcaaagatgattgtaattcccagtctgagctcaacagtaaggttggtggcatcaggccgcagccctcctttctctagagtgacagtgacacatttgctctttgttttcttttgtgtgactagtgtgccctgtagtatttacactgacttcggaagcttcctggaggtcaggaaatggagcctgggctttatccactccctcactgttttccctcccatcttacctcagggcatcgcaggcacagatgttgcgagagggccaagaggaccctgtcgtccagcacccaggncagcctggagatcg

SEQ ID NO: 314841 - DNA, 3613 bp, Homo sapiens
agaaaatggaaaggatatggatgaattgtgtaaacttagatccttctcccttttggcccaaaagaacccttgatttagttccagaatccaaccagtttctttgttaaaagggtccttttgaagcaattaagtgctggtaagaatatttctctgttgttgccaggttaccttctgcttttaaattgccatcttgtaaagtgtatgtggttcttaagtgccagggagatcagccttgcccatgaaggttgcatatgtgtggtatacagtttttacctgaaagcctgagctttctcttattcctaaagtggtggcaaaagaatgaactgggtatgaccctgcccccttactgggcttggatattgaggaccagacgctgccaaatctaggacaagacagaccatcaaagcagacttttgtgggctcctctttggggtgaccactgctttcaaagccatctgccaaggctctccagggcaggacctgactggtggggaatgagtgttcagaagccttgggagaggccaaagagccattctagcatgatctgagaaaaccttcctgcagaggccagaaaccttgagcttaggtgcctggggaccagcttcgacattctctccagtttctgattctaatttttgccacgtgtcacaacttttccagtctctgagaaggtcccagcctttctcaaatattctgattttgaaaatatgtatccaaagtgggaggcccctgtgacattttgccaacttaaacgagaaaaagaccccccgcacccggcacactcccccttcctccagccccgcttcagccacatgctccagctgctgcccagtaaagccctgtgcctttttttcccctgaatactgcccaaagcatccccttcccatctgcctctcaggagttggggactttgctaggagattttttaagtgttccttactgggacaacgtggagccacgtttgcaggagctccatttgtatccctgctggtgttgacttctgtgtaggggccagttcatgtccctgactctcacctcccattagataaatgaagcccacccccctttctagagtgatgagagtcaagaagaggggatgtatgaacggccaaattcccatgtgagaggaagatgacctgatccacctagccttttcttctggatctgtcctccctcacccctttcacctgagctgtccacagtaggaaacataaagaaacaatgtcccctacatatccccatgactacataatccatcatcgtaggaaataggaaagcaaatttgattttggttttgtaaaacgtacatgcttcaataattctttttttgtgtcttaaatactcataggggaaaaaaacagctcacccaaggtgttaggtttcacatatatattcatcaactattttagaagatttaattctatcaaatcttgtattacctcagatcattttaaatagcaagccaataacgagctttgaaggctattttaccattcctgttcacaaaaggttctcatggtgcctgacaggttacccttgagggcttgtgtctactttttaaaagtcaatggttttttttcttgtgttctagtttccataataggagagaaaatatagaaatatatgcaaaaattatagttttctttagatcagaaactgatatttttgggtcagccatatgtattttgtttaaaggatttaaaataaagtgccgtcatgtagccctgtggaagggagcacataaccagctgtttggcatgacaggtgacttagtatatttgtaattggttttaaaaccaatacaccatactttctttctgcaaacagccatctttatacttagggaagaaaaattgttgggttctagacttttttaatataaattttgttgatatggaattaggtaagtttaagtgtctatgtgcatatgttttttatataagttttttctattcagtttcactgatccaactggcagtgggtaaatatggcataagttaataacacttttccccaaaatggtgctttggatttgaaaagggtctgatggggagaaggagaacgtatcatcctagcttcctctcttaataaacctagaaaaacgggtagtaaactgtggatagtcaggaaaacacccagcaagggacacagctgtcaggaaatgaatcttccccccaacccccaccatgcagatggatagacagaatctttcctgactagtcattaggatcaggggcctctgttggatttgtgtttcttgaagaatagctggcagagtggtataaaagacacgaatatctcctggtctataaggatactctgatttggggtttgcatttttcatggtttttatttcctgttccccctggagttttccattagtgagtttttgtgcaaggatcttatttgtgatgccttccctcccctagaaagattttgtgcaatatattaaatggggacagaattctaaatggataaaacaatggctggttctagccctgagtgacagtcttaaggctagatccttcccatagtatcatctgtcctctggaatgactctcctgtccctaaaggggttaagagagagatcacctagaaatccctctggacacttgtgggttctttagggtttgagtttcttcttccccttgagcttcagagaggagagttggcatggttaaatctgaatggttacctcactgctgaaaacccagaggggcgtggcacactcgcttgtgtggaaaagcctctaaatgcatcccttcctttctttcctgcttcctttgccttacaattgaagcagcccgtggtaccatcacagtatgcagagacttcctcacctttcatatctagggaccacccccgatgcattggtgagggtgggcacttataaatgcctgctattgttaagccattccagcctcttcctctgaatagaccagacgccctttcacttagttcagtgccagtccttttgccttcccaaccctgctgttaggcctgctgttccctttgctcttgattaggagagatggaaggagatgagctcccataactgaattggcctttggttcatgttttctccccatatgtatatatgccatatgtgaatatgccatatatatgtgccaacaaatctatctacgttgttcttttcaaattagcacgcagataggaattttgagtttcttcttcttttagtaactagtataacaagcactggtatttttgtacaaaaaagaaaaacaaaagattgactattgtggtctgcatgacataaacaaacaaatggtgatatcaaagcaacgtataccccagtccagtgtgtgttgccataatttgcaattcagcttaacagtgcacccaatctatatttgcattttgatattatttaagctctatgtacaaggttttgcatgtatttatatggttcttagggaaaaaaaatgctataaactgcaaatctgaaattcaaatgtgttgttccactgagaccagaagaagaagaggagttttaaaagggataatttgttggagccaataaagctttttgctgatgaacagaaaccaatactgctgtgcactgagaataaaaactcatgcccacttgtaa

SEQ ID NO: 314842 - DNA, 3291 bp, Homo sapiens
ctacatggctctcagctatagactctgggcttggatattgaggaccagacgctgccaaatctaggacaagacagaccatcaaagcagacttttgtgggctcctctttggggtgaccactgctttcaaagccatctgccaaggctctccagggcaggacctgactggtggggaatgagtgttcagaagccttgggagaggccaaagagccattctagcatgatctgagaaaaccttcctgcagaggccagaaaccttgagcttaggtgcctggggaccagcttcgacattctctccagtttctgattctaatttttgccacgtgtcacaacttttccagtctctgagaaggtcccagcctttctcaaatattctgattttgaaaatatgtatccaaagtgggaggcccctgtgacattttgccaacttaaacgagaaaaagaccccccgcacccggcacactcccccttcctccagccccgcttcagccacatgctccagctgctgcccagtaaagccctgtgcctttttttcccctgaatactgcccaaagcatccccttcccatctgcctctcaggagttggggactttgctaggagattttttaagtgttccttactgggacaacgtggagccacgtttgcaggagctccatttgtatccctgctggtgttgacttctgtgtaggggccagttcatgtccctgactctcacctcccattagataaatgaagcccacccccctttctagagtgatgagagtcaagaagaggggatgtatgaacggccaaattcccatgtgagaggaagatgacctgatccacctagccttttcttctggatctgtcctccctcacccctttcacctgagctgtccacagtaggaaacataaagaaacaatgtcccctacatatccccatgactacataatccatcatcgtaggaaataggaaagcaaatttgattttggttttgtaaaacgtacatgcttcaataattctttttttgtgtcttaaatactcataggggaaaaaaacagctcacccaaggtgttaggtttcacatatatattcatcaactattttagaagatttaattctatcaaatcttgtattacctcagatcattttaaatagcaagccaataacgagctttgaaggctattttaccattcctgttcacaaaaggttctcatggtgcctgacaggttacccttgagggcttgtgtctactttttaaaagtcaatggttttttttcttgtgttctagtttccataataggagagaaaatatagaaatatatgcaaaaattatagttttctttagatcagaaactgatatttttgggtcagccatatgtattttgtttaaaggatttaaaataaagtgccgtcatgtagccctgtggaagggagcacataaccagctgtttggcatgacaggtgacttagtatatttgtaattggttttaaaaccaatacaccatactttctttctgcaaacagccatctttatacttagggaagaaaaattgttgggttctagacttttttaatataaattttgttgatatggaattaggtaagtttaagtgtctatgtgcatatgttttttatataagttttttctattcagtttcactgatccaactggcagtgggtaaatatggcataagttaataacacttttccccaaaatggtgctttggatttgaaaagggtctgatggggagaaggagaacgtatcatcctagcttcctctcttaataaacctagaaaaacgggtagtaaactgtggatagtcaggaaaacacccagcaagggacacagctgtcaggaaatgaatcttccccccaacccccaccatgcagatggatagacagaatctttcctgactagtcattaggatcaggggcctctgttggatttgtgtttcttgaagaatagctggcagagtggtataaaagacacgaatatctcctggtctataaggatactctgatttggggtttgcatttttcatggtttttatttcctgttccccctggagttttccattagtgagtttttgtgcaaggatcttatttgtgatgccttccctcccctagaaagattttgtgcaatatattaaatggggacagaattctaaatggataaaacaatggctggttctagccctgagtgacagtcttaaggctagatccttcccatagtatcatctgtcctctggaatgactctcctgtccctaaaggggttaagagagagatcacctagaaatccctctggacacttgtgggttctttagggtttgagtttcttcttccccttgagcttcagagaggagagttggcatggttaaatctgaatggttacctcactgctgaaaacccagaggggcgtggcacactcgcttgtgtggaaaagcctctaaatgcatcccttcctttctttcctgcttcctttgccttacaattgaagcagcccgtggtaccatcacagtatgcagagacttcctcacctttcatatctagggaccacccccgatgcattggtgagggtgggcacttataaatgcctgctattgttaagccattccagcctcttcctctgaatagaccagacgccctttcacttagttcagtgccagtccttttgccttcccaaccctgctgttaggcctgctgttccctttgctcttgattaggagagatggaaggagatgagctcccataactgaattggcctttggttcatgttttctccccatatgtatatatgccatatgtgaatatgccatatatatgtgccaacaaatctatctacgttgttcttttcaaattagcacgcagataggaattttgagtttcttcttcttttagtaactagtataacaagcactggtatttttgtacaaaaaagaaaaacaaaagattgactattgtggtctgcatgacataaacaaacaaatggtgatatcaaagcaacgtataccccagtccagtgtgtgttgccataatttgcaattcagcttaacagtgcacccaatctatatttgcattttgatattatttaagctctatgtacaaggttttgcatgtatttatatggttcttagggaaaaaaaatgctataaactgcaaatctgaaattcaaatgtgttgttccactgagaccagaagaagaagaggagttttaaaagggataatttgttggagccaataaagctttttgctgatgaacagaaaccaatactgctgtgcactgagaataaaaactcatgcccacttgtaa

SEQ ID NO: 314843 - DNA, 2435 bp, Homo sapiens
  misc_feature (42)..(42): n is a, c, g, or t
actgcctctgttcttgtgtacattgtatccagccaatgtatncttatcccctacatatccccatgactacataatccatcatcgtaggaaataggaaagcaaatttgattttggttttgtaaaacgtacatgcttcaataattctttttttgtgtcttaaatactcataggggaaaaaaacagctcacccaaggtgttaggtttcacatatatattcatcaactattttagaagatttaattctatcaaatcttgtattacctcagatcattttaaatagcaagccaataacgagctttgaaggctattttaccattcctgttcacaaaaggttctcatggtgcctgacaggttacccttgagggcttgtgtctactttttaaaagtcaatggttttttttcttgtgttctagtttccataataggagagaaaatatagaaatatatgcaaaaattatagttttctttagatcagaaactgatatttttgggtcagccatatgtattttgtttaaaggatttaaaataaagtgccgtcatgtagccctgtggaagggagcacataaccagctgtttggcatgacaggtgacttagtatatttgtaattggttttaaaaccaatacaccatactttctttctgcaaacagccatctttatacttagggaagaaaaattgttgggttctagacttttttaatataaattttgttgatatggaattaggtaagtttaagtgtctatgtgcatatgttttttatataagttttttctattcagtttcactgatccaactggcagtgggtaaatatggcataagttaataacacttttccccaaaatggtgctttggatttgaaaagggtctgatggggagaaggagaacgtatcatcctagcttcctctcttaataaacctagaaaaacgggtagtaaactgtggatagtcaggaaaacacccagcaagggacacagctgtcaggaaatgaatcttccccccaacccccaccatgcagatggatagacagaatctttcctgactagtcattaggatcaggggcctctgttggatttgtgtttcttgaagaatagctggcagagtggtataaaagacacgaatatctcctggtctataaggatactctgatttggggtttgcatttttcatggtttttatttcctgttccccctggagttttccattagtgagtttttgtgcaaggatcttatttgtgatgccttccctcccctagaaagattttgtgcaatatattaaatggggacagaattctaaatggataaaacaatggctggttctagccctgagtgacagtcttaaggctagatccttcccatagtatcatctgtcctctggaatgactctcctgtccctaaaggggttaagagagagatcacctagaaatccctctggacacttgtgggttctttagggtttgagtttcttcttccccttgagcttcagagaggagagttggcatggttaaatctgaatggttacctcactgctgaaaacccagaggggcgtggcacactcgcttgtgtggaaaagcctctaaatgcatcccttcctttctttcctgcttcctttgccttacaattgaagcagcccgtggtaccatcacagtatgcagagacttcctcacctttcatatctagggaccacccccgatgcattggtgagggtgggcacttataaatgcctgctattgttaagccattccagcctcttcctctgaatagaccagacgccctttcacttagttcagtgccagtccttttgccttcccaaccctgctgttaggcctgctgttccctttgctcttgattaggagagatggaaggagatgagctcccataactgaattggcctttggttcatgttttctccccatatgtatatatgccatatgtgaatatgccatatatatgtgccaacaaatctatctacgttgttcttttcaaattagcacgcagataggaattttgagtttcttcttcttttagtaactagtataacaagcactggtatttttgtacaaaaaagaaaaacaaaagattgactattgtggtctgcatgacataaacaaacaaatggtgatatcaaagcaacgtataccccagtccagtgtgtgttgccataatttgcaattcagcttaacagtgcacccaatctatatttgcattttgatattatttaagctctatgtacaaggttttgcatgtatttatatggttcttagggaaaaaaaatgctataaactgcaaatctgaaattcaaatgtgttgttccactgagaccagaagaagaagaggagttttaaaagggataatttgttggagccaataaagctttttgctgatgaacagaaaccaatactgctgtgcactgagaataaaaactcatgcccacttgtaa

SEQ ID NO: 314844 - DNA, 3692 bp, Homo sapiens
agaaaatggaaaggatatggatgaattgtgtaaacttagatccttctcccttttggcccaaaagaacccttgatttagttccagaatccaaccagtttctttgttaaaagggtccttttgaagcaattaagtgctggtaagaatatttctctgttgttgccaggttaccttctgcttttaaattgccatcttgtaaagtgtatgtggttcttaagtgccagggagatcagccttgcccatgaaggttgcatatgtgtggtatacagtttttacctgaaagcctgagctttctcttattcctaaagtggtggcaaaagaatgaactgggtatgaccctgcccccttactgggcttggatattgaggaccagacgctgccaaatctaggacaagacagaccatcaaagcagacttttgtgggctcctctttggggtgaccactgctttcaaagccatctgccaaggctctccagggcaggacctgactggtggggaatgagtgttcagaagccttgggagaggccaaagagccattctagcatgatctgagaaaaccttcctgcagaggccagaaaccttgagcttaggtgcctggggaccagcttcgacattctctccagtttctgattctaatttttgccacgtgtcacaacttttccagtctctgagaaggtcccagcctttctcaaatattctgattttgaaaatatgtatccaaagtgggaggcccctgtgacattttgccaacttaaacgagaaaaagaccccccgcacccggcacactcccccttcctccagccccgcttcagccacatgctccagctgctgcccagtaaagccctgtgcctttttttcccctgaatactgcccaaagcatccccttcccatctgcctctcaggagttggggactttgctaggagattttttaagtgttccttactgggacaacgtggagccacgtttgcaggagctccatttgtatccctgctggtgttgacttctgtgtaggggccagttcatgtccctgactctcacctcccattagataaatgaagcccacccccctttctagagtgatgagagtcaagaagaggggatgtatgaacggccaaattcccatgtgagaggaagatgacctgatccacctagccttttcttctggatctgtcctccctcacccctttcacctgagctgtccacagtaggaaacataaagaaacaatgtcccctacatatccccatgactacataatccatcatcgtaggaaataggaaagcaaatttgattttggttttgtaaaacgtacatgcttcaataattctttttttgtgtcttaaatactcataggggaaaaaaacagctcacccaaggtgttaggtttcacatatatattcatcaactattttagaagatttaattctatcaaatcttgtattacctcagatcattttaaatagcaagccaataacgagctttgaaggctattttaccattcctgttcacaaaaggttctcatggtgcctgacaggttacccttgagggcttgtgtctactttttaaaagtcaatggttttttttcttgtgttctagtttccataataggagagaaaatatagaaatatatgcaaaaattatagttttctttagatcagaaactgatatttttgggtcagccatatgtattttgtttaaaggatttaaaataaagtgccgtcatgtagccctgtggaagggagcacataaccagctgtttggcatgacaggtgacttagtatatttgtaattggttttaaaaccaatacaccatactttctttctgcaaacagccatctttatacttagggaagaaaaattgttgggttctagacttttttaatataaattttgttgatatggaattaggtaagtttaagtgtctatgtgcatatgttttttatataagttttttctattcagtttcactgatccaactggcagtgggtaaatatggcataagttaataacacttttccccaaaatggtgctttggatttgaaaagggtctgatggggagaaggagaacgtatcatcctagcttcctctcttaataaacctagaaaaacgggtagtaaactgtggatagtcaggaaaacacccagcaagggacacagctgtcaggaaatgaatcttccccccaacccccaccatgcagatggatagacagaatctttcctgactagtcattaggatcaggggcctctgttggatttgtgtttcttgaagaatagctggcagagtggtataaaagacacgaatatctcctggtctataaggatactctgatttggggtttgcatttttcatggtttttatttcctgttccccctggagttttccattagtgagtttttgtgcaaggatcttatttgtgatgccttccctcccctagaaagattttgtgcaatatattaaatggggacagaattctaaatggataaaacaatggctggttctagccctgagtgacagtcttaaggctagatccttcccatagtatcatctgtcctctggaatgactctcctgtccctaaaggggttaagagagagatcacctagaaatccctctggacacttgtgggttctttagggtttgagtttcttcttccccttgagcttcagagaggagagttggcatggttaaatctgaatggttacctcactgctgaaaacccagaggggcgtggcacactcgcttgtgtggaaaagcctctaaatgcatcccttcctttctttcctgcttcctttgccttacaattgaagcagcccgtggtaccatcacagtatgcagagacttcctcacctttcatatctagggaccacccccgatgcattggtgagggtgggcacttataaatgcctgctattgttaagccattccagcctcttcctctgaatagaccagacgccctttcacttagttcagtgccagtccttttgccttcccaaccctgctgttaggcctgctgttccctttgctcttgattaggagagatggaaggagatgagctcccataactgaattggcctttggttcatgttttctccccatatgtatatatgccatatgtgaatatgccatatatatgtgccaacaaatctatctacgttgttcttttcaaattagcacgcagataggaattttgagtttcttcttcttttagtaactagtataacaagcactggtatttttgtacaaaaaagaaaaacaaaagattgactattgtggtctgcatgacataaacaaacaaatggtgatatcaaagcaacgtataccccagtccagtgtgtgttgccataatttgcaattcagcttaacagtgcacccaatctatatttgcattttgatattatttaagctctatgtacaaggttttgcatgtatttatatggttcttagggaaaaaaaatgctataaactgcaaatctgaaattcaaatgtgttgttccactgagaccagaagaagaagaggagttttaaaagggataatttgttggagccaataaagctttttgctgatgaacagaaaccaatactgctgtgcactgagaataaaaactcatgcccacttgtaaaaaaaaacaagaccagcacacagaaaacagaacaaaacgacaacaaccaaaacagacacacggcaacaaaacaaggggg

SEQ ID NO: 314845 - DNA, 1533 bp, Homo sapiens
ggctcgccgcggcttcgtcggccgtctgcccttcgtcccgtaccgaccctcgagcacatggacagagtatgatccagagaaatgaatcttccccccaacccccaccatgcagatggatagacagaatctttcctgactagtcattaggatcaggggcctctgttggatttgtgtttcttgaagaatagctggcagagtggtataaaagacacgaatatctcctggtctataaggatactctgatttggggtttgcatttttcatggtttttatttcctgttccccctggagttttccattagtgagtttttgtgcaaggatcttatttgtgatgccttccctcccctagaaagattttgtgcaatatattaaatggggacagaattctaaatggataaaacaatggctggttctagccctgagtgacagtcttaaggctagatccttcccatagtatcatctgtcctctggaatgactctcctgtccctaaaggggttaagagagagatcacctagaaatccctctggacacttgtgggttctttagggtttgagtttcttcttccccttgagcttcagagaggagagttggcatggttaaatctgaatggttacctcactgctgaaaacccagaggggcgtggcacactcgcttgtgtggaaaagcctctaaatgcatcccttcctttctttcctgcttcctttgccttacaattgaagcagcccgtggtaccatcacagtatgcagagacttcctcacctttcatatctagggaccacccccgatgcattggtgagggtgggcacttataaatgcctgctattgttaagccattccagcctcttcctctgaatagaccagacgccctttcacttagttcagtgccagtccttttgccttcccaaccctgctgttaggcctgctgttccctttgctcttgattaggagagatggaaggagatgagctcccataactgaattggcctttggttcatgttttctccccatatgtatatatgccatatgtgaatatgccatatatatgtgccaacaaatctatctacgttgttcttttcaaattagcacgcagataggaattttgagtttcttcttcttttagtaactagtataacaagcactggtatttttgtacaaaaaagaaaaacaaaagattgactattgtggtctgcatgacataaacaaacaaatggtgatatcaaagcaacgtataccccagtccagtgtgtgttgccataatttgcaattcagcttaacagtgcacccaatctatatttgcattttgatattatttaagctctatgtacaaggttttgcatgtatttatatggttcttagggaaaaaaaatgctataaactgcaaatctgaaattcaaatgtgttgttccactgagaccagaagaagaagaggagttttaaaagggataatttgttggagccaataaagctttttgctgatgaacagaaaccaatactgctgtgcactgagaataaaaactcatgcccacttgtaa

SEQ ID NO: 314846 - DNA, 3564 bp, Homo sapiens
agaaaatggaaaggatatggatgaattgtgtaaacttagatccttctcccttttggcccaaaagaacccttgatttagttccagaatccaaccagtttctttgttaaaagggtccttttgaagcaattaagtgctggtaagaatatttctctgttgttgccaggttaccttctgcttttaaattgccatcttgtaaagtgtatgtggttcttaagtgccagggagatcagccttgcccatgaaggttgcatatgtgtggtatacagtttttacctgaaagcctgagctttctcttattcctaaagtggtggcaaaagaatgaactgggtatgaccctgcccccttactgggcttggatattgaggaccagacgctgccaaatctaggacaagacagaccatcaaagcagacttttgtgggctcctctttggggtgaccactgctttcaaagccatctgccaaggctctccagggcaggacctgactggtggggaatgagtgttcagaagccttgggagaggccaaagagccattctagcatgatctgagaaaaccttcctgcagaggccagaaaccttgagcttaggtgcctggggaccagcttcgacattctctccagtttctgattctaatttttgccacgtgtcacaacttttccagtctctgagaaggtcccagcctttctcaaatattctgattttgaaaatatgtatccaaagtgggaggcccctgtgacattttgccaacttaaacgagaaaaagaccccccgcacccggcacactcccccttcctccagccccgcttcagccacatgctccagctgctgcccagtaaagccctgtgcctttttttcccctgaatactgcccaaagcatccccttcccatctgcctctcaggagttggggactttgctaggagattttttaagtgttccttactgggacaacgtggagccacgtttgcaggagctccatttgtatccctgctggtgttgacttctgtgtaggggccagttcatgtccctgactctcacctcccattagataaatgaagcccacccccctttctagagtgatgagagtcaagaagaggggatgtatgaacggccaaattcccatgtgagaggaagatgacctgatccacctagccttttcttctggatctgtcctccctcacccctttcacctgagctgtccacagtaggaaacataaagaaacaatgtcccctacatatccccatgactacataatccatcatcgtaggaaataggaaagcaaatttgattttggttttgtaaaacgtacatgcttcaataattctttttttgtgtcttaaatactcataggggaaaaaaacagctcacccaaggtgttaggtttcacatatatattcatcaactattttagaagatttaattctatcaaatcttgtattacctcagatcattttaaatagcaagccaataacgagctttgaaggctattttaccattcctgttcacaaaaggttctcatggtgcctgacaggttacccttgagggcttgtgtctactttttaaaagtcaatggttttttttcttgtgttctagtttccataataggagagaaaatatagaaatatatgcaaaaattatagttttctttagatcagaaactgatatttttgggtcagccatatgtattttgtttaaaggatttaaaataaagtgccgtcatgtagccctgtggaagggagcacataaccagctgtttggcatgacaggtgacttagtatatttgtaattggttttaaaaccaatacaccatactttctttctgcaaacagccatctttatacttagggaagaaaaattgttgggttctagacttttttaatataaattttgttgatatggaattaggtaagtttaagtgtctatgtgcatatgttttttatataagttttttctattcagtttcactgatccaactggcagtgggtaaatatggcataagttaataacacttttccccaaaatggtgctttggatttgaaaagggtctgatggggagaaggagaacgtatcatcctagcttcctctcttaataaacctagaaaaacgggtagtaaactgtggatagtcaggaaaacacccagcaagggacacagctgtcaggaaatgaatcttccccccaacccccaccatgcagatggatagacagaatctttcctgactagtcattaggatcaggggcctctgttggatttgtgtttcttgaagaatagctggcagagtggtataaaagacacgaatatctcctggtctataaggatactctgatttggggtttgcatttttcatggtttttatttcctgttccccctggagttttccattagtgagtttttgtgcaaggatcttatttgtgatgccttccctcccctagaaagattttgtgcaatatattaaatggggacagaattctaaatggataaaacaatggctggttctagccctgagtgacagtcttaaggctagatccttcccatagtatcatctgtcctctggaatgactctcctgtccctaaaggggttaagagagagatcacctagaaatccctctggacacttgtgggttctttagggtttgagtttcttcttccccttgagcttcagagaggagagttggcatggttaaatctgaatggttacctcactgctgaaaacccagaggggcgtggcacactcgcttgtgtggaaaagcctctaaatgcatcccttcctttctttcctgcttcctttgccttacaattgaagcagcccgtggtaccatcacagtatgcagagacttcctcacctttcatatctagggaccacccccgatgcattggtgagggtgggcacttataaatgcctgctattgttaagccattccagcctcttcctctgaatagaccagacgccctttcacttagttcagtgccagtccttttgccttcccaaccctgctgttaggcctgctgttccctttgctcttgattaggagagatggaaggagatgagctcccataactgaattggcctttggttcatgttttctccccatatgtatatatgccatatgtgaatatgccatatatatgtgccaacaaatctatctacgttgttcttttcaaattagcacgcagataggaattttgagtttcttcttcttttagtaactagtataacaagcactggtatttttgtacaaaaaagaaaaacaaaagattgactattgtggtctgcatgacataaacaaacaaatggtgatatcaaagcaacgtataccccagtccagtgtgtgttgccataatttgcaattcagcttaacagtgcacccaatctatatttgcattttgatattatttaagctctatgtacaaggttttgcatgtatttatatggttcttagggaaaaaaaatgctataaactgcaaatctgaaattcaaatgtgttgttccactgagaccgacgtacccgtcgactcttaaagggactatctctcggacccatagctgtctgctacttgaacctatag

SEQ ID NO: 314847 - DNA, 3715 bp, Homo sapiens
agaaaatggaaaggatatggatgaattgtgtaaacttagatccttctcccttttggcccaaaagaacccttgatttagttccagaatccaaccagtttctttgttaaaagggtccttttgaagcaattaagtgctggtaagaatatttctctgttgttgccaggttaccttctgcttttaaattgccatcttgtaaagtgtatgtggttcttaagtgccagggagatcagccttgcccatgaaggttgcatatgtgtggtatacagtttttacctgaaagcctgagctttctcttattcctaaagtggtggcaaaagaatgaactgggtatgaccctgcccccttactgggcttggatattgaggaccagacgctgccaaatctaggacaagacagaccatcaaagcagacttttgtgggctcctctttggggtgaccactgctttcaaagccatctgccaaggctctccagggcaggacctgactggtggggaatgagtgttcagaagccttgggagaggccaaagagccattctagcatgatctgagaaaaccttcctgcagaggccagaaaccttgagcttaggtgcctggggaccagcttcgacattctctccagtttctgattctaatttttgccacgtgtcacaacttttccagtctctgagaaggtcccagcctttctcaaatattctgattttgaaaatatgtatccaaagtgggaggcccctgtgacattttgccaacttaaacgagaaaaagaccccccgcacccggcacactcccccttcctccagccccgcttcagccacatgctccagctgctgcccagtaaagccctgtgcctttttttcccctgaatactgcccaaagcatccccttcccatctgcctctcaggagttggggactttgctaggagattttttaagtgttccttactgggacaacgtggagccacgtttgcaggagctccatttgtatccctgctggtgttgacttctgtgtaggggccagttcatgtccctgactctcacctcccattagataaatgaagcccacccccctttctagagtgatgagagtcaagaagaggggatgtatgaacggccaaattcccatgtgagaggaagatgacctgatccacctagccttttcttctggatctgtcctccctcacccctttcacctgagctgtccacagtaggaaacataaagaaacaatgtcccctacatatccccatgactacataatccatcatcgtaggaaataggaaagcaaatttgattttggttttgtaaaacgtacatgcttcaataattctttttttgtgtcttaaatactcataggggaaaaaaacagctcacccaaggtgttaggtttcacatatatattcatcaactattttagaagatttaattctatcaaatcttgtattacctcagatcattttaaatagcaagccaataacgagctttgaaggctattttaccattcctgttcacaaaaggttctcatggtgcctgacaggttacccttgagggcttgtgtctactttttaaaagtcaatggttttttttcttgtgttctagtttccataataggagagaaaatatagaaatatatgcaaaaattatagttttctttagatcagaaactgatatttttgggtcagccatatgtattttgtttaaaggatttaaaataaagtgccgtcatgtagccctgtggaagggagcacataaccagctgtttggcatgacaggtgacttagtatatttgtaattggttttaaaaccaatacaccatactttctttctgcaaacagccatctttatacttagggaagaaaaattgttgggttctagacttttttaatataaattttgttgatatggaattaggtaagtttaagtgtctatgtgcatatgttttttatataagttttttctattcagtttcactgatccaactggcagtgggtaaatatggcataagttaataacacttttccccaaaatggtgctttggatttgaaaagggtctgatggggagaaggagaacgtatcatcctagcttcctctcttaataaacctagaaaaacgggtagtaaactgtggatagtcaggaaaacacccagcaagggacacagctgtcaggaaatgaatcttccccccaacccccaccatgcagatggatagacagaatctttcctgactagtcattaggatcaggggcctctgttggatttgtgtttcttgaagaatagctggcagagtggtataaaagacacgaatatctcctggtctataaggatactctgatttggggtttgcatttttcatggtttttatttcctgttccccctggagttttccattagtgagtttttgtgcaaggatcttatttgtgatgccttccctcccctagaaagattttgtgcaatatattaaatggggacagaattctaaatggataaaacaatggctggttctagccctgagtgacagtcttaaggctagatccttcccatagtatcatctgtcctctggaatgactctcctgtccctaaaggggttaagagagagatcacctagaaatccctctggacacttgtgggttctttagggtttgagtttcttcttccccttgagcttcagagaggagagttggcatggttaaatctgaatggttacctcactgctgaaaacccagaggggcgtggcacactcgcttgtgtggaaaagcctctaaatgcatcccttcctttctttcctgcttcctttgccttacaattgaagcagcccgtggtaccatcacagtatgcagagacttcctcacctttcatatctagggaccacccccgatgcattggtgagggtgggcacttataaatgcctgctattgttaagccattccagcctcttcctctgaatagaccagacgccctttcacttagttcagtgccagtccttttgccttcccaaccctgctgttaggcctgctgttccctttgctcttgattaggagagatggaaggagatgagctcccataactgaattggcctttggttcatgttttctccccatatgtatatatgccatatgtgaatatgccatatatatgtgccaacaaatctatctacgttgttcttttcaaattagcacgcagataggaattttgagtttcttcttcttttagtaactagtataacaagcactggtatttttgtacaaaaaagaaaaacaaaagattgactattgtggtctgcatgacataaacaaacaaatggtgatatcaaagcaacgtataccccagtccagtgtgtgttgccataatttgcaattcagcttaacagtgcacccaatctatatttgcattttgatattatttaagctctatgtacaaggttttgcatgtatttatatggttcttagggaaaaaatgctcaacatcgctgattataagagaaatgcaaatcaaaactaccatgagataccacctcacaccagtcagaatggccatcattaataaatccacaaataacaagtgctggaggggctgtggagaaaagggaaccctcctgcactgttggtgggaatgtaaactggtacagccactatggagaacagtttggagataccttagaaatctatacatagaacttccatatgaccctgcaatcccactcttgggcatctatccggacaagctc

SEQ ID NO: 314848 - DNA, 5060 bp, Homo sapiens
  misc_feature (4961)..(4961): n is a, c, g, or t
tggtgagcaagagtctggcccgagttagctagagctgttgccatgacaagcattttcttaagaaagctctgctgttgagatcgtccaaagctgggggctgggagggggggcacgaacttcgtggggcaccatccctccgaagagagcaagatcagagacacccgcccagctctcctgcaccctttttctttcaggaacctgagaggtccttcccattggaggggcagggggaggagacccagcccactccccggccttagccagaaaggcaagagagcaaagccagcgtctctagcttggttgccacactggggagactggtgggtggtcaccccaccctaccctcatccatggaaacccggagggagagtcccgcctgaagaaacctggatctttgctagaaagagagagatccagttgtcatcggtatccaggaagctctcctcttcctcctcctgacgtctaccactacagttgctggttgttgctaaggttgctgccatggtaacatgcacatcctgtttacaccttcatctgggcaagttggtctaagctaggaacctacctaccctggacaaccactatcatcaccacctggggacaccaatcatcgtgacacggagtccaccttccactcagttcccccatcctcttcctcctctcgctgccagacttcatagagaagaaaggatctagacttcggacggctactcgggagcttattgcacaagatatattcaatctattccctcactgggcccccagagaagcaagaagtaggaagaagttgagacagggaggcaggagacactggtcagttgaagggaaacgctacatcttctctggttgaggggcttggtaacagcaggcaaaatgacgaacccatcagaccgtgtcttgcctgccaactcgatggccgagagccgtgaaggggactttggctgcacagtaatggaactgaggaagctcatggagctgcgttcgagggatgcactgacccagattaatgtccactatggaggtgtacagaatctctgcagtagactgaaaacctcccctgtggaaggtctgtctgggaaccctgcagatctggagaaacgtaggcaggtgtttggacacaacgtgatccccccccaaaaagcccaagactttcttagaattagtgtgggaagctcttcaagatgtcacgctcatcatcctggagattgcagccatcatctccctggtcctgtccttttatcgccctgctggtgaagaaaatgaactgtgtggtcaagtcgcaactaccccagaagatgaaaatgaggcacaagctggctggattgagggggcagccatccttttctcagtgatcatcgtggtgttagtgactgcctttaatgattggagcaaagagaagcaattccgggggctgcagtgccgcattgaacaggagcaaaagttctccatcatccgaaacggtcaactcatccagctccctgtggctgagattgtggttggtgatattgcccaagtcaaatacggtgatctgctgcctgcagatggaatcctgatccaagggaatgatctgaagattgatgagagctctctgacaggggaatctgaccatgtcaagaagtccctggacaaagaccccatgttgctctcagggacccatgtcatggaaggttctggccggatggtggtgacagctgttggtgtcaactctcagactggaatcatccttactctcttgggggtcaatgaggatgacgaaggggagaaaaagaagaaaggtaaaaaacaaggagtccctgaaaatcgcaacaaagcaaagacccaagacggagtggccctggaaatccagccactcaacagccaggagggaatcgacaatgaggaaaaggacaagaaggcagtcaaggtgcctaaaaaggagaagtcagtgctgcagggcaagctgactcgcctggctgttcagattgggaaagccggtctgctcatgtctgctctcacggttttcatcctgattctatactttgtgattgacaactttgtgataaatcgcagaccatggctccctgagtgtactcccatctacatccagtactttgtcaagttcttcatcatcggcatcactgtactggtggtggctgtgccagaggggctgcctctggctgtcaccatctcactggcctactctgtgaagaaaatgatgaaagacaataacctagtacggcacttggatgcttgtgagaccatgggcaacgccaccgccatctgctctgataagacaggcacgttgaccatgaaccgcatgactgtggtacaagcttatattgggggcatccattaccgtcaaatcccaagccctgatgtcttcctgcccaaagtcctggacctcattgtcaatggcatttctatcaacagtgcttatacctccaagattctgcctccagagaaggagggaggcctgcctcggcaggtgggcaacaagaccgagtgtgctctgctaggctttgtcacagatctgaagcaggattatcaggctgtgcgtaatgaagtgcccgaggagaagctctacaaggtgtacacctttaactcagtgcgcaagtcaatgagcaccgtcatcaggaatcccaacggtggcttccgtatgtacagcaagggcgcctctgagatcatcttgcgcaagtgtaatcgaatcctggaccggaaaggggaagcagtgccattcaagaataaagacagagatgatatggtacgcactgtcatcgagcccatggcctgtgatggactccggactatctgcatagcttaccgggacttcgatgacacagagccctcttgggacaatgagaatgagatcctcaccgaactgacctgtatcgcggtggtgggcattgaggaccctgtgcgcccagaggtgccagatgctattgccaaatgcaaacaagctggcattactgtcagaatggtgacaggtgacaacatcaacacagcccgggccattgccaccaaatgtggcattctgacacctggggatgacttcctgtgcttagaaggcaaagaattcaaccggctcatccgcaacgagaaaggcgaggtagagcaagaaaagctggacaagatctggcctaagcttcgggtcctggcgcgatcttctcccactgacaagcacaccctggtgaaaggcataattgacagcactgttggggaacaccggcaggtcgtggctgtcactggtgatggcacaaatgacgggcctgctctgaagaaagcggatgttggttttgccatgggcatcgcaggcacagatgtagcaaaggaggcttcagacatcatcctaacagatgacaacttcaccagcattgtgaaggcagtgatgtggggacgaaatgtctatgacagcatctccaagttcctgcagttccagctcactgtcaatgtggtggccgtgattgtagccttcactggagcctgtatcactcaggattccccattgaaagctgtgcagatgttgtgggttaatctgatcatggacacttttgcttcattggccctggccacagagccccctacggaatctctgttgaagcggcgcccctatggccgaaataagcctctgatctcacgcactatgatgaagaacatcttgggccatgcattctatcagctcattgtcatctttatccttgtctttgcgggtgagaaattctttgatattgatagtgggaggaaggcacctctacattcaccacccagccagcactataccattgtttttaacaccttcgtgctgatgcagctcttcaatgaaatcaactcccgaaagatccatggagagaagaacgtcttttcaggcatctaccgcaacattatcttctgctctgtagtcttgggcacattcatctgccagattttcatcgtggaatttgggggtaaacccttcagttgtacaagcctcagcctgtctcagtggctgtggtgtctcttcattgggattggagaacttctgtggggccagttcatctccgcaatacctacccgatccctgaagttcctgaaggaggctgggcatggcaccaccaaagaggagatcaccaaggatgccgagggactggatgagattgaccatgctgagatggagctgcgccgaggccagatcctctggttccggggcctgaaccgtatccagactcagatcaaagtggtcaaagcgttccatagttccctccacgaaagcattcagaaaccctacaaccaaaagtccatccacagcttcatgacccaccctgaattcgccatagaggaggagttgccacgaacaccactcctggatgaggaagaggaggaaaatcctgacaaggcttctaagtttgggactagggtgctcctgttggatggtgaggtcactccatatgccaatacaaacaacaatgcggtggattgcaaccaagtgcagctcccccagtcggacagctctctacagagcctagagacatcagtttgaattttctttctctgactctcatccctattttacctatttccattttcgtctgtcccatctatgaggtgatgatgggacttttcatcgtcacgtcagctgctgtgttaacagcagtgtgtgtgaagtgaacctctacctgaccatgaagaggcaagagcacagacttacaaggatttcaacttaagcttgacttggggtttgtagcgggacccagtcaaaccccattcaggtcatggtagaatctactccttggtagtcacttgtcatttttaaagaaatgatgacaatcctcttggcatcaccccaccccacattctccccgatgttcctctcctgaattctggattttgtcctacaagtctgtgccatttataagctaagttgagggttcagagggagacaaatatccccaagtgaaatatgttgcggtagagatggaatgtataaaatccgccagtagtgtgaatgnttttcaatttttcccactttgaaaacttacacctaaaggcctgtaggcctctaactctttctgccctttcattcaaacctctccaaagttctttgtctt

SEQ ID NO: 314849 - DNA, 2912 bp, Homo sapiens
agaaaatggaaaggatatggatgaattgtgtaaacttagatccttctcccttttggcccaaaagaacccttgatttagttccagaatccaaccagtttctttgttaaaagggtccttttgaagcaattaagtgctggtaagaatatttctctgttgttgccaggttaccttctgcttttaaattgccatcttgtaaagtgtatgtggttcttaagtgccagggagatcagccttgcccatgaaggttgcatatgtgtggtatacagtttttacctgaaagcctgagctttctcttattcctaaagtggtggcaaaagaatgaactgggtatgaccctgcccccttactgggcttggatattgaggaccagacgctgccaaatctaggacaagacagaccatcaaagcagacttttgtgggctcctctttggggtgaccactgctttcaaagccatctgccaaggctctccagggcaggacctgactggtggggaatgagtgttcagaagccttgggagaggccaaagagccattctagcatgatctgagaaaaccttcctgcagaggccagaaaccttgagcttaggtgcctggggaccagcttcgacattctctccagtttctgattctaatttttgccacgtgtcacaacttttccagtctctgagaaggtcccagcctttctcaaatattctgattttgaaaatatgtatccaaagtgggaggcccctgtgacattttgccaacttaaacgagaaaaagaccccccgcacccggcacactcccccttcctccagccccgcttcagccacatgctccagctgctgcccagtaaagccctgtgcctttttttcccctgaatactgcccaaagcatccccttcccatctgcctctcaggagttggggactttgctaggagattttttaagtgttccttactgggacaacgtggagccacgtttgcaggagctccatttgtatccctgctggtgttgacttctgtgtaggggccagttcatgtccctgactctcacctcccattagataaatgaagcccacccccctttctagagtgatgagagtcaagaagaggggatgtatgaacggccaaattcccatgtgagaggaagatgacctgatccacctagccttttcttctggatctgtcctccctcacccctttcacctgagctgtccacagtaggaaacataaagaaacaatgtcccctacatatccccatgactacataatccatcatcgtaggaaataggaaagcaaatttgattttggttttgtaaaacgtacatgcttcaataattctttttttgtgtcttaaatactcataggggaaaaaaacagctcacccaaggtgttaggtttcacatatatattcatcaactattttagaagatttaattctatcaaatcttgtattacctcagatcattttaaatagcaagccaataacgagctttgaaggctattttaccattcctgttcacaaaaggttctcatggtgcctgacaggttacccttgagggcttgtgtctactttttaaaagtcaatggttttttttcttgtgttctagtttccataataggagagaaaatatagaaatatatgcaaaaattatagttttctttagatcagaaactgatatttttgggtcagccatatgtattttgtttaaaggatttaaaataaagtgccgtcatgtagccctgtggaagggagcacataaccagctgtttggcatgacaggtgacttagtatatttgtaattggttttaaaaccaatacaccatactttctttctgcaaacagccatctttatacttagggaagaaaaattgttgggttctagacttttttaatataaattttgttgatatggaattaggtaagtttaagtgtctatgtgcatatgttttttatataagttttttctattcagtttcactgatccaactggcagtgggtaaatatggcataagttaataacacttttccccaaaatggtgctttggatttgaaaagggtctgatggggagaaggagaacgtatcatcctatgcttcctttgccttacaattgaagcagcccgtggtaccatcacagtatgcagagacttcctcacctttcatatctagggaccacccccgatgcattggtgagggtgggcacttataaatgcctgctattgttaagccattccagcctcttcctctgaatagaccagacgccctttcacttagttcagtgccagtccttttgccttcccaaccctgctgttaggcctgctgttccctttgctcttgattaggagagatggaaggagatgagctcccataactgaattggcctttggttcatgttttctccccatatgtatatatgccatatgtgaatatgccatatatatgtgccaacaaatctatctacgttgttcttttcaaattagcacgcagataggaattttgagtttcttcttcttttagtaactagtataacaagcactggtatttttgtacaaaaaagaaaaacaaaagattgactattgtggtctgcatgacataaacaaacaaatggtgatatcaaagcaacgtataccccagtccagtgtgtgttgccataatttgcaattcagcttaacagtgcacccaatctatatttgcattttgatattatttaagctctatgtacaaggttttgcatgtatttatatggttcttagggaaaaaaaatgctataaactgcaaatctgaaattcaaatgtgttgttccactgagaccagaagaagaagaggagttttaaaagggataatttgttggagccaataaagctttttgctgatgaacagaaaccaatactgctgtgcactgagaataaaaactcatgcccacttgtaa

SEQ ID NO: 314850 - DNA, 1152 bp, Homo sapiens
cagagtccaaacagtgctcagagtccaaacagtgcccagagtccaaacagtgctcagagtccaaacagtgctcagagtccaaacagtgcccatagtccaaacagtgctcagagtccaaacagtgctcagagtccaaacagtgcccagagtccaaacagtgctcagagtccaaacagtgcccttccccttgagcttcagagaggagagttggcatggttaaatctgaatggttacctcactgctgaaaacccagaggggcgtggcacactcgcttgtgtggaaaagcctctaaatgcatcccttcctttctttcctgcttcctttgccttacaattgaagcagcccgtggtaccatcacagtatgcagagacttcctcacctttcatatctagggaccacccccgatgcattggtgagggtgggcacttataaatgcctgctattgttaagccattccagcctcttcctctgaatagaccagacgccctttcacttagttcagtgccagtccttttgccttcccaaccctgctgttaggcctgctgttccctttgctcttgattaggagagatggaaggagatgagctcccataactgaattggcctttggttcatgttttctccccatatgtatatatgccatatgtgaatatgccatatatatgtgccaacaaatctatctacgttgttcttttcaaattagcacgcagataggaattttgagtttcttcttcttttagtaactagtataacaagcactggtatttttgtacaaaaaagaaaaacaaaagattgactattgtggtctgcatgacataaacaaacaaatggtgatatcaaagcaacgtataccccagtccagtgtgtgttgccataatttgcaattcagcttaacagtgcacccaatctatatttgcattttgatattatttaagctctatgtacaaggttttgcatgtatttatatggttcttagggaaaaaaaatgctataaactgcaaatctgaaattcaaatgtgttgttccactgagaccagaagaagaagaggagttttaaaagggataatttgttggagccaataaagctttttgctgatgaacagaaaccaatactgctgtgcactgagaataaaaactcatgcccacttgtaa

SEQ ID NO: 314851 - DNA, 5238 bp, Homo sapiens
  misc_feature (5139)..(5139): n is a, c, g, or t
tggtgagcaagagtctggcccgagttagctagagctgttgccatgacaagcattttcttaagaaagctctgctgttgagatcgtccaaagctgggggctgggagggggggcacgaacttcgtggggcaccatccctccgaagagagcaagatcagagacacccgcccagctctcctgcaccctttttctttcaggaacctgagaggtccttcccattggaggggcagggggaggagacccagcccactccccggccttagccagaaaggcaagagagcaaagccagcgtctctagcttggttgccacactggggagactggtgggtggtcaccccaccctaccctcatccatggaaacccggagggagagtcccgcctgaagaaacctggatctttgctagaaagagagagatccagttgtcatcggtatccaggaagctctcctcttcctcctcctgacgtctaccactacagttgctggttgttgctaaggttgctgccatggtaacatgcacatcctgtttacaccttcatctgggcaagttggtctaagctaggaacctacctaccctggacaaccactatcatcaccacctggggacaccaatcatcgtgacacggagtccaccttccactcagttcccccatcctcttcctcctctcgctgccagacttcatagagaagaaaggatctagacttcggacggctactcgggagcttattgcacaagatatattcaatctattccctcactgggcccccagagaagcaagaagtaggaagaagttgagacagggaggcaggagacactggtcagttgaagggaaacgctacatcttctctggttgaggggcttggtaacagcaggcaaaatgacgaacccatcagaccgtgtcttgcctgccaactcgatggccgagagccgtgaaggggactttggctgcacagtaatggaactgaggaagctcatggagctgcgttcgagggatgcactgacccagattaatgtccactatggaggtgtacagaatctctgcagtagactgaaaacctcccctgtggaaggtctgtctgggaaccctgcagatctggagaaacgtaggcaggtgtttggacacaacgtgatccccccccaaaaagcccaagactttcttagaattagtgtgggaagctcttcaagatgtcacgctcatcatcctggagattgcagccatcatctccctggtcctgtccttttatcgccctgctggtgaagaaaatgaactgtgtggtcaagtcgcaactaccccagaagatgaaaatgaggcacaagctggctggattgagggggcagccatccttttctcagtgatcatcgtggtgttagtgactgcctttaatgattggagcaaagagaagcaattccgggggctgcagtgccgcattgaacaggagcaaaagttctccatcatccgaaacggtcaactcatccagctccctgtggctgagattgtggttggtgatattgcccaagtcaaatacggtgatctgctgcctgcagatggaatcctgatccaagggaatgatctgaagattgatgagagctctctgacaggggaatctgaccatgtcaagaagtccctggacaaagaccccatgttgctctcagggacccatgtcatggaaggttctggccggatggtggtgacagctgttggtgtcaactctcagactggaatcatccttactctcttgggggtcaatgaggatgacgaaggggagaaaaagaagaaaggtaaaaaacaaggagtccctgaaaatcgcaacaaagcaaagacccaagacggagtggccctggaaatccagccactcaacagccaggagggaatcgacaatgaggaaaaggacaagaaggcagtcaaggtgcctaaaaaggagaagtcagtgctgcagggcaagctgactcgcctggctgttcagattgggaaagccggtctgctcatgtctgctctcacggttttcatcctgattctatactttgtgattgacaactttgtgataaatcgcagaccatggctccctgagtgtactcccatctacatccagtactttgtcaagttcttcatcatcggcatcactgtactggtggtggctgtgccagaggggctgcctctggctgtcaccatctcactggcctactctgtgaagaaaatgatgaaagacaataacctagtacggcacttggatgcttgtgagaccatgggcaacgccaccgccatctgctctgataagacaggcacgttgaccatgaaccgcatgactgtggtacaagcttatattgggggcatccattaccgtcaaatcccaagccctgatgtcttcctgcccaaagtcctggacctcattgtcaatggcatttctatcaacagtgcttatacctccaagattctgcctccagagaaggagggaggcctgcctcggcaggtgggcaacaagaccgagtgtgctctgctaggctttgtcacagatctgaagcaggattatcaggctgtgcgtaatgaagtgcccgaggagaagctctacaaggtgtacacctttaactcagtgcgcaagtcaatgagcaccgtcatcaggaatcccaacggtggcttccgtatgtacagcaagggcgcctctgagatcatcttgcgcaagtgtaatcgaatcctggaccggaaaggggaagcagtgccattcaagaataaagacagagatgatatggtacgcactgtcatcgagcccatggcctgtgatggactccggactatctgcatagcttaccgggacttcgatgacacagagccctcttgggacaatgagaatgagatcctcaccgaactgacctgtatcgcggtggtgggcattgaggaccctgtgcgcccagaggtgccagatgctattgccaaatgcaaacaagctggcattactgtcagaatggtgacaggtgacaacatcaacacagcccgggccattgccaccaaatgtggcattctgacacctggggatgacttcctgtgcttagaaggcaaagaattcaaccggctcatccgcaacgagaaaggcgaggtagagcaagaaaagctggacaagatctggcctaagcttcgggtcctggcgcgatcttctcccactgacaagcacaccctggtgaaaggcataattgacagcactgttggggaacaccggcaggtcgtggctgtcactggtgatggcacaaatgacgggcctgctctgaagaaagcggatgttggttttgccatgggcatcgcaggcacagatgtagcaaaggaggcttcagacatcatcctaacagatgacaacttcaccagcattgtgaaggcagtgatgtggggacgaaatgtctatgacagcatctccaagttcctgcagttccagctcactgtcaatgtggtggccgtgattgtagccttcactggagcctgtatcactcaggattccccattgaaagctgtgcagatgttgtgggttaatctgatcatggacacttttgcttcattggccctggccacagagccccctacggaatctctgttgaagcggcgcccctatggccgaaataagcctctgatctcacgcactatgatgaagaacatcttgggccatgcattctatcagctcattgtcatctttatccttgtctttgcgggtgagaaattctttgatattgatagtgggaggaaggcacctctacattcaccacccagccagcactataccattgtttttaacaccttcgtgctgatgcagctcttcaatgaaatcaactcccgaaagatccatggagagaagaacgtcttttcaggcatctaccgcaacattatcttctgctctgtagtcttgggcacattcatctgccagattttcatcgtggaatttgggggtaaacccttcagttgtacaagcctcagcctgtctcagtggctgtggtgtctcttcattgggattggagaacttctgtggggccagttcatctccgcaatacctacccgatccctgaagttcctgaaggaggctgggcatggcaccaccaaagaggagatcaccaaggatgccgagggactggatgagattgaccatgctgagatggagctgcgccgaggccagatcctctggttccggggcctgaaccgtatccagactcagatcgacgtaattaacacattccagacgggagcctcttttaagggagtcctaaggcgacagaacatgggtcaacaccttgatgtaaaacttgttcctagttcatcctatgtagcagttgcaccagtcaaatcttcccccaccacttctgttcctgctgtttcatctcctcctatgggcaatcaaagtggtcaaagcgttccatagttccctccacgaaagcattcagaaaccctacaaccaaaagtccatccacagcttcatgacccaccctgaattcgccatagaggaggagttgccacgaacaccactcctggatgaggaagaggaggaaaatcctgacaaggcttctaagtttgggactagggtgctcctgttggatggtgaggtcactccatatgccaatacaaacaacaatgcggtggattgcaaccaagtgcagctcccccagtcggacagctctctacagagcctagagacatcagtttgaattttctttctctgactctcatccctattttacctatttccattttcgtctgtcccatctatgaggtgatgatgggacttttcatcgtcacgtcagctgctgtgttaacagcagtgtgtgtgaagtgaacctctacctgaccatgaagaggcaagagcacagacttacaaggatttcaacttaagcttgacttggggtttgtagcgggacccagtcaaaccccattcaggtcatggtagaatctactccttggtagtcacttgtcatttttaaagaaatgatgacaatcctcttggcatcaccccaccccacattctccccgatgttcctctcctgaattctggattttgtcctacaagtctgtgccatttataagctaagttgagggttcagagggagacaaatatccccaagtgaaatatgttgcggtagagatggaatgtataaaatccgccagtagtgtgaatgnttttcaatttttcccactttgaaaacttacacctaaaggcctgtaggcctctaactctttctgccctttcattcaaacctctccaaagttctttgtctt

SEQ ID NO: 314852 - DNA, 817 bp, Homo sapiens
agctcggtaccccaggtagactaactatgcagagacttcctcacctttcatatctagggaccacccccgatgcattggtgagggtgggcacttataaatgcctgctattgttaagccattccagcctcttcctctgaatagaccagacgccctttcacttagttcagtgccagtccttttgccttcccaaccctgctgttaggcctgctgttccctttgctcttgattaggagagatggaaggagatgagctcccataactgaattggcctttggttcatgttttctccccatatgtatatatgccatatgtgaatatgccatatatatgtgccaacaaatctatctacgttgttcttttcaaattagcacgcagataggaattttgagtttcttcttcttttagtaactagtataacaagcactggtatttttgtacaaaaaagaaaaacaaaagattgactattgtggtctgcatgacataaacaaacaaatggtgatatcaaagcaacgtataccccagtccagtgtgtgttgccataatttgcaattcagcttaacagtgcacccaatctatatttgcattttgatattatttaagctctatgtacaaggttttgcatgtatttatatggttcttagggaaaaaaaatgctataaactgcaaatctgaaattcaaatgtgttgttccactgagaccagaagaagaagaggagttttaaaagggataatttgttggagccaataaagctttttgctgatgaacagaaaccaatactgctgtgcactgagaataaaaactcatgcccacttgtaa

SEQ ID NO: 314853 - DNA, 822 bp, Homo sapiens
  misc_feature (16)..(16): n is a, c, g, or t
gtgactctcgaggatnccaggcaaagctcttatgcagagacttcctcacctttcatatctagggaccacccccgatgcattggtgagggtgggcacttataaatgcctgctattgttaagccattccagcctcttcctctgaatagaccagacgccctttcacttagttcagtgccagtccttttgccttcccaaccctgctgttaggcctgctgttccctttgctcttgattaggagagatggaaggagatgagctcccataactgaattggcctttggttcatgttttctccccatatgtatatatgccatatgtgaatatgccatatatatgtgccaacaaatctatctacgttgttcttttcaaattagcacgcagataggaattttgagtttcttcttcttttagtaactagtataacaagcactggtatttttgtacaaaaaagaaaaacaaaagattgactattgtggtctgcatgacataaacaaacaaatggtgatatcaaagcaacgtataccccagtccagtgtgtgttgccataatttgcaattcagcttaacagtgcacccaatctatatttgcattttgatattatttaagctctatgtacaaggttttgcatgtatttatatggttcttagggaaaaaaaatgctataaactgcaaatctgaaattcaaatgtgttgttccactgagaccagaagaagaagaggagttttaaaagggataatttgttggagccaataaagctttttgctgatgaacagaaaccaatactgctgtgcactgagaataaaaactcatgcccacttgtaa

SEQ ID NO: 314854 - DNA, 3276 bp, Homo sapiens
agaaaatggaaaggatatggatgaattgtgtaaacttagatccttctcccttttggcccaaaagaacccttgatttagttccagaatccaaccagtttctttgttaaaagggtccttttgaagcaattaagtgctggtaagaatatttctctgttgttgccaggttaccttctgcttttaaattgccatcttgtaaagtgtatgtggttcttaagtgccagggagatcagccttgcccatgaaggttgcatatgtgtggtatacagtttttacctgaaagcctgagctttctcttattcctaaagtggtggcaaaagaatgaactgggtatgaccctgcccccttactgggcttggatattgaggaccagacgctgccaaatctaggacaagacagaccatcaaagcagacttttgtgggctcctctttggggtgaccactgctttcaaagccatctgccaaggctctccagggcaggacctgactggtggggaatgagtgttcagaagccttgggagaggccaaagagccattctagcatgatctgagaaaaccttcctgcagaggccagaaaccttgagcttaggtgcctggggaccagcttcgacattctctccagtttctgattctaatttttgccacgtgtcacaacttttccagtctctgagaaggtcccagcctttctcaaatattctgattttgaaaatatgtatccaaagtgggaggcccctgtgacattttgccaacttaaacgagaaaaagaccccccgcacccggcacactcccccttcctccagccccgcttcagccacatgctccagctgctgcccagtaaagccctgtgcctttttttcccctgaatactgcccaaagcatccccttcccatctgcctctcaggagttggggactttgctaggagattttttaagtgttccttactgggacaacgtggagccacgtttgcaggagctccatttgtatccctgctggtgttgacttctgtgtaggggccagttcatgtccctgactctcacctcccattagataaatgaagcccacccccctttctagagtgatgagagtcaagaagaggggatgtatgaacggccaaattcccatgtgagaggaagatgacctgatccacctagccttttcttctggatctgtcctccctcacccctttcacctgagctgtccacagtaggaaacataaagaaacaatgtcccctacatatccccatgactacataatccatcatcgtaggaaataggaaagcaaatttgattttggttttgtaaaacgtacatgcttcaataattctttttttgtgtcttaaatactcataggggaaaaaaacagctcacccaaggtgttaggtttcacatatatattcatcaactattttagaagatttaattctatcaaatcttgtattacctcagatcattttaaatagcaagccaataacgagctttgaaggctattttaccattcctgttcacaaaaggttctcatggtgcctgacaggttacccttgagggcttgtgtctactttttaaaagtcaatggttttttttcttgtgttctagtttccataataggagagaaaatatagaaatatatgcaaaaattatagttttctttagatcagaaactgatatttttgggtcagccatatgtattttgtttaaaggatttaaaataaagtgccgtcatgtagccctgtggaagggagcacataaccagctgtttggcatgacaggtgacttagtatatttgtaattggttttaaaaccaatacaccatactttctttctgcaaacagccatctttatacttagggaagaaaaattgttgggttctagacttttttaatataaattttgttgatatggaattaggtaagtttaagtgtctatgtgcatatgttttttatataagttttttctattcagtttcactgatccaactggcagtgggtaaatatggcataagttaataacacttttccccaaaatggtgctttggatttgaaaagggtctgatggggagaaggagaacgtatcatcctagcttcctctcttaataaacctagaaaaacgggtagtaaactgtggatagtcaggaaaacacccagcaagggacacagctgtcaggaaatgaatcttccccccaacccccaccatgcagatggatagacagaatctttcctgactagtcattaggatcaggggcctctgttggatttgtgtttcttgaagaatagctggcagagtggtataaaagacacgaatatctcctggtctataaggatactctgatttggggtttgcatttttcatggtttttatttcctgttccccctggagttttccattagtgagtttttgtgcaaggatcttatttgtgatgccttccctcccctagaaagattttgtgcaatatattaaatggggacagaattctaaatggataaaacaatggctggttctagccctgagtgacagtcttaaggctagatccttcccatagtatcatctgtcctctggaatgactctcctgtccctaaaggggttaagagagagatcacctagaaatccctctggacacttgtgggttctttagggtttgagtttcttcttccccttgagcttcagagaggagagttggcatggttaaatctgaatggttacctcactgctgaaaacccagaggggcgtggcacactcgcttgtgtggaaaagcctctaaatgcatcccttcctttctttcctgcttcctttgccttacaattgaagcagcccgtggtaccatcacagtatgcagagacttcctcacctttcatatctagggaccacccccgatgcattggtgagggtgggcacttataaatgcctgctattgttaagccattccagcctcttcctctgaatagaccagacgccctttcacttagttcagtgccagtccttttgccttcccaaccctgctgttaggtctacctggccaggtagacctaactggtccacaagagaaaatgagagactcgatttggctgccaggaacacctgggcctaggcaagaacacaagaggtttctgggggtggggaggaaataggtctcgctgaaggtgacagatcccttggggggcgtccagctgtctggatcactgtccagggactgtggccagcccaagatacctccgaggtgagtcctagatcactaggagcagcagtctgtcggtgggatgcgatggatggttaggtctacctgg

SEQ ID NO: 314855 - DNA, 631 bp, Homo sapiens
ctaatcaagagcaaagggaacagcaggcctaacagcagggttgggagagatggaaggagatgagctcccataactgaattggcctttggttcatgttttctccccatatgtatatatgccatatgtgaatatgccatatatatgtgccaacaaatctatctacgttgttcttttcaaattagcacgcagataggaattttgagtttcttcttcttttagtaactagtataacaagcactggtatttttgtacaaaaaagaaaaacaaaagattgactattgtggtctgcatgacataaacaaacaaatggtgatatcaaagcaacgtataccccagtccagtgtgtgttgccataatttgcaattcagcttaacagtgcacccaatctatatttgcattttgatattatttaagctctatgtacaaggttttgcatgtatttatatggttcttagggaaaaaaaatgctataaactgcaaatctgaaattcaaatgtgttgttccactgagaccagaagaagaagaggagttttaaaagggataatttgttggagccaataaagctttttgctgatgaacagaaaccaatactgctgtgcactgagaataaaaactcatgcccacttgtaa

SEQ ID NO: 314856 - DNA, 5168 bp, Homo sapiens
  misc_feature (5069)..(5069): n is a, c, g, or t
tggtgagcaagagtctggcccgagttagctagagctgttgccatgacaagcattttcttaagaaagctctgctgttgagatcgtccaaagctgggggctgggagggggggcacgaacttcgtggggcaccatccctccgaagagagcaagatcagagacacccgcccagctctcctgcaccctttttctttcaggaacctgagaggtccttcccattggaggggcagggggaggagacccagcccactccccggccttagccagaaaggcaagagagcaaagccagcgtctctagcttggttgccacactggggagactggtgggtggtcaccccaccctaccctcatccatggaaacccggagggagagtcccgcctgaagaaacctggatctttgctagaaagagagagatccagttgtcatcggtatccaggaagctctcctcttcctcctcctgacgtctaccactacagttgctggttgttgctaaggttgctgccatggtaacatgcacatcctgtttacaccttcatctgggcaagttggtctaagctaggaacctacctaccctggacaaccactatcatcaccacctggggacaccaatcatcgtgacacggagtccaccttccactcagttcccccatcctcttcctcctctcgctgccagacttcatagagaagaaaggatctagacttcggacggctactcgggagcttattgcacaagatatattcaatctattccctcactgggcccccagagaagcaagaagtaggaagaagttgagacagggaggcaggagacactggtcagttgaagggaaacgctacatcttctctggttgaggggcttggtaacagcaggcaaaatgacgaacccatcagaccgtgtcttgcctgccaactcgatggccgagagccgtgaaggggactttggctgcacagtaatggaactgaggaagctcatggagctgcgttcgagggatgcactgacccagattaatgtccactatggaggtgtacagaatctctgcagtagactgaaaacctcccctgtggaaggtctgtctgggaaccctgcagatctggagaaacgtaggcaggtgtttggacacaacgtgatccccccccaaaaagcccaagactttcttagaattagtgtgggaagctcttcaagatgtcacgctcatcatcctggagattgcagccatcatctccctggtcctgtccttttatcgccctgctggtgaagaaaatgaactgtgtggtcaagtcgcaactaccccagaagatgaaaatgaggcacaagctggctggattgagggggcagccatccttttctcagtgatcatcgtggtgttagtgactgcctttaatgattggagcaaagagaagcaattccgggggctgcagtgccgcattgaacaggagcaaaagttctccatcatccgaaacggtcaactcatccagctccctgtggctgagattgtggttggtgatattgcccaagtcaaatacggtgatctgctgcctgcagatggaatcctgatccaagggaatgatctgaagattgatgagagctctctgacaggggaatctgaccatgtcaagaagtccctggacaaagaccccatgttgctctcagggacccatgtcatggaaggttctggccggatggtggtgacagctgttggtgtcaactctcagactggaatcatccttactctcttgggggtcaatgaggatgacgaaggggagaaaaagaagaaaggtaaaaaacaaggagtccctgaaaatcgcaacaaagcaaagacccaagacggagtggccctggaaatccagccactcaacagccaggagggaatcgacaatgaggaaaaggacaagaaggcagtcaaggtgcctaaaaaggagaagtcagtgctgcagggcaagctgactcgcctggctgttcagattgggaaagccggtctgctcatgtctgctctcacggttttcatcctgattctatactttgtgattgacaactttgtgataaatcgcagaccatggctccctgagtgtactcccatctacatccagtactttgtcaagttcttcatcatcggcatcactgtactggtggtggctgtgccagaggggctgcctctggctgtcaccatctcactggcctactctgtgaagaaaatgatgaaagacaataacctagtacggcacttggatgcttgtgagaccatgggcaacgccaccgccatctgctctgataagacaggcacgttgaccatgaaccgcatgactgtggtacaagcttatattgggggcatccattaccgtcaaatcccaagccctgatgtcttcctgcccaaagtcctggacctcattgtcaatggcatttctatcaacagtgcttatacctccaagattctgcctccagagaaggagggaggcctgcctcggcaggtgggcaacaagaccgagtgtgctctgctaggctttgtcacagatctgaagcaggattatcaggctgtgcgtaatgaagtgcccgaggagaagctctacaaggtgtacacctttaactcagtgcgcaagtcaatgagcaccgtcatcaggaatcccaacggtggcttccgtatgtacagcaagggcgcctctgagatcatcttgcgcaagtgtaatcgaatcctggaccggaaaggggaagcagtgccattcaagaataaagacagagatgatatggtacgcactgtcatcgagcccatggcctgtgatggactccggactatctgcatagcttaccgggacttcgatgacacagagccctcttgggacaatgagaatgagatcctcaccgaactgacctgtatcgcggtggtgggcattgaggaccctgtgcgcccagaggtgccagatgctattgccaaatgcaaacaagctggcattactgtcagaatggtgacaggtgacaacatcaacacagcccgggccattgccaccaaatgtggcattctgacacctggggatgacttcctgtgcttagaaggcaaagaattcaaccggctcatccgcaacgagaaaggcgaggtagagcaagaaaagctggacaagatctggcctaagcttcgggtcctggcgcgatcttctcccactgacaagcacaccctggtgaaaggcataattgacagcactgttggggaacaccggcaggtcgtggctgtcactggtgatggcacaaatgacgggcctgctctgaagaaagcggatgttggttttgccatgggcatcgcaggcacagatgtagcaaaggaggcttcagacatcatcctaacagatgacaacttcaccagcattgtgaaggcagtgatgtggggacgaaatgtctatgacagcatctccaagttcctgcagttccagctcactgtcaatgtggtggccgtgattgtagccttcactggagcctgtatcactcaggattccccattgaaagctgtgcagatgttgtgggttaatctgatcatggacacttttgcttcattggccctggccacagagccccctacggaatctctgttgaagcggcgcccctatggccgaaataagcctctgatctcacgcactatgatgaagaacatcttgggccatgcattctatcagctcattgtcatctttatccttgtctttgcgggtgagaaattctttgatattgatagtgggaggaaggcacctctacattcaccacccagccagcactataccattgtttttaacaccttcgtgctgatgcagctcttcaatgaaatcaactcccgaaagatccatggagagaagaacgtcttttcaggcatctaccgcaacattatcttctgctctgtagtcttgggcacattcatctgccagattttcatcgtggaatttgggggtaaacccttcagttgtacaagcctcagcctgtctcagtggctgtggtgtctcttcattgggattggagaacttctgtggggccagttcatctccgcaatacctacccgatccctgaagttcctgaaggaggctgggcatggcaccaccaaagaggagatcaccaaggatgccgagggactggatgagattgaccatgctgagatggagctgcgccgaggccagatcctctggttccggggcctgaaccgtatccagactcagatcgacgtaattaacacattccagacgggagcctcttttaagggagtcctaaggcgacagaacatgggtcaacaccttgatgtaaaacttgttcctagttcatcctatatcaaagtggtcaaagcgttccatagttccctccacgaaagcattcagaaaccctacaaccaaaagtccatccacagcttcatgacccaccctgaattcgccatagaggaggagttgccacgaacaccactcctggatgaggaagaggaggaaaatcctgacaaggcttctaagtttgggactagggtgctcctgttggatggtgaggtcactccatatgccaatacaaacaacaatgcggtggattgcaaccaagtgcagctcccccagtcggacagctctctacagagcctagagacatcagtttgaattttctttctctgactctcatccctattttacctatttccattttcgtctgtcccatctatgaggtgatgatgggacttttcatcgtcacgtcagctgctgtgttaacagcagtgtgtgtgaagtgaacctctacctgaccatgaagaggcaagagcacagacttacaaggatttcaacttaagcttgacttggggtttgtagcgggacccagtcaaaccccattcaggtcatggtagaatctactccttggtagtcacttgtcatttttaaagaaatgatgacaatcctcttggcatcaccccaccccacattctccccgatgttcctctcctgaattctggattttgtcctacaagtctgtgccatttataagctaagttgagggttcagagggagacaaatatccccaagtgaaatatgttgcggtagagatggaatgtataaaatccgccagtagtgtgaatgnttttcaatttttcccactttgaaaacttacacctaaaggcctgtaggcctctaactctttctgccctttcattcaaacctctccaaagttctttgtctt

SEQ ID NO: 314857 - DNA, 5130 bp, Homo sapiens
  misc_feature (5031)..(5031): n is a, c, g, or t
tggtgagcaagagtctggcccgagttagctagagctgttgccatgacaagcattttcttaagaaagctctgctgttgagatcgtccaaagctgggggctgggagggggggcacgaacttcgtggggcaccatccctccgaagagagcaagatcagagacacccgcccagctctcctgcaccctttttctttcaggaacctgagaggtccttcccattggaggggcagggggaggagacccagcccactccccggccttagccagaaaggcaagagagcaaagccagcgtctctagcttggttgccacactggggagactggtgggtggtcaccccaccctaccctcatccatggaaacccggagggagagtcccgcctgaagaaacctggatctttgctagaaagagagagatccagttgtcatcggtatccaggaagctctcctcttcctcctcctgacgtctaccactacagttgctggttgttgctaaggttgctgccatggtaacatgcacatcctgtttacaccttcatctgggcaagttggtctaagctaggaacctacctaccctggacaaccactatcatcaccacctggggacaccaatcatcgtgacacggagtccaccttccactcagttcccccatcctcttcctcctctcgctgccagacttcatagagaagaaaggatctagacttcggacggctactcgggagcttattgcacaagatatattcaatctattccctcactgggcccccagagaagcaagaagtaggaagaagttgagacagggaggcaggagacactggtcagttgaagggaaacgctacatcttctctggttgaggggcttggtaacagcaggcaaaatgacgaacccatcagaccgtgtcttgcctgccaactcgatggccgagagccgtgaaggggactttggctgcacagtaatggaactgaggaagctcatggagctgcgttcgagggatgcactgacccagattaatgtccactatggaggtgtacagaatctctgcagtagactgaaaacctcccctgtggaaggtctgtctgggaaccctgcagatctggagaaacgtaggcaggtgtttggacacaacgtgatccccccccaaaaagcccaagactttcttagaattagtgtgggaagctcttcaagatgtcacgctcatcatcctggagattgcagccatcatctccctggtcctgtccttttatcgccctgctggtgaagaaaatgaactgtgtggtcaagtcgcaactaccccagaagatgaaaatgaggcacaagctggctggattgagggggcagccatccttttctcagtgatcatcgtggtgttagtgactgcctttaatgattggagcaaagagaagcaattccgggggctgcagtgccgcattgaacaggagcaaaagttctccatcatccgaaacggtcaactcatccagctccctgtggctgagattgtggttggtgatattgcccaagtcaaatacggtgatctgctgcctgcagatggaatcctgatccaagggaatgatctgaagattgatgagagctctctgacaggggaatctgaccatgtcaagaagtccctggacaaagaccccatgttgctctcagggacccatgtcatggaaggttctggccggatggtggtgacagctgttggtgtcaactctcagactggaatcatccttactctcttgggggtcaatgaggatgacgaaggggagaaaaagaagaaaggtaaaaaacaaggagtccctgaaaatcgcaacaaagcaaagacccaagacggagtggccctggaaatccagccactcaacagccaggagggaatcgacaatgaggaaaaggacaagaaggcagtcaaggtgcctaaaaaggagaagtcagtgctgcagggcaagctgactcgcctggctgttcagattgggaaagccggtctgctcatgtctgctctcacggttttcatcctgattctatactttgtgattgacaactttgtgataaatcgcagaccatggctccctgagtgtactcccatctacatccagtactttgtcaagttcttcatcatcggcatcactgtactggtggtggctgtgccagaggggctgcctctggctgtcaccatctcactggcctactctgtgaagaaaatgatgaaagacaataacctagtacggcacttggatgcttgtgagaccatgggcaacgccaccgccatctgctctgataagacaggcacgttgaccatgaaccgcatgactgtggtacaagcttatattgggggcatccattaccgtcaaatcccaagccctgatgtcttcctgcccaaagtcctggacctcattgtcaatggcatttctatcaacagtgcttatacctccaagattctgcctccagagaaggagggaggcctgcctcggcaggtgggcaacaagaccgagtgtgctctgctaggctttgtcacagatctgaagcaggattatcaggctgtgcgtaatgaagtgcccgaggagaagctctacaaggtgtacacctttaactcagtgcgcaagtcaatgagcaccgtcatcaggaatcccaacggtggcttccgtatgtacagcaagggcgcctctgagatcatcttgcgcaagtgtaatcgaatcctggaccggaaaggggaagcagtgccattcaagaataaagacagagatgatatggtacgcactgtcatcgagcccatggcctgtgatggactccggactatctgcatagcttaccgggacttcgatgacacagagccctcttgggacaatgagaatgagatcctcaccgaactgacctgtatcgcggtggtgggcattgaggaccctgtgcgcccagaggtgccagatgctattgccaaatgcaaacaagctggcattactgtcagaatggtgacaggtgacaacatcaacacagcccgggccattgccaccaaatgtggcattctgacacctggggatgacttcctgtgcttagaaggcaaagaattcaaccggctcatccgcaacgagaaaggcgaggtagagcaagaaaagctggacaagatctggcctaagcttcgggtcctggcgcgatcttctcccactgacaagcacaccctggtgaaaggcataattgacagcactgttggggaacaccggcaggtcgtggctgtcactggtgatggcacaaatgacgggcctgctctgaagaaagcggatgttggttttgccatgggcatcgcaggcacagatgtagcaaaggaggcttcagacatcatcctaacagatgacaacttcaccagcattgtgaaggcagtgatgtggggacgaaatgtctatgacagcatctccaagttcctgcagttccagctcactgtcaatgtggtggccgtgattgtagccttcactggagcctgtatcactcaggattccccattgaaagctgtgcagatgttgtgggttaatctgatcatggacacttttgcttcattggccctggccacagagccccctacggaatctctgttgaagcggcgcccctatggccgaaataagcctctgatctcacgcactatgatgaagaacatcttgggccatgcattctatcagctcattgtcatctttatccttgtctttgcgggtgagaaattctttgatattgatagtgggaggaaggcacctctacattcaccacccagccagcactataccattgtttttaacaccttcgtgctgatgcagctcttcaatgaaatcaactcccgaaagatccatggagagaagaacgtcttttcaggcatctaccgcaacattatcttctgctctgtagtcttgggcacattcatctgccagttcatctccgcaatacctacccgatccctgaagttcctgaaggaggctgggcatggcaccaccaaagaggagatcaccaaggatgccgagggactggatgagattgaccatgctgagatggagctgcgccgaggccagatcctctggttccggggcctgaaccgtatccagactcagatcgacgtaattaacacattccagacgggagcctcttttaagggagtcctaaggcgacagaacatgggtcaacaccttgatgtaaaacttgttcctagttcatcctatgtagcagttgcaccagtcaaatcttcccccaccacttctgttcctgctgtttcatctcctcctatgggcaatcaaagtggtcaaagcgttccatagttccctccacgaaagcattcagaaaccctacaaccaaaagtccatccacagcttcatgacccaccctgaattcgccatagaggaggagttgccacgaacaccactcctggatgaggaagaggaggaaaatcctgacaaggcttctaagtttgggactagggtgctcctgttggatggtgaggtcactccatatgccaatacaaacaacaatgcggtggattgcaaccaagtgcagctcccccagtcggacagctctctacagagcctagagacatcagtttgaattttctttctctgactctcatccctattttacctatttccattttcgtctgtcccatctatgaggtgatgatgggacttttcatcgtcacgtcagctgctgtgttaacagcagtgtgtgtgaagtgaacctctacctgaccatgaagaggcaagagcacagacttacaaggatttcaacttaagcttgacttggggtttgtagcgggacccagtcaaaccccattcaggtcatggtagaatctactccttggtagtcacttgtcatttttaaagaaatgatgacaatcctcttggcatcaccccaccccacattctccccgatgttcctctcctgaattctggattttgtcctacaagtctgtgccatttataagctaagttgagggttcagagggagacaaatatccccaagtgaaatatgttgcggtagagatggaatgtataaaatccgccagtagtgtgaatgnttttcaatttttcccactttgaaaacttacacctaaaggcctgtaggcctctaactctttctgccctttcattcaaacctctccaaagttctttgtctt

SEQ ID NO: 314858 - DNA, 1924 bp, Homo sapiens
  misc_feature (1779)..(1779): n is a, c, g, or t
  misc_feature (1784)..(1784): n is a, c, g, or t
tggtgagcaagagtctggcccgagttagctagagctgttgccatgacaagcattttcttaagaaagctctgctgttgagatcgtccaaagctgggggctgggagggggggcacgaacttcgtggggcaccatccctccgaagagagcaagatcagagacacccgcccagctctcctgcaccctttttctttcaggaacctgagaggtccttcccattggaggggcagggggaggagacccagcccactccccggccttagccagaaaggcaagagagcaaagccagcgtctctagcttggttgccacactggggagactggtgggtggtcaccccaccctaccctcatccatggaaacccggagggagagtcccgcctgaagaaacctggatctttgctagaaagagagagatccagttgtcatcggtatccaggaagctctcctcttcctcctcctgacgtctaccactacagttgctggttgttgctaaggttgctgccatggtaacatgcacatcctgtttacaccttcatctgggcaagttggtctaagctaggaacctacctaccctggacaaccactatcatcaccacctggggacaccaatcatcgtgacacggagtccaccttccactcagttcccccatcctcttcctcctctcgctgccagacttcatagagaagaaaggatctagacttcggacggctactcgggagcttattgcacaagatatattcaatctattccctcactgggcccccagagaagcaagaagtaggaagaagttgagacagggaggcaggagacactggtcagttgaagggaaacgctacatcttctctggttgaggggcttggtaacagcaggcaaaatgacgaacccatcagaccgtgtcttgcctgccaactcgatggccgagagccgtgaaggggactttggctgcacagtaatggaactgaggaagctcatggagctgcgttcgagggatgcactgacccagattaatgtccactatggaggtgtacagaatctctgcagtagactgaaaacctcccctgtggaaggtctgtctgggaaccctgcagatctggagaaacgtaggcaggtgtttggacacaacgtgatccccccccaaaaagcccaagactttcttagaattagtgtgggaagctcttcaagatgtcacgctcatcatcctggagattgcagccatcatctccctggtcctgtccttttatcgccctgctggtgaagaaaatgaactgtgtggtcaagtcgcaactaccccagaagatgaaaatgaggcacaagctggctggattgagggggcagccatccttttctcagtgatcatcgtggtgttagtgactgcctttaatgattggagcaaagagaagcaattccgggggctgcagtgccgcattgaacaggagcaaaagttctccatcatccgaaacggtcaactcatccagctccctgtggctgagattgtggttggtgatattgcccaagtcaaatacggtgatctgctgcctgcagatggaatcctgatccaagggaatgatctgaagattgatgagagctctctgacaggggaatctgaccatgtcaagaagtccctggacaaagaccccatgttgctctcagggacccatgtcatggaaggttctggccggatggtggtgacagctgttggtgtcaactctcagactggaatcatccttactctcttgggggtcaatgaggatgacgaaggggagaaaaagaagaatttagnggggnacaggcctgttcccccctaatatcttctttgctaataaaagcccaaattactgctatcacgggggatacagtgacactcctgctgcaaagagaaagtgtatagatggccataaatggtcctgcaacttaaattcagtgta

SEQ ID NO: 314859 - DNA, 1511 bp, Homo sapiens
  misc_feature (1412)..(1412): n is a, c, g, or t
gcaaattattattagagagttttaagttcctgcatgctgctgacacaaatgaagattggtttgtctgcctggctgcacagttttcatggtcactcgtcacccaacctgtattatgtgcagattggtgtatgctggctctttgaggtctttaaacagataactaaacctcaatgcataatttttccattccacattcacaaaatgtttggcctcagcacagaaatccacatatctcaatcatctttttaagtttggctatgaatttgcatctagttcccatgtccttgccctccatctaaaagaactaatgaaacttcttgttttctgtttcattttaaaagtagattgtttgggaatgctaacgttgctttgggttttctactttttttaatgcagctttcaaaacgtcctagttgccgtcactcaccccagcccaccccactgcttgaaagttgagccatgtgatgtttctagtgccccatgatctcttctgatgtgtgtttggttttgatgctgagcagtcatgttttatagtctgggttttgtttctctcctaaatccaccatctccttgttctgccggccaattctcacctctctattttctcatcctccttttccttcccctggtatagatcaaagtggtcaaagcgttccatagttccctccacgaaagcattcagaaaccctacaaccaaaagtccatccacagcttcatgacccaccctgaattcgccatagaggaggagttgccacgaacaccactcctggatgaggaagaggaggaaaatcctgacaaggcttctaagtttgggactagggtgctcctgttggatggtgaggtcactccatatgccaatacaaacaacaatgcggtggattgcaaccaagtgcagctcccccagtcggacagctctctacagagcctagagacatcagtttgaattttctttctctgactctcatccctattttacctatttccattttcgtctgtcccatctatgaggtgatgatgggacttttcatcgtcacgtcagctgctgtgttaacagcagtgtgtgtgaagtgaacctctacctgaccatgaagaggcaagagcacagacttacaaggatttcaacttaagcttgacttggggtttgtagcgggacccagtcaaaccccattcaggtcatggtagaatctactccttggtagtcacttgtcatttttaaagaaatgatgacaatcctcttggcatcaccccaccccacattctccccgatgttcctctcctgaattctggattttgtcctacaagtctgtgccatttataagctaagttgagggttcagagggagacaaatatccccaagtgaaatatgttgcggtagagatggaatgtataaaatccgccagtagtgtgaatgnttttcaatttttcccactttgaaaacttacacctaaaggcctgtaggcctctaactctttctgccctttcattcaaacctctccaaagttctttgtctt

SEQ ID NO: 314860 - DNA, 1262 bp, Homo sapiens
tcggtacttcatcccgagaaaagggtgggagggaagctctctctgctctctcctgtccccttttcccatctacttccattcctgcttccccaaccttccatgaccctcccttcctctttcttcacctctctcggactgactgtggagcaaagctgtctcactctctgattctttgcagatcgacgtaattaacacattccagacgggagcctcttttaagggagtcctaaggcgacagaacatgggtcaacaccttgatgtaaaacttgttcctagttcatcctatgtagcagttgcaccagtcaaatcttcccccaccacttctgttcctgctgtttcatctcctcctatgggcagtgagtgatagtctattatgatgcatgatttgctaaaatgaccacaagagagcacgtggcatccactttaaccaaccatggttatcttttccttttggtttttccctttgatattttgacttaagggaagaaaaagacaaaaatcctactctaaaaccagactgtgtgcccttgtattttatttttgtaatgtagaaaagctattaaaccttaactgttttaaagacaataattctgttttctgattgttcctctgcattgctcatttcttccttttcttgagttttgttttgttttgctttgccttttttgtttgtctgtttgttgctttgctgggatatgttgttgttcctctcttctcctcctgctcctttgagtctgaactctacctcctaagcttagatgtgaggttaggccagaggaaaacccaagagctttctttacatgggggcaaagtttgggatcttttgaggaaaggtaggaagggagctaatgtgcccatgggtgtgttttgactagtggacctgtcataattgagccagtattaaacttggtcaataataatagtccatttggccaccactgtattgctgactggcaattttagcataaaagttgtagctggctgggcacgatggctcacgcctgtaatcccaacactttgggaggccaaagcagatcacgaggtcaggagatcaagaccatcctggctaacatggtgaaaccccgtctctactaaaaatacaaaaaattagctgggcgtggtggcgggcacctgtagtcctatagctactcgggaggctaagacaggagaatcacttgaactcaggaggcggaggttacagtgagccaagtggagagccactgcactccaccctgggcgatagagcaagactctgtctcaaa

SEQ ID NO: 314861 - DNA, 173 bp, Homo sapiens
acctccagtgcttctcctctccccactaggtgagaaattctttgatattgatagtgggaggaaggcacctctacattcaccacccagccagcactataccattgtttttaacaccttcgtgctgatgcagctcttcaatgaaatcaactcccgaaagatccatggagagaaga

SEQ ID NO: 314862 - DNA, 4744 bp, Homo sapiens
  misc_feature (4645)..(4645): n is a, c, g, or t
gcttagactgggtacctcttgcccttgcagatgctggatacttatggctgctctaatggtttctttttgtctatctttgaacctttattccagagatccagttgtcatcggtatccaggaagctctcctcttcctcctcctgacgtctaccactacagttgctggttgttgctaaggttgctgccatggtaacatgcacatcctgtttacaccttcatctgggcaagttggtctaagctaggaacctacctaccctggacaaccactatcatcaccacctggggacaccaatcatcgtgacacggagtccaccttccactcagttcccccatcctcttcctcctctcgctgccagacttcatagagaagaaaggatctagacttcggacggctactcgggagcttattgcacaagatatattcaatctattccctcactgggcccccagagaagcaagaagtaggaagaagttgagacagggaggcaggagacactggtcagttgaagggaaacgctacatcttctctggttgaggggcttggtaacagcaggcaaaatgacgaacccatcagaccgtgtcttgcctgccaactcgatggccgagagccgtgaaggggactttggctgcacagtaatggaactgaggaagctcatggagctgcgttcgagggatgcactgacccagattaatgtccactatggaggtgtacagaatctctgcagtagactgaaaacctcccctgtggaaggtctgtctgggaaccctgcagatctggagaaacgtaggcaggtgtttggacacaacgtgatccccccccaaaaagcccaagactttcttagaattagtgtgggaagctcttcaagatgtcacgctcatcatcctggagattgcagccatcatctccctggtcctgtccttttatcgccctgctggtgaagaaaatgaactgtgtggtcaagtcgcaactaccccagaagatgaaaatgaggcacaagctggctggattgagggggcagccatccttttctcagtgatcatcgtggtgttagtgactgcctttaatgattggagcaaagagaagcaattccgggggctgcagtgccgcattgaacaggagcaaaagttctccatcatccgaaacggtcaactcatccagctccctgtggctgagattgtggttggtgatattgcccaagtcaaatacggtgatctgctgcctgcagatggaatcctgatccaagggaatgatctgaagattgatgagagctctctgacaggggaatctgaccatgtcaagaagtccctggacaaagaccccatgttgctctcagggacccatgtcatggaaggttctggccggatggtggtgacagctgttggtgtcaactctcagactggaatcatccttactctcttgggggtcaatgaggatgacgaaggggagaaaaagaagaaaggtaaaaaacaaggagtccctgaaaatcgcaacaaagcaaagacccaagacggagtggccctggaaatccagccactcaacagccaggagggaatcgacaatgaggaaaaggacaagaaggcagtcaaggtgcctaaaaaggagaagtcagtgctgcagggcaagctgactcgcctggctgttcagattgggaaagccggtctgctcatgtctgctctcacggttttcatcctgattctatactttgtgattgacaactttgtgataaatcgcagaccatggctccctgagtgtactcccatctacatccagtactttgtcaagttcttcatcatcggcatcactgtactggtggtggctgtgccagaggggctgcctctggctgtcaccatctcactggcctactctgtgaagaaaatgatgaaagacaataacctagtacggcacttggatgcttgtgagaccatgggcaacgccaccgccatctgctctgataagacaggcacgttgaccatgaaccgcatgactgtggtacaagcttatattgggggcatccattaccgtcaaatcccaagccctgatgtcttcctgcccaaagtcctggacctcattgtcaatggcatttctatcaacagtgcttatacctccaagattctgcctccagagaaggagggaggcctgcctcggcaggtgggcaacaagaccgagtgtgctctgctaggctttgtcacagatctgaagcaggattatcaggctgtgcgtaatgaagtgcccgaggagaagctctacaaggtgtacacctttaactcagtgcgcaagtcaatgagcaccgtcatcaggaatcccaacggtggcttccgtatgtacagcaagggcgcctctgagatcatcttgcgcaagtgtaatcgaatcctggaccggaaaggggaagcagtgccattcaagaataaagacagagatgatatggtacgcactgtcatcgagcccatggcctgtgatggactccggactatctgcatagcttaccgggacttcgatgacacagagccctcttgggacaatgagaatgagatcctcaccgaactgacctgtatcgcggtggtgggcattgaggaccctgtgcgcccagaggtgccagatgctattgccaaatgcaaacaagctggcattactgtcagaatggtgacaggtgacaacatcaacacagcccgggccattgccaccaaatgtggcattctgacacctggggatgacttcctgtgcttagaaggcaaagaattcaaccggctcatccgcaacgagaaaggcgaggtagagcaagaaaagctggacaagatctggcctaagcttcgggtcctggcgcgatcttctcccactgacaagcacaccctggtgaaaggcataattgacagcactgttggggaacaccggcaggtcgtggctgtcactggtgatggcacaaatgacgggcctgctctgaagaaagcggatgttggttttgccatgggcatcgcaggcacagatgtagcaaaggaggcttcagacatcatcctaacagatgacaacttcaccagcattgtgaaggcagtgatgtggggacgaaatgtctatgacagcatctccaagttcctgcagttccagctcactgtcaatgtggtggccgtgattgtagccttcactggagcctgtatcactcaggattccccattgaaagctgtgcagatgttgtgggttaatctgatcatggacacttttgcttcattggccctggccacagagccccctacggaatctctgttgaagcggcgcccctatggccgaaataagcctctgatctcacgcactatgatgaagaacatcttgggccatgcattctatcagctcattgtcatctttatccttgtctttgcgggtgagaaattctttgatattgatagtgggaggaaggcacctctacattcaccacccagccagcactataccattgtttttaacaccttcgtgctgatgcagctcttcaatgaaatcaactcccgaaagatccatggagagaagaacgtcttttcaggcatctaccgcaacattatcttctgctctgtagtcttgggcacattcatctgccagattttcatcgtggaatttgggggtaaacccttcagttgtacaagcctcagcctgtctcagtggctgtggtgtctcttcattgggattggagaacttctgtggggccagttcatctccgcaatacctacccgatccctgaagttcctgaaggaggctgggcatggcaccaccaaagaggagatcaccaaggatgccgagggactggatgagattgaccatgctgagatggagctgcgccgaggccagatcctctggttccggggcctgaaccgtatccagactcagatcaaagtggtcaaagcgttccatagttccctccacgaaagcattcagaaaccctacaaccaaaagtccatccacagcttcatgacccaccctgaattcgccatagaggaggagttgccacgaacaccactcctggatgaggaagaggaggaaaatcctgacaaggcttctaagtttgggactagggtgctcctgttggatggtgaggtcactccatatgccaatacaaacaacaatgcggtggattgcaaccaagtgcagctcccccagtcggacagctctctacagagcctagagacatcagtttgaattttctttctctgactctcatccctattttacctatttccattttcgtctgtcccatctatgaggtgatgatgggacttttcatcgtcacgtcagctgctgtgttaacagcagtgtgtgtgaagtgaacctctacctgaccatgaagaggcaagagcacagacttacaaggatttcaacttaagcttgacttggggtttgtagcgggacccagtcaaaccccattcaggtcatggtagaatctactccttggtagtcacttgtcatttttaaagaaatgatgacaatcctcttggcatcaccccaccccacattctccccgatgttcctctcctgaattctggattttgtcctacaagtctgtgccatttataagctaagttgagggttcagagggagacaaatatccccaagtgaaatatgttgcggtagagatggaatgtataaaatccgccagtagtgtgaatgnttttcaatttttcccactttgaaaacttacacctaaaggcctgtaggcctctaactctttctgccctttcattcaaacctctccaaagttctttgtctt

SEQ ID NO: 314863 - DNA, 1145 bp, Homo sapiens
  misc_feature (1)..(1): n is a, c, g, or t
ncccaggtaactaacaaaaccagagtcatctggggaagagtactcgggcccatggaaacagtggcatggttcgtgccaaattccgaagcaatcttcctgctaaggccattggacacagaatccgagtgatgctgtacccctcaaggatttaaactaacgaaaaatcaataaataaatgtggatttgtgctcttgtatttttaagtggattaaaaaacttactacctgggttaggtctacctggccaggtagacctaagcactcgcttgtgtggaaaagcctctaaatgcatcccttcctttctttcctgcttcctttgccttacaattgaagcagcccgtggtaccatcacagtatgcagagacttcctcacctttcatatctagggaccacccccgatgcattggtgagggtgggcacttataaatgcctgctattgttaagccattccagcctcttcctctgaatagaccagacgccctttcacttagttcagtgccagtccttttgccttcccaaccctgctgttaggcctgctgttccctttgctcttgattaggagagatggaaggagatgagctcccataactgaattggcctttggttcatgttttctccccatatgtatatatgccatatgtgaatatgccatatatatgtgccaacaaatctatctacgttgttcttttcaaattagcacgcagataggaattttgagtttcttcttcttttagtaactagtataacaagcactggtatttttgtacaaaaaagaaaaacaaaagattgactattgtggtctgcatgacataaacaaacaaatggtgatatcaaagcaacgtataccccagtccagtgtgtgttgccataatttgcaattcagcttaacagtgcacccaatctatatttgcattttgatattatttaagctctatgtacaaggttttgcatgtatttatatggttcttagggaaaaaaaatgctataaactgcaaatctgaaattcaaatgtgttgttccactgagaccagaagaagaagaggagttttaaaagggataatttgttggagccaataaagctttttgctgatgaacagaaaccaatactgctgtgcactgagaataaaaactcatgcccacttgtaa

SEQ ID NO: 314864 - DNA, 5267 bp, Homo sapiens
tggtgagcaagagtctggcccgagttagctagagctgttgccatgacaagcattttcttaagaaagctctgctgttgagatcgtccaaagctgggggctgggagggggggcacgaacttcgtggggcaccatccctccgaagagagcaagatcagagacacccgcccagctctcctgcaccctttttctttcaggaacctgagaggtccttcccattggaggggcagggggaggagacccagcccactccccggccttagccagaaaggcaagagagcaaagccagcgtctctagcttggttgccacactggggagactggtgggtggtcaccccaccctaccctcatccatggaaacccggagggagagtcccgcctgaagaaacctggatctttgctagaaagagagagatccagttgtcatcggtatccaggaagctctcctcttcctcctcctgacgtctaccactacagttgctggttgttgctaaggttgctgccatggtaacatgcacatcctgtttacaccttcatctgggcaagttggtctaagctaggaacctacctaccctggacaaccactatcatcaccacctggggacaccaatcatcgtgacacggagtccaccttccactcagttcccccatcctcttcctcctctcgctgccagacttcatagagaagaaaggatctagacttcggacggctactcgggagcttattgcacaagatatattcaatctattccctcactgggcccccagagaagcaagaagtaggaagaagttgagacagggaggcaggagacactggtcagttgaagggaaacgctacatcttctctggttgaggggcttggtaacagcaggcaaaatgacgaacccatcagaccgtgtcttgcctgccaactcgatggccgagagccgtgaaggggactttggctgcacagtaatggaactgaggaagctcatggagctgcgttcgagggatgcactgacccagattaatgtccactatggaggtgtacagaatctctgcagtagactgaaaacctcccctgtggaaggtctgtctgggaaccctgcagatctggagaaacgtaggcaggtgtttggacacaacgtgatccccccccaaaaagcccaagactttcttagaattagtgtgggaagctcttcaagatgtcacgctcatcatcctggagattgcagccatcatctccctggtcctgtccttttatcgccctgctggtgaagaaaatgaactgtgtggtcaagtcgcaactaccccagaagatgaaaatgaggcacaagctggctggattgagggggcagccatccttttctcagtgatcatcgtggtgttagtgactgcctttaatgattggagcaaagagaagcaattccgggggctgcagtgccgcattgaacaggagcaaaagttctccatcatccgaaacggtcaactcatccagctccctgtggctgagattgtggttggtgatattgcccaagtcaaatacggtgatctgctgcctgcagatggaatcctgatccaagggaatgatctgaagattgatgagagctctctgacaggggaatctgaccatgtcaagaagtccctggacaaagaccccatgttgctctcagggacccatgtcatggaaggttctggccggatggtggtgacagctgttggtgtcaactctcagactggaatcatccttactctcttgggggtcaatgaggatgacgaaggggagaaaaagaagaaaggtaaaaaacaaggagtccctgaaaatcgcaacaaagcaaagacccaagacggagtggccctggaaatccagccactcaacagccaggagggaatcgacaatgaggaaaaggacaagaaggcagtcaaggtgcctaaaaaggagaagtcagtgctgcagggcaagctgactcgcctggctgttcagattgggaaagccggtctgctcatgtctgctctcacggttttcatcctgattctatactttgtgattgacaactttgtgataaatcgcagaccatggctccctgagtgtactcccatctacatccagtactttgtcaagttcttcatcatcggcatcactgtactggtggtggctgtgccagaggggctgcctctggctgtcaccatctcactggcctactctgtgaagaaaatgatgaaagacaataacctagtacggcacttggatgcttgtgagaccatgggcaacgccaccgccatctgctctgataagacaggcacgttgaccatgaaccgcatgactgtggtacaagcttatattgggggcatccattaccgtcaaatcccaagccctgatgtcttcctgcccaaagtcctggacctcattgtcaatggcatttctatcaacagtgcttatacctccaagattctgcctccagagaaggagggaggcctgcctcggcaggtgggcaacaagaccgagtgtgctctgctaggctttgtcacagatctgaagcaggattatcaggctgtgcgtaatgaagtgcccgaggagaagctctacaaggtgtacacctttaactcagtgcgcaagtcaatgagcaccgtcatcaggaatcccaacggtggcttccgtatgtacagcaagggcgcctctgagatcatcttgcgcaagtgtaatcgaatcctggaccggaaaggggaagcagtgccattcaagaataaagacagagatgatatggtacgcactgtcatcgagcccatggcctgtgatggactccggactatctgcatagcttaccgggacttcgatgacacagagccctcttgggacaatgagaatgagatcctcaccgaactgacctgtatcgcggtggtgggcattgaggaccctgtgcgcccagaggtgccagatgctattgccaaatgcaaacaagctggcattactgtcagaatggtgacaggtgacaacatcaacacagcccgggccattgccaccaaatgtggcattctgacacctggggatgacttcctgtgcttagaaggcaaagaattcaaccggctcatccgcaacgagaaaggcgaggtagagcaagaaaagctggacaagatctggcctaagcttcgggtcctggcgcgatcttctcccactgacaagcacaccctggtgaaaggcataattgacagcactgttggggaacaccggcaggtcgtggctgtcactggtgatggcacaaatgacgggcctgctctgaagaaagcggatgttggttttgccatgggcatcgcaggcacagatgtagcaaaggaggcttcagacatcatcctaacagatgacaacttcaccagcattgtgaaggcagtgatgtggggacgaaatgtctatgacagcatctccaagttcctgcagttccagctcactgtcaatgtggtggccgtgattgtagccttcactggagcctgtatcactcaggattccccattgaaagctgtgcagatgttgtgggttaatctgatcatggacacttttgcttcattggccctggccacagagccccctacggaatctctgttgaagcggcgcccctatggccgaaataagcctctgatctcacgcactatgatgaagaacatcttgggccatgcattctatcagctcattgtcatctttatccttgtctttgcgggtgagaaattctttgatattgatagtgggaggaaggcacctctacattcaccacccagccagcactataccattgtttttaacaccttcgtgctgatgcagctcttcaatgaaatcaactcccgaaagatccatggagagaagaacgtcttttcaggcatctaccgcaacattatcttctgctctgtagtcttgggcacattcatctgccagattttcatcgtggaatttgggggtaaacccttcagttgtacaagcctcagcctgtctcagtggctgtggtgtctcttcattgggattggagaacttctgtggggccagttcatctccgcaatacctacccgatccctgaagttcctgaaggaggctgggcatggcaccaccaaagaggagatcaccaaggatgccgagggactggatgagattgaccatgctgagatggagctgcgccgaggccagatcctctggttccggggcctgaaccgtatccagactcagatcgacgtaattaacacattccagacgggagcctcttttaagggagtcctaaggcgacagaacatgggtcaacaccttgatgtaaaacttgttcctagttcatcctatgtagcagttgcaccagtcaaatcttcccccaccacttctgttcctgctgtttcatctcctcctatgggcagtgagtgatagtctattatgatgcatgatttgctaaaatgaccacaagagagcacgtggcatccactttaaccaaccatggttatcttttccttttggtttttccctttgatattttgacttaagggaagaaaaagacaaaaatcctactctaaaaccagactgtgtgcccttgtattttatttttgtaatgtagaaaagctattaaaccttaactgttttaaagacaataattctgttttctgattgttcctctgcattgctcatttcttccttttcttgagttttgttttgttttgctttgccttttttgtttgtctgtttgttgctttgctgggatatgttgttgttcctctcttctcctcctgctcctttgagtctgaactctacctcctaagcttagatgtgaggttaggccagaggaaaacccaagagctttctttacatgggggcaaagtttgggatcttttgaggaaaggtaggaagggagctaatgtgcccatgggtgtgttttgactagtggacctgtcataattgagccagtattaaacttggtcaataataatagtccatttggccaccactgtattgctgactggcaattttagcataaaagttgtagctggctgggcacgatggctcacgcctgtaatcccaacactttgggaggccaaagcagatcacgaggtcaggagatcaagaccatcctggctaacatggtgaaaccccgtctctactaaaaatacaaaaaattagctgggcgtggtggcgggcacctgtagtcctatagctactcgggaggctaagacaggagaatcacttgaactcaggaggcggaggttacagtgagccaagtggagagccactgcactccaccctgggcgatagagcaagactctgtctcaaa

SEQ ID NO: 314865 - DNA, 4837 bp, Homo sapiens
tggtgagcaagagtctggcccgagttagctagagctgttgccatgacaagcattttcttaagaaagctctgctgttgagatcgtccaaagctgggggctgggagggggggcacgaacttcgtggggcaccatccctccgaagagagcaagatcagagacacccgcccagctctcctgcaccctttttctttcaggaacctgagaggtccttcccattggaggggcagggggaggagacccagcccactccccggccttagccagaaaggcaagagagcaaagccagcgtctctagcttggttgccacactggggagactggtgggtggtcaccccaccctaccctcatccatggaaacccggagggagagtcccgcctgaagaaacctggatctttgctagaaagagagagatccagttgtcatcggtatccaggaagctctcctcttcctcctcctgacgtctaccactacagttgctggttgttgctaaggttgctgccatggtaacatgcacatcctgtttacaccttcatctgggcaagttggtctaagctaggaacctacctaccctggacaaccactatcatcaccacctggggacaccaatcatcgtgacacggagtccaccttccactcagttcccccatcctcttcctcctctcgctgccagacttcatagagaagaaaggatctagacttcggacggctactcgggagcttattgcacaagatatattcaatctattccctcactgggcccccagagaagcaagaagtaggaagaagttgagacagggaggcaggagacactggtcagttgaagggaaacgctacatcttctctggttgaggggcttggtaacagcaggcaaaatgacgaacccatcagaccgtgtcttgcctgccaactcgatggccgagagccgtgaaggggactttggctgcacagtaatggaactgaggaagctcatggagctgcgttcgagggatgcactgacccagattaatgtccactatggaggtgtacagaatctctgcagtagactgaaaacctcccctgtggaaggtctgtctgggaaccctgcagatctggagaaacgtaggcaggtgtttggacacaacgtgatccccccccaaaaagcccaagactttcttagaattagtgtgggaagctcttcaagatgtcacgctcatcatcctggagattgcagccatcatctccctggtcctgtccttttatcgccctgctggtgaagaaaatgaactgtgtggtcaagtcgcaactaccccagaagatgaaaatgaggcacaagctggctggattgagggggcagccatccttttctcagtgatcatcgtggtgttagtgactgcctttaatgattggagcaaagagaagcaattccgggggctgcagtgccgcattgaacaggagcaaaagttctccatcatccgaaacggtcaactcatccagctccctgtggctgagattgtggttggtgatattgcccaagtcaaatacggtgatctgctgcctgcagatggaatcctgatccaagggaatgatctgaagattgatgagagctctctgacaggggaatctgaccatgtcaagaagtccctggacaaagaccccatgttgctctcagggacccatgtcatggaaggttctggccggatggtggtgacagctgttggtgtcaactctcagactggaatcatccttactctcttgggggtcaatgaggatgacgaaggggagaaaaagaagaaaggtaaaaaacaaggagtccctgaaaatcgcaacaaagcaaagacccaagacggagtggccctggaaatccagccactcaacagccaggagggaatcgacaatgaggaaaaggacaagaaggcagtcaaggtgcctaaaaaggagaagtcagtgctgcagggcaagctgactcgcctggctgttcagattgggaaagccggtctgctcatgtctgctctcacggttttcatcctgattctatactttgtgattgacaactttgtgataaatcgcagaccatggctccctgagtgtactcccatctacatccagtactttgtcaagttcttcatcatcggcatcactgtactggtggtggctgtgccagaggggctgcctctggctgtcaccatctcactggcctactctgtgaagaaaatgatgaaagacaataacctagtacggcacttggatgcttgtgagaccatgggcaacgccaccgccatctgctctgataagacaggcacgttgaccatgaaccgcatgactgtggtacaagcttatattgggggcatccattaccgtcaaatcccaagccctgatgtcttcctgcccaaagtcctggacctcattgtcaatggcatttctatcaacagtgcttatacctccaagattctgcctccagagaaggagggaggcctgcctcggcaggtgggcaacaagaccgagtgtgctctgctaggctttgtcacagatctgaagcaggattatcaggctgtgcgtaatgaagtgcccgaggagaagctctacaaggtgtacacctttaactcagtgcgcaagtcaatgagcaccgtcatcaggaatcccaacggtggcttccgtatgtacagcaagggcgcctctgagatcatcttgcgcaagtgtaatcgaatcctggaccggaaaggggaagcagtgccattcaagaataaagacagagatgatatggtacgcactgtcatcgagcccatggcctgtgatggactccggactatctgcatagcttaccgggacttcgatgacacagagccctcttgggacaatgagaatgagatcctcaccgaactgacctgtatcgcggtggtgggcattgaggaccctgtgcgcccagaggtgccagatgctattgccaaatgcaaacaagctggcattactgtcagaatggtgacaggtgacaacatcaacacagcccgggccattgccaccaaatgtggcattctgacacctggggatgacttcctgtgcttagaaggcaaagaattcaaccggctcatccgcaacgagaaaggcgaggtagagcaagaaaagctggacaagatctggcctaagcttcgggtcctggcgcgatcttctcccactgacaagcacaccctggtgaaaggcataattgacagcactgttggggaacaccggcaggtcgtggctgtcactggtgatggcacaaatgacgggcctgctctgaagaaagcggatgttggttttgccatgggcatcgcaggcacagatgtagcaaaggaggcttcagacatcatcctaacagatgacaacttcaccagcattgtgaaggcagtgatgtggggacgaaatgtctatgacagcatctccaagttcctgcagttccagctcactgtcaatgtggtggccgtgattgtagccttcactggagcctgtatcactcaggattccccattgaaagctgtgcagatgttgtgggttaatctgatcatggacacttttgcttcattggccctggccacagagccccctacggaatctctgttgaagcggcgcccctatggccgaaataagcctctgatctcacgcactatgatgaagaacatcttgggccatgcattctatcagctcattgtcatctttatccttgtctttgcgggtgagaaattctttgatattgatagtgggaggaaggcacctctacattcaccacccagccagcactataccattgtttttaacaccttcgtgctgatgcagctcttcaatgaaatcaactcccgaaagatccatggagagaagaacgtcttttcaggcatctaccgcaacattatcttctgctctgtagtcttgggcacattcatctgccagattttcatcgtggaatttgggggtaaacccttcagttgtacaagcctcagcctgtctcagtggctgtggtgtctcttcattgggattggagaacttctgtggggccagttcatctccgcaatacctacccgatccctgaagttcctgaaggaggctgggcatggcaccaccaaagaggagatcaccaaggatgccgagggactggatgagattgaccatgctgagatggagctgcgccgaggccagatcctctggttccggggcctgaaccgtatccagactcagcatcttttgcaggattcagacttgcttcctgacaaggaggaagcaataatttcttcaagcctcttcccttcttgcaatttctgaaatgggatagaagccacccctgctgctcttatgtcccctgtctatagccccacaataacttttattttttccactttccatgcatcaattgtaactactttctcctgggtgaatgcgctgatctaagcattgataattctgtcttcccctgctctcaccccccatagctttattgttttaatcctgagattttccatttcaaaaacactgtaaattccaagatctcaagggtggtctccagaaaacaggcgtatttctctctgctgattggctagagatcttcaaaataagtttcactgtctaaaactggccttgcaaatgttttagaaagttccccagtcggccaggcatggtggctcacgcctgtaatcccagcactttgggaggccaaggtgggtggatcacctgaggtcgggagttcaagaccagcctgaccaacatggagaaaccgcgtctctactaaaaatccaaaattagccgggcgtagtggcacatgcctgtaatcccagctactcgggaggctgaggcagaagaattacttgaacccgggaggcagaggttgtagtgagc

SEQ ID NO: 314866 - DNA, 1949 bp, Homo sapiens
  misc_feature (1779)..(1779): n is a, c, g, or t
  misc_feature (1784)..(1784): n is a, c, g, or t
tggtgagcaagagtctggcccgagttagctagagctgttgccatgacaagcattttcttaagaaagctctgctgttgagatcgtccaaagctgggggctgggagggggggcacgaacttcgtggggcaccatccctccgaagagagcaagatcagagacacccgcccagctctcctgcaccctttttctttcaggaacctgagaggtccttcccattggaggggcagggggaggagacccagcccactccccggccttagccagaaaggcaagagagcaaagccagcgtctctagcttggttgccacactggggagactggtgggtggtcaccccaccctaccctcatccatggaaacccggagggagagtcccgcctgaagaaacctggatctttgctagaaagagagagatccagttgtcatcggtatccaggaagctctcctcttcctcctcctgacgtctaccactacagttgctggttgttgctaaggttgctgccatggtaacatgcacatcctgtttacaccttcatctgggcaagttggtctaagctaggaacctacctaccctggacaaccactatcatcaccacctggggacaccaatcatcgtgacacggagtccaccttccactcagttcccccatcctcttcctcctctcgctgccagacttcatagagaagaaaggatctagacttcggacggctactcgggagcttattgcacaagatatattcaatctattccctcactgggcccccagagaagcaagaagtaggaagaagttgagacagggaggcaggagacactggtcagttgaagggaaacgctacatcttctctggttgaggggcttggtaacagcaggcaaaatgacgaacccatcagaccgtgtcttgcctgccaactcgatggccgagagccgtgaaggggactttggctgcacagtaatggaactgaggaagctcatggagctgcgttcgagggatgcactgacccagattaatgtccactatggaggtgtacagaatctctgcagtagactgaaaacctcccctgtggaaggtctgtctgggaaccctgcagatctggagaaacgtaggcaggtgtttggacacaacgtgatccccccccaaaaagcccaagactttcttagaattagtgtgggaagctcttcaagatgtcacgctcatcatcctggagattgcagccatcatctccctggtcctgtccttttatcgccctgctggtgaagaaaatgaactgtgtggtcaagtcgcaactaccccagaagatgaaaatgaggcacaagctggctggattgagggggcagccatccttttctcagtgatcatcgtggtgttagtgactgcctttaatgattggagcaaagagaagcaattccgggggctgcagtgccgcattgaacaggagcaaaagttctccatcatccgaaacggtcaactcatccagctccctgtggctgagattgtggttggtgatattgcccaagtcaaatacggtgatctgctgcctgcagatggaatcctgatccaagggaatgatctgaagattgatgagagctctctgacaggggaatctgaccatgtcaagaagtccctggacaaagaccccatgttgctctcagggacccatgtcatggaaggttctggccggatggtggtgacagctgttggtgtcaactctcagactggaatcatccttactctcttgggggtcaatgaggatgacgaaggggagaaaaagaagaatttagnggggnacaggcctgttcccccctaatatccatcatgcaaccttatttatctgtcttgggattccagtttagtgcttggatttatttcctgattacactacatagttaagtgagacatctgccattgccttactctgggaaaaccaacctgagtatcttaccatatagatg

SEQ ID NO: 314867 - DNA, 314 bp, Homo sapiens
cagtgatcatcgtggtgttagtgactgcctttaatgattggagcaaagagaagcaattccgggggctgcagtgccgcattgaacaggagcaaaagttctccatcatccgaaacggtcaactcatccagctccctgtggctgagattgtggttggtgatattgcccaagtcaaatacggtgagagctccgtgtttcttttgcttaccccaccaccacccccatttaagggataggtcctttggcatgagggggctgggaattgctgaaaacccaaaaagataagatccaaaattgtattcacttctaggttagag

SEQ ID NO: 314868 - DNA, 944 bp, Homo sapiens
cagtcataaaaatgtagcctatcttttgaatatggaaagccagtattacacgtatgacagtgataagtttatgaagggaaagtaatttagatgacttgagaaattatgaccgtgtgacatagcctttgtgtgatacatattctttccatttctggattctgtcatgtagtttgcaaaacaagactagaaagtttctatgtcgttgcttattttcaccgacaaattcaacacaacagtatggttgaaggatagtctcatccgagactgtcaaccgtgtgttgtgctgtattcctgacactgtttagcacttcacacatattattttatttaatccttacagcagcgttgtgaaatgggtctgtctcccattttacaaatgagaaaagagaagtcactttgtgtcacttcagggacacatgagcttaggtagcttttccccacttaacttagtctgtaggtagcaaagctggaacttgaatcctcatcttattgattgcagaatctttctctgcactgctctttctgctacattttattttaagaatatttgggaaattaacagcattttgtctttgttactacaggggaaaacaaactatcctagtaattgtatgttttatgttcccagggaagcaaaggtgtctaccagtaccactggcaaagccacaatgtcaagcacagtggtgtggacgacatggtgctactgtccaagatcacagagaactccatcgtggagaatctgaagaagagatacatggatgactacatttttgtatcctttattggctgctttggacatttctaagtgatattacagtgtccacagttaaattgtggctttatgctgggtgcagtggctcacgtgtgtaatcccagcactttggaaggctaaggcaggagttccagaccatcctggcaacacagggagaccccatctctattat

SEQ ID NO: 314869 - DNA, 659 bp, Homo sapiens
cagatgtacctccctcaccacctggtgtctcacggtaccgggccccagatgctcctttttctggctcattgtcatgcagcgacagtgccaccccatggatgcggtgcgcatcctcagggccctgctcctggtgtagattgtccgttctcgcctcatgtttatgcttttccagcagcagaactccgtggcgggatctctgagcaccgttttctcactgcgtccttcgacctgttaaccccactgtgctttttgcaggcttgaactgaagttgaaaaaggaaaactggggcccctggagtgcaggggggctcccggcaagtgcagttccaccaagggtttggggacctggctgtcctcaagcccagtaacaaagtgctgcaggtcagcatcggacctggactgcccaagaactcccgtaagtgctccacgggccctgcaggcagaactgccgccgctcccccgagtctcccgagcaaatgctgcaaacatgtgcacagatgtgggggctgagaatcagtacaccttctgcttgctggggctcacgctttcttcagaatggaacatttcaaactaaagcaacagcaaggaaaatgagcaggttaaaagtttctgagggacttagtacttatgtatcagtacacctggcattacaatattgtg

SEQ ID NO: 314870 - DNA, 258 bp, Homo sapiens
ggcggcagaggatcccaggatgcgtagatcagaagagcaaacgctggtgttgcagatagtggcgggtattctccacctgggaaacatcagcttcaaagaagttggcaactacgcggctgtggagagtgaagagtgtgcgtagccctggcatgtggccattgaatgaggggtggctagctctgattagaagtaacctagcactttcctttgcttagatctcaaatgggaatattgggaagaagtgataaatctacatgt

SEQ ID NO: 314871 - DNA, 4741 bp, Homo sapiens
cgagactcagccagaggagtacggattaaggggccgaagaaagaggagtgaggcaggggagcgaggcggacgctccgagcgcatcggactcacctgggccggcggcgagcggcgagtacgagtggactcttgccctccgcagcatgcgccccgcctgctaagtcgccgccgtctcgccctcacctagcaccgccaatcccgcctggatggagtcccctctgggttcccattggctcctgtgagtgcttgggtgtcgggagcctgtttttggcgaggggaaccaacttttgaagttcgcccagaagactgcgttccagccccagttccccggcagcgggacccggcgaagacgcgaccgcggcgcgagtcaccatgggaagcaaaggtgtctaccagtaccactggcaaagccacaatgtcaagcacagtggtgtggacgacatggtgctactgtccaagatcacagagaactccatcgtggagaatctgaagaagagatacatggatgactacatttttacatatataggatctgtattaatctcagtcaaccctttcaagcagatgccatattttggggaaaaggaaattgaaatgtaccaaggagcggcacagtatgaaaacccaccacatatctatgcccttgcagataatatgtacagaaacatgatcattgacagagagaaccagtgcgtcattatcagtggtgaaagtggtgctggaaaaacagtggctgccaaatatatcatgagctacatctccagagtgtctggaggagggaccaaagtccagcacgtgaaggacattatcctgcagtccaacccgctgctggaggccttcgggaacgccaagaccgtccggaacaacaactccagccgatttggaaaatactttgaaatccagttcagtccaggtggggaaccagatggtggaaagatctccaacttccttctggaaaaatctagggtggtgatgaggaacccaggagagcggagttttcacatattttaccagctcatcgagggcgcctctgcagagcagaaacacagccttggcatcaccagcatggactattattactacctgagcctctcgggctcatacaaggttgatgacattgacgacaggcgggagtttcaggaaactctgcacgccatgaatgtgattgggatctttgcagaagagcaaacgctggtgttgcagatagtggcgggtattctccacctgggaaacatcagcttcaaagaagttggcaactacgcggctgtggagagtgaagagtttttagcttttcctgcatatctgctagggataaaccaggaccggttgaaagaaaagctaacaagccggcagatggatagcaagtggggaggcaaatccgaatccatccacgtgaccctcaacgtagagcaggcctgttacacccgggatgcgctcgccaaggccctgcacgcccgggtctttgatttcttggtagattccatcaataaagccatggagaaagaccatgaagaatacaacattggcgtcctagacatctatggctttgaaatattccagaaaaatggctttgaacagttttgtatcaattttgttaatgaaaaactgcagcagatttttattgaactgacattaaaggcagaacaggaagaatatgttcaagagggaataagatggacacccattgagtactttaataataaaatcgtatgtgacctcatagagaacaaagtgaaccctcctggcatcatgagcatcctggatgacgtgtgcgccacgatgcatgcggtgggtgagggggcagatcagacgctgctccagaaacttcagatgcagattgggagtcatgagcacttcaacagttggaaccaaggcttcatcattcatcattatgctgggaaggtatcctatgacatggatggcttttgtgaaaggaaccgggatgtgctttttatggatctcatcgagcttatgcagagcagcgagctgcctttcataaagtctttatttccggaaaatctgcaggctgacaagaaagggcgcccaactactgccggaagcaaaataaagaaacaagccaatgaccttgtgagcaccctgatgaaatgtacgccccactacattcgctgcatcaagccaaacgaaaccaagaagcccagagactgggaggaaagcagggtaaagcatcaagtcgaatatttgggtctgaaagagaacattcgagtgagaagagctggctatgcctatcggcgcatcttccaaaaattcctacagaggtatgccattctgaccaaagccacctggccttcttggcagggagaggagaagcaaggcgtcctgcacctgctgcagtcggtcaacatggacagcgaccagttccagctggggaggagtaaagtgttcatcaaagcccccgagtctctatttcttttagaagagatgagagagagaaagtatgatgggtatgctcgagtgatacagaaatcatggaggaaattcgtggcccggaagaaatacgttcaaatgagagaagaagcctcagacctcttattgaacaagaaggagagaaggagaaacagtattaacaggaactttataggggattatattgggatggaagagcacccagaactccagcagttcgtgggcaagagggagaagattgatttcgcagacacagtcaccaagtatgacaggaggttcaagggtgtaaagcgagacctgctccttaccccaaagtgcttgtacttaatcggacgagaaaaagtcaaacagggcccagacaagggcctggtgaaagaagtcctgaagcggaaaatcgagatagaacggatcttgtctgtgtccctcagtactatgcaggatgacatttttattctccatgagcaagagtatgacagtttgcttgaatctgtcttcaaaactgaattcctaagcctcttagcaaagcgttacgaggagaagacccagaagcaactacctctgaaattcagcaatacgcttgaactgaagttgaaaaaggaaaactggggcccctggagtgcaggggggctcccggcaagtgcagttccaccaagggtttggggacctggctgtcctcaagcccagtaacaaagtgctgcaggtcagcatcggacctggactgcccaagaactcccgtcctaccagaaggaacactacccaaaatacaggttattccagtgggactcaaaatgccaactacccagtgagagctgcccctcctcccccaggataccatcagaacggagtcatcagaaaccagtatgtgccatatccccatgctcctggaagccagaggtccaatcagaaaagcctgtacacctccatggcccgcccgcccttgcctcggcagcagtctaccagttcagaccgagtgtcacagacgccagagagcctggatttcctcaaggtcccggaccagggagctgcaggggtcaggagacaaacaaccagtcggcctcccccagcagggggcagacccaagccccagcccaagcccaagcctcaggtgccacagtgcaaggctttgtatgcctatgacgctcaggacacagacgaactcagctttaatgccaatgacattattgatattatcaaagaagatccttctggctggtggacgggtcgactacgaggcaagcagggcctgttccccaacaactatgtgaccaagatctgaggtgcccgtgactctgacacatggggcagaggagctccaggcacagaccaggggaggggatatttaggggctccccttacaatccacaatgagcaattgcttctccaaggcctggagctattctggtaccttccccatggaggacactgaaaaggctgggttggggacagggagtatcactccataagtgatcctaaaaggtagcctcttcataggaacccaggaggacaaaaccaccatgcattaagatttatttattgtatttaaacctggtgagaggacaagtgaggtctgctcagaccttgtaggcttctatcaaaacagcaccctgcttgctcaccaggcctagagaatggctgtaggtggccgctgacaagtgcctttagttgaagagcacatttctttcatctctcttgtccatacctgatagacacattcctctctgccaccttccttcagggaggacccgccctctgcagactgggcttagcgtgagcaggcacttcccatgtacgtgccaagggtaagctggcctgctgagcccagggcgacagaggggcactggtttacactttgccgggaccatcagggccgccaagcaggtcaggggctgggggctgggggctgggctgctggctttgctttctctgggtcttcaattagaatgtggctggcccatattggtttgtgtttaaatgctgtacttactacaagaaggatcttttttcaagctgtacatttataaaaacagatcatatactgtatatataaaaatcttgagatggtagaaacatgtatgaatgtactaagtagtattccactgtactcattcataaggtaggttttcttacaaaactcacaccaggtacttaaagatgtgctctgcttttttccaactacggagtgtcactgctttctagctcagtccctgcagactcttctcaactctttccctataggaaacttactccgcgtcctgcccccacctcctaaataaataaaggaatcggcgaacaccttcttcttttatgacatttgtta

SEQ ID NO: 314872 - DNA, 4589 bp, Homo sapiens
tttaggagctcatatgcaactgaattcatatttattgagtaaccaagggattggtggggaggtggtacctttgtctgttgtcctgagggcagccctttattctttgtgtgcagtgatcaatttgtctaggacaaggcggcagtaaccacattccctttacaactaagggaacaagtaccctcctccatggaaggagcttatttgcctgtttgtttttccctggggatagatgtagacatgaaataaacatcttcctcttctgaagtgaagatggttctagcagtgctgtgtttctttaaaattgggtttaccataagaatcattattacttcattcattaattgtttgtttgttttcttttttgggagccagggtctggctctgttgcccaggctggagtgcagtggcatgatcatggctcactgcaacctcgacctgcgtggcttaagcaatcctcccacctcagcaggaactacaggcacgcacagtatgaaaacccaccacatatctatgcccttgcagataatatgtacagaaacatgatcattgacagagagaaccagtgcgtcattatcagtggtgaaagtggtgctggaaaaacagtggctgccaaatatatcatgagctacatctccagagtgtctggaggagggaccaaagtccagcacgtgaaggacattatcctgcagtccaacccgctgctggaggccttcgggaacgccaagaccgtccggaacaacaactccagccgatttggaaaatactttgaaatccagttcagtccaggtggggaaccagatggtggaaagatctccaacttccttctggaaaaatctagggtggtgatgaggaacccaggagagcggagttttcacatattttaccagctcatcgagggcgcctctgcagagcagaaacacagccttggcatcaccagcatggactattattactacctgagcctctcgggctcatacaaggttgatgacattgacgacaggcgggagtttcaggaaactctgcacgccatgaatgtgattgggatctttgcagaagagcaaacgctggtgttgcagatagtggcgggtattctccacctgggaaacatcagcttcaaagaagttggcaactacgcggctgtggagagtgaagagtttttagcttttcctgcatatctgctagggataaaccaggaccggttgaaagaaaagctaacaagccggcagatggatagcaagtggggaggcaaatccgaatccatccacgtgaccctcaacgtagagcaggcctgttacacccgggatgcgctcgccaaggccctgcacgcccgggtctttgatttcttggtagattccatcaataaagccatggagaaagaccatgaagaatacaacattggcgtcctagacatctatggctttgaaatattccagaaaaatggctttgaacagttttgtatcaattttgttaatgaaaaactgcagcagatttttattgaactgacattaaaggcagaacaggaagaatatgttcaagagggaataagatggacacccattgagtactttaataataaaatcgtatgtgacctcatagagaacaaagtgaaccctcctggcatcatgagcatcctggatgacgtgtgcgccacgatgcatgcggtgggtgagggggcagatcagacgctgctccagaaacttcagatgcagattgggagtcatgagcacttcaacagttggaaccaaggcttcatcattcatcattatgctgggaaggtatcctatgacatggatggcttttgtgaaaggaaccgggatgtgctttttatggatctcatcgagcttatgcagagcagcgagctgcctttcataaagtctttatttccggaaaatctgcaggctgacaagaaagggcgcccaactactgccggaagcaaaataaagaaacaagccaatgaccttgtgagcaccctgatgaaatgtacgccccactacattcgctgcatcaagccaaacgaaaccaagaagcccagagactgggaggaaagcagggtaaagcatcaagtcgaatatttgggtctgaaagagaacattcgagtgagaagagctggctatgcctatcggcgcatcttccaaaaattcctacagaggtatgccattctgaccaaagccacctggccttcttggcagggagaggagaagcaaggcgtcctgcacctgctgcagtcggtcaacatggacagcgaccagttccagctggggaggagtaaagtgttcatcaaagcccccgagtctctatttcttttagaagagatgagagagagaaagtatgatgggtatgctcgagtgatacagaaatcatggaggaaattcgtggcccggaagaaatacgttcaaatgagagaagaagcctcagacctcttattgaacaagaaggagagaaggagaaacagtattaacaggaactttataggggattatattgggatggaagagcacccagaactccagcagttcgtgggcaagagggagaagattgatttcgcagacacagtcaccaagtatgacaggaggttcaagggtgtaaagcgagacctgctccttaccccaaagtgcttgtacttaatcggacgagaaaaagtcaaacagggcccagacaagggcctggtgaaagaagtcctgaagcggaaaatcgagatagaacggatcttgtctgtgtccctcagtactatgcaggatgacatttttattctccatgagcaagagtatgacagtttgcttgaatctgtcttcaaaactgaattcctaagcctcttagcaaagcgttacgaggagaagacccagaagcaactacctctgaaattcagcaatacgcttgaactgaagttgaaaaaggaaaactggggcccctggagtgcaggggggctcccggcaagtgcagttccaccaagggtttggggacctggctgtcctcaagcccagtaacaaagtgctgcaggtcagcatcggacctggactgcccaagaactcccgtcctaccagaaggaacactacccaaaatacaggttattccagtgggactcaaaatgccaactacccagtgagagctgcccctcctcccccaggataccatcagaacggagtcatcagaaaccagtatgtgccatatccccatgctcctggaagccagaggtccaatcagaaaagcctgtacacctccatggcccgcccgcccttgcctcggcagcagtctaccagttcagaccgagtgtcacagacgccagagagcctggatttcctcaaggtcccggaccagggagctgcaggggtcaggagacaaacaaccagtcggcctcccccagcagggggcagacccaagccccagcccaagcccaagcctcaggtgccacagtgcaaggctttgtatgcctatgacgctcaggacacagacgaactcagctttaatgccaatgacattattgatattatcaaagaagatccttctggctggtggacgggtcgactacgaggcaagcagggcctgttccccaacaactatgtgaccaagatctgaggtgcccgtgactctgacacatggggcagaggagctccaggcacagaccaggggaggggatatttaggggctccccttacaatccacaatgagcaattgcttctccaaggcctggagctattctggtaccttccccatggaggacactgaaaaggctgggttggggacagggagtatcactccataagtgatcctaaaaggtagcctcttcataggaacccaggaggacaaaaccaccatgcattaagatttatttattgtatttaaacctggtgagaggacaagtgaggtctgctcagaccttgtaggcttctatcaaaacagcaccctgcttgctcaccaggcctagagaatggctgtaggtggccgctgacaagtgcctttagttgaagagcacatttctttcatctctcttgtccatacctgatagacacattcctctctgccaccttccttcagggaggacccgccctctgcagactgggcttagcgtgagcaggcacttcccatgtacgtgccaagggtaagctggcctgctgagcccagggcgacagaggggcactggtttacactttgccgggaccatcagggccgccaagcaggtcaggggctgggggctgggggctgggctgctggctttgctttctctgggtcttcaattagaatgtggctggcccatattggtttgtgtttaaatgctgtacttactacaagaaggatcttttttcaagctgtacatttataaaaacagatcatatactgtatatataaaaatcttgagatggtagaaacatgtatgaatgtactaagtagtattccactgtactcattcataaggtaggttttcttacaaaactcacaccaggtacttaaagatgtgctctgcttttttccaactacggagtgtcactgctttctagctcagtccctgcagactcttctcaactctttccctataggaaacttactccgcgtcctgcccccacctcctaaataaataaaggaatcggcgaaca

SEQ ID NO: 314873 - DNA, 3284 bp, Homo sapiens
gaggatcctttgcggctgcttcccccgggtcttgatttctggtagattccatcaataaagccatggagaaagaccatgaagaatacaacattggcgtcctagacatctatggctttgaaatattccagaaaaatggctttgaacagttttgtatcaattttgttaatgaaaaactgcagcagatttttattgaactgacattaaaggcagaacaggaagaatatgttcaagagggaataagatggacacccattgagtactttaataataaaatcgtatgtgacctcatagagaacaaagtgaaccctcctggcatcatgagcatcctggatgacgtgtgcgccacgatgcatgcggtgggtgagggggcagatcagacgctgctccagaaacttcagatgcagattgggagtcatgagcacttcaacagttggaaccaaggcttcatcattcatcattatgctgggaaggtatcctatgacatggatggcttttgtgaaaggaaccgggatgtgctttttatggatctcatcgagcttatgcagagcagcgagctgcctttcataaagtctttatttccggaaaatctgcaggctgacaagaaagggcgcccaactactgccggaagcaaaataaagaaacaagccaatgaccttgtgagcaccctgatgaaatgtacgccccactacattcgctgcatcaagccaaacgaaaccaagaagcccagagactgggaggaaagcagggtaaagcatcaagtcgaatatttgggtctgaaagagaacattcgagtgagaagagctggctatgcctatcggcgcatcttccaaaaattcctacagaggtatgccattctgaccaaagccacctggccttcttggcagggagaggagaagcaaggcgtcctgcacctgctgcagtcggtcaacatggacagcgaccagttccagctggggaggagtaaagtgttcatcaaagcccccgagtctctatttcttttagaagagatgagagagagaaagtatgatgggtatgctcgagtgatacagaaatcatggaggaaattcgtggcccggaagaaatacgttcaaatgagagaagaagcctcagacctcttattgaacaagaaggagagaaggagaaacagtattaacaggaactttataggggattatattgggatggaagagcacccagaactccagcagttcgtgggcaagagggagaagattgatttcgcagacacagtcaccaagtatgacaggaggttcaagggtgtaaagcgagacctgctccttaccccaaagtgcttgtacttaatcggacgagaaaaagtcaaacagggcccagacaagggcctggtgaaagaagtcctgaagcggaaaatcgagatagaacggatcttgtctgtgtccctcagtactatgcaggatgacatttttattctccatgagcaagagtatgacagtttgcttgaatctgtcttcaaaactgaattcctaagcctcttagcaaagcgttacgaggagaagacccagaagcaactacctctgaaattcagcaatacgcttgaactgaagttgaaaaaggaaaactggggcccctggagtgcaggggggctcccggcaagtgcagttccaccaagggtttggggacctggctgtcctcaagcccagtaacaaagtgctgcaggtcagcatcggacctggactgcccaagaactcccgtcctaccagaaggaacactacccaaaatacaggttattccagtgggactcaaaatgccaactacccagtgagagctgcccctcctcccccaggataccatcagaacggagtcatcagaaaccagtatgtgccatatccccatgctcctggaagccagaggtccaatcagaaaagcctgtacacctccatggcccgcccgcccttgcctcggcagcagtctaccagttcagaccgagtgtcacagacgccagagagcctggatttcctcaaggtcccggaccagggagctgcaggggtcaggagacaaacaaccagtcggcctcccccagcagggggcagacccaagccccagcccaagcccaagcctcaggtgccacagtgcaaggctttgtatgcctatgacgctcaggacacagacgaactcagctttaatgccaatgacattattgatattatcaaagaagatccttctggctggtggacgggtcgactacgaggcaagcagggcctgttccccaacaactatgtgaccaagatctgaggtgcccgtgactctgacacatggggcagaggagctccaggcacagaccaggggaggggatatttaggggctccccttacaatccacaatgagcaattgcttctccaaggcctggagctattctggtaccttccccatggaggacactgaaaaggctgggttggggacagggagtatcactccataagtgatcctaaaaggtagcctcttcataggaacccaggaggacaaaaccaccatgcattaagatttatttattgtatttaaacctggtgagaggacaagtgaggtctgctcagaccttgtaggcttctatcaaaacagcaccctgcttgctcaccaggcctagagaatggctgtaggtggccgctgacaagtgcctttagttgaagagcacatttctttcatctctcttgtccatacctgatagacacattcctctctgccaccttccttcagggaggacccgccctctgcagactgggcttagcgtgagcaggcacttcccatgtacgtgccaagggtaagctggcctgctgagcccagggcgacagaggggcactggtttacactttgccgggaccatcagggccgccaagcaggtcaggggctgggggctgggggctgggctgctggctttgctttctctgggtcttcaattagaatgtggctggcccatattggtttgtgtttaaatgctgtacttactacaagaaggatcttttttcaagctgtacatttataaaaacagatcatatactgtatatataaaaatcttgagatggtagaaacatgtatgaatgtactaagtagtattccactgtactcattcataaggtaggttttcttacaaaactcacaccaggtacttaaagatgtgctctgcttttttccaactacggagtgtcactgctttctagctcagtccctgcagactcttctcaactctttccctataggaaacttactccgcgtcctgcccccacctcctaaataaataaaggaatcggcgaaca

SEQ ID NO: 314874 - DNA, 2238 bp, Homo sapiens
ccccgctgatccgcttagcaggaggggcggaagaaatacgttcaaatgagagaagaagcctcagacctcttattgaacaagaaggagagaaggagaaacagtattaacaggaactttataggggattatattgggatggaagagcacccagaactccagcagttcgtgggcaagagggagaagattgatttcgcagacacagtcaccaagtatgacaggaggttcaagggtgtaaagcgagacctgctccttaccccaaagtgcttgtacttaatcggacgagaaaaagtcaaacagggcccagacaagggcctggtgaaagaagtcctgaagcggaaaatcgagatagaacggatcttgtctgtgtccctcagtactatgcaggatgacatttttattctccatgagcaagagtatgacagtttgcttgaatctgtcttcaaaactgaattcctaagcctcttagcaaagcgttacgaggagaagacccagaagcaactacctctgaaattcagcaatacgcttgaactgaagttgaaaaaggaaaactggggcccctggagtgcaggggggctcccggcaagtgcagttccaccaagggtttggggacctggctgtcctcaagcccagtaacaaagtgctgcaggtcagcatcggacctggactgcccaagaactcccgtcctaccagaaggaacactacccaaaatacaggttattccagtgggactcaaaatgccaactacccagtgagagctgcccctcctcccccaggataccatcagaacggagtcatcagaaaccagtatgtgccatatccccatgctcctggaagccagaggtccaatcagaaaagcctgtacacctccatggcccgcccgcccttgcctcggcagcagtctaccagttcagaccgagtgtcacagacgccagagagcctggatttcctcaaggtcccggaccagggagctgcaggggtcaggagacaaacaaccagtcggcctcccccagcagggggcagacccaagccccagcccaagcccaagcctcaggtgccacagtgcaaggctttgtatgcctatgacgctcaggacacagacgaactcagctttaatgccaatgacattattgatattatcaaagaagatccttctggctggtggacgggtcgactacgaggcaagcagggcctgttccccaacaactatgtgaccaagatctgaggtgcccgtgactctgacacatggggcagaggagctccaggcacagaccaggggaggggatatttaggggctccccttacaatccacaatgagcaattgcttctccaaggcctggagctattctggtaccttccccatggaggacactgaaaaggctgggttggggacagggagtatcactccataagtgatcctaaaaggtagcctcttcataggaacccaggaggacaaaaccaccatgcattaagatttatttattgtatttaaacctggtgagaggacaagtgaggtctgctcagaccttgtaggcttctatcaaaacagcaccctgcttgctcaccaggcctagagaatggctgtaggtggccgctgacaagtgcctttagttgaagagcacatttctttcatctctcttgtccatacctgatagacacattcctctctgccaccttccttcagggaggacccgccctctgcagactgggcttagcgtgagcaggcacttcccatgtacgtgccaagggtaagctggcctgctgagcccagggcgacagaggggcactggtttacactttgccgggaccatcagggccgccaagcaggtcaggggctgggggctgggggctgggctgctggctttgctttctctgggtcttcaattagaatgtggctggcccatattggtttgtgtttaaatgctgtacttactacaagaaggatcttttttcaagctgtacatttataaaaacagatcatatactgtatatataaaaatcttgagatggtagaaacatgtatgaatgtactaagtagtattccactgtactcattcataaggtaggttttcttacaaaactcacaccaggtacttaaagatgtgctctgcttttttccaactacggagtgtcactgctttctagctcagtccctgcagactcttctcaactctttccctataggaaacttactccgcgtcctgcccccacctcctaaataaataaaggaatcggcgaaca

SEQ ID NO: 314875 - DNA, 1972 bp, Homo sapiens
cagatgtacctccctcaccacctggtgtctcacggtaccgggccccagatgctcctttttctggctcattgtcatgcagcgacagtgccaccccatggatgcggtgcgcatcctcagggccctgctcctggtgtagattgtccgttctcgcctcatgtttatgcttttccagcagcagaactccgtggcgggatctctgagcaccgttttctcactgcgtccttcgacctgttaaccccactgtgctttttgcaggcttgaactgaagttgaaaaaggaaaactggggcccctggagtgcaggggggctcccggcaagtgcagttccaccaagggtttggggacctggctgtcctcaagcccagtaacaaagtgctgcaggtcagcatcggacctggactgcccaagaactcccgtcctaccagaaggaacactacccaaaatacaggttattccagtgggactcaaaatgccaactacccagtgagagctgcccctcctcccccaggataccatcagaacggagtcatcagaaaccagtatgtgccatatccccatgctcctggaagccagaggtccaatcagaaaagcctgtacacctccatggcccgcccgcccttgcctcggcagcagtctaccagttcagaccgagtgtcacagacgccagagagcctggatttcctcaaggtcccggaccagggagctgcaggggtcaggagacaaacaaccagtcggcctcccccagcagggggcagacccaagccccagcccaagcccaagcctcaggtgccacagtgcaaggctttgtatgcctatgacgctcaggacacagacgaactcagctttaatgccaatgacattattgatattatcaaagaagatccttctggctggtggacgggtcgactacgaggcaagcagggcctgttccccaacaactatgtgaccaagatctgaggtgcccgtgactctgacacatggggcagaggagctccaggcacagaccaggggaggggatatttaggggctccccttacaatccacaatgagcaattgcttctccaaggcctggagctattctggtaccttccccatggaggacactgaaaaggctgggttggggacagggagtatcactccataagtgatcctaaaaggtagcctcttcataggaacccaggaggacaaaaccaccatgcattaagatttatttattgtatttaaacctggtgagaggacaagtgaggtctgctcagaccttgtaggcttctatcaaaacagcaccctgcttgctcaccaggcctagagaatggctgtaggtggccgctgacaagtgcctttagttgaagagcacatttctttcatctctcttgtccatacctgatagacacattcctctctgccaccttccttcagggaggacccgccctctgcagactgggcttagcgtgagcaggcacttcccatgtacgtgccaagggtaagctggcctgctgagcccagggcgacagaggggcactggtttacactttgccgggaccatcagggccgccaagcaggtcaggggctgggggctgggggctgggctgctggctttgctttctctgggtcttcaattagaatgtggctggcccatattggtttgtgtttaaatgctgtacttactacaagaaggatcttttttcaagctgtacatttataaaaacagatcatatactgtatatataaaaatcttgagatggtagaaacatgtatgaatgtactaagtagtattccactgtactcattcataaggtaggttttcttacaaaactcacaccaggtacttaaagatgtgctctgcttttttccaactacggagtgtcactgctttctagctcagtccctgcagactcttctcaactctttccctataggaaacttactccgcgtcctgcccccacctcctaaataaataaaggaatcggcgaaca

SEQ ID NO: 314876 - DNA, 4321 bp, Homo sapiens
cgagactcagccagaggagtacggattaaggggccgaagaaagaggagtgaggcaggggagcgaggcggacgctccgagcgcatcggactcacctgggccggcggcgagcggcgagtacgagtggactcttgccctccgcagcatgcgccccgcctgctaagtcgccgccgtctcgccctcacctagcaccgccaatcccgcctggatggagtcccctctgggttcccattggctcctgtgagtgcttgggtgtcgggagcctgtttttggcgaggggaaccaacttttgaagttcgcccagaagactgcgttccagccccagttccccggcagcgggacccggcgaagacgcgaccgcggcgcgagtcaccatgggaagcaaaggtgtctaccagtaccactggcaaagccacaatgtcaagcacagtggtgtggacgacatggtgctactgtccaagatcacagagaactccatcgtggagaatctgaagaagagatacatggatgactacatttttacatatataggatctgtattaatctcagtcaaccctttcaagcagatgccatattttggggaaaaggaaattgaaatgtaccaaggagcggcacagtatgaaaacccaccacatatctatgcccttgcagataatatgtacagaaacatgatcattgacagagagaaccagtgcgtcattatcagtggtgaaagtggtgctggaaaaacagtggctgccaaatatatcatgagctacatctccagagtgtctggaggagggaccaaagtccagcacgtgaaggacattatcctgcagtccaacccgctgctggaggccttcgggaacgccaagaccgtccggaacaacaactccagccgatttggaaaatactttgaaatccagttcagtccaggtggggaaccagatggtggaaagatctccaacttccttctggaaaaatctagggtggtgatgaggaacccaggagagcggagttttcacatattttaccagctcatcgagggcgcctctgcagagcagaaacacagccttggcatcaccagcatggactattattactacctgagcctctcgggctcatacaaggttgatgacattgacgacaggcgggagtttcaggaaactctgcacgccatgaatgtgattgggatctttgcagaagagcaaacgctggtgttgcagatagtggcgggtattctccacctgggaaacatcagcttcaaagaagttggcaactacgcggctgtggagagtgaagagtttttagcttttcctgcatatctgctagggataaaccaggaccggttgaaagaaaagctaacaagccggcagatggatagcaagtggggaggcaaatccgaatccatccacgtgaccctcaacgtagagcaggcctgttacacccgggatgcgctcgccaaggccctgcacgcccgggtctttgatttcttggtagattccatcaataaagccatggagaaagaccatgaagaatacaacattggcgtcctagacatctatggctttgaaatattccagaaaaatggctttgaacagttttgtatcaattttgttaatgaaaaactgcagcagatttttattgaactgacattaaaggcagaacaggaagaatatgttcaagagggaataagatggacacccattgagtactttaataataaaatcgtatgtgacctcatagagaacaaagtgaaccctcctggcatcatgagcatcctggatgacgtgtgcgccacgatgcatgcggtgggtgagggggcagatcagacgctgctccagaaacttcagatgcagattgggagtcatgagcacttcaacagttggaaccaaggcttcatcattcatcattatgctgggaaggtatcctatgacatggatggcttttgtgaaaggaaccgggatgtgctttttatggatctcatcgagcttatgcagagcagcgagctgcctttcataaagtctttatttccggaaaatctgcaggctgacaagaaagggcgcccaactactgccggaagcaaaataaagaaacaagccaatgaccttgtgagcaccctgatgaaatgtacgccccactacattcgctgcatcaagccaaacgaaaccaagaagcccagagactgggaggaaagcagggtaaagcatcaagtcgaatatttgggtctgaaagagaacattcgagtgagaagagctggctatgcctatcggcgcatcttccaaaaattcctacagaggtatgccattctgaccaaagccacctggccttcttggcagggagaggagaagcaaggcgtcctgcacctgctgcagtcggtcaacatggacagcgaccagttccagctggggaggagtaaagtgttcatcaaagcccccgagtctctatttcttttagaagagatgagagagagaaagtatgatgggtatgctcgagtgatacagaaatcatggaggaaattcgtggcccggaagaaatacgttcaaatgagagaagaagcctcagacctcttattgaacaagaaggagagaaggagaaacagtattaacaggaactttataggggattatattgggatggaagagcacccagaactccagcagttcgtgggcaagagggagaagattgatttcgcagacacagtcaccaagtatgacaggaggttcaagggtgtaaagcgagacctgctccttaccccaaagtgcttgtacttaatcggacgagaaaaagtcaaacagggcccagacaagggcctggtgaaagaagtcctgaagcggaaaatcgagatagaacggatcttgtctgtgtccctcagtactatgcaggatgacatttttattctccatgagcaagagtatgacagtttgcttgaatctgtcttcaaaactgaattcctaagcctcttagcaaagcgttacgaggagaagacccagaagcaactacctctgaaattcagcaatacgcttgaactgaagttgaaaaaggaaaactggggcccctggagtgcaggggggctcccggcaagtgcagttccaccaagggtttggggacctggctgtcctcaagcccagtaacaaagtgctgcaggtcagcatcggacctggactgcccaagaactcccgtcctaccagaaggaacactacccaaaatacaggttattccagtgggactcaaaatgccaactacccagtgagagctgcccctcctcccccaggataccatcagaacggagtcatcagaaaccagtatgtgccatatccccatgctcctggaagccagaggtccaatcagaaaagcctgtacacctccatggcccgcccgcccttgcctcggcagcagtctaccagttcagaccgagtgtcacagacgccagagagcctggatttcctcaaggtcccggaccagggagctgcaggggtcaggagacaaacaaccagtcggcctcccccagcagggggcagacccaagccccagcccaagcccaagcctcaggtgccacagtgcaaggctttgtatgcctatgaatcctaaaaggtagcctcttcataggaacccaggaggacaaaaccaccatgcattaagatttatttattgtatttaaacctggtgagaggacaagtgaggtctgctcagaccttgtaggcttctatcaaaacagcaccctgcttgctcaccaggcctagagaatggctgtaggtggccgctgacaagtgcctttagttgaagagcacatttctttcatctctcttgtccatacctgatagacacattcctctctgccaccttccttcagggaggacccgccctctgcagactgggcttagcgtgagcaggcacttcccatgtacgtgccaagggtaagctggcctgctgagcccagggcgacagaggggcactggtttacatttgctttctctgggtcttcaattagaatgtggctggcccatattggtttgtgtttaaatgctgtacttactacaagaaggatcttttttcaagctgtacatttataaaaacagatcatatactgtatatataaaaatcttgagatggtagaaacatgtatgaatgtactaagtagtattccactgtactcattcataaggtaggttttcttacaaaactcacaccaggtacttaaagatgtgctctgcttttttccaactacggagtgtcactgctttctagctcagtccctgcagactcttctcaactctttccctataggaaacttactccgcgtcctgcccccacctcctaaataaataaaggaatcggcgaaca

SEQ ID NO: 314877 - DNA, 916 bp, Homo sapiens
atcttcacagcaggtggccagaagcatgaggcacaccccctgctgctttgcagggggttccagtcatcgtcatcatcattttcgtcctgtatcctaaaaggtagcctcttcataggaacccaggaggacaaaaccaccatgcattaagatttatttattgtatttaaacctggtgagaggacaagtgaggtctgctcagaccttgtaggcttctatcaaaacagcaccctgcttgctcaccaggcctagagaatggctgtaggtggccgctgacaagtgcctttagttgaagagcacatttctttcatctctcttgtccatacctgatagacacattcctctctgccaccttccttcagggaggacccgccctctgcagactgggcttagcgtgagcaggcacttcccatgtacgtgccaagggtaagctggcctgctgagcccagggcgacagaggggcactggtttacactttgccgggaccatcagggccgccaagcaggtcaggggctgggggctgggggctgggctgctggctttgctttctctgggtcttcaattagaatgtggctggcccatattggtttgtgtttaaatgctgtacttactacaagaaggatcttttttcaagctgtacatttataaaaacagatcatatactgtatatataaaaatcttgagatggtagaaacatgtatgaatgtactaagtagtattccactgtactcattcataaggtaggttttcttacaaaactcacaccaggtacttaaagatgtgctctgcttttttccaactacggagtgtcactgctttctagctcagtccctgcagactcttctcaactctttccctataggaaacttactccgcgtcctgcccccacctcctaaataaataaaggaatcggcgaaca

SEQ ID NO: 314878 - DNA, 3521 bp, Homo sapiens
cgagactcagccagaggagtacggattaaggggccgaagaaagaggagtgaggcaggggagcgaggcggacgctccgagcgcatcggactcacctgggccggcggcgagcggcgagtacgagtggactcttgccctccgcagcatgcgccccgcctgctaagtcgccgccgtctcgccctcacctagcaccgccaatcccgcctggatggagtcccctctgggttcccattggctcctgtgagtgcttgggtgtcgggagcctgtttttggcgaggggaaccaacttttgaagttcgcccagaagactgcgttccagccccagttccccggcagcgggacccggcgaagacgcgaccgcggcgcgagtcaccatgggaagcaaaggtgtctaccagtaccactggcaaagccacaatgtcaagcacagtggtgtggacgacatggtgctactgtccaagatcacagagaactccatcgtggagaatctgaagaagagatacatggatgactacatttttacatatataggatctgtattaatctcagtcaaccctttcaagcagatgccatattttggggaaaaggaaattgaaatgtaccaaggagcggcacagtatgaaaacccaccacatatctatgcccttgcagataatatgtacagaaacatgatcattgacagagagaaccagtgcgtcattatcagtggtgaaagtggtgctggaaaaacagtggctgccaaatatatcatgagctacatctccagagtgtctggaggagggaccaaagtccagcacgtgaaggacattatcctgcagtccaacccgctgctggaggccttcgggaacgccaagaccgtccggaacaacaactccagccgatttggaaaatactttgaaatccagttcagtccaggtggggaaccagatggtggaaagatctccaacttccttctggaaaaatctagggtggtgatgaggaacccaggagagcggagttttcacatattttaccagctcatcgagggcgcctctgcagagcagaaacacagccttggcatcaccagcatggactattattactacctgagcctctcgggctcatacaaggttgatgacattgacgacaggcgggagtttcaggaaactctgcacgccatgaatgtgattgggatctttgcagaagagcaaacgctggtgttgcagatagtggcgggtattctccacctgggaaacatcagcttcaaagaagttggcaactacgcggctgtggagagtgaagagtttttagcttttcctgcatatctgctagggataaaccaggaccggttgaaagaaaagctaacaagccggcagatggatagcaagtggggaggcaaatccgaatccatccacgtgaccctcaacgtagagcaggcctgttacacccgggatgcgctcgccaaggccctgcacgcccgggtctttgatttcttggtagattccatcaataaagccatggagaaagaccatgaagaatacaacattggcgtcctagacatctatggctttgaaatattccagaaaaatggctttgaacagttttgtatcaattttgttaatgaaaaactgcagcagatttttattgaactgacattaaaggcagaacaggaagaatatgttcaagagggaataagatggacacccattgagtactttaataataaaatcgtatgtgacctcatagagaacaaagtgaaccctcctggcatcatgagcatcctggatgacgtgtgcgccacgatgcatgcggtgggtgagggggcagatcagacgctgctccagaaacttcagatgcagattgggagtcatgagcacttcaacagttggaaccaaggcttcatcattcatcattatgctgggaaggtatcctatgacatggatggcttttgtgaaaggaaccgggatgtgctttttatggatctcatcgagcttatgcagagcagcgagctgcctttcataaagtctttatttccggaaaatctgcaggctgacaagaaagggcgcccaactactgccggaagcaaaataaagaaacaagccaatgaccttgtgagcaccctgatgaaatgtacgccccactacattcgctgcatcaagccaaacgaaaccaagaagcccagagactgggaggaaagcagggtaaagcatcaagtcgaatatttgggtctgaaagagaacattcgagtgagaagagctggctatgcctatcggcgcatcttccaaaaattcctacagaggtatgccattctgaccaaagccacctggccttcttggcagggagaggagaagcaaggcgtcctgcacctgctgcagtcggtcaacatggacagcgaccagttccagctggggaggagtaaagtgttcatcaaagcccccgagtctctatttcttttagaagagatgagagagagaaagtatgatgggtatgctcgagtgatacagaaatcatggaggaaattcgtggcccggaagaaatacgttcaaatgagagaagaagcctcagacctcttattgaacaagaaggagagaaggagaaacagtattaacaggaactttataggggattatattgggatggaagagcacccagaactccagcagttcgtgggcaagagggagaagattgatttcgcagacacagtcaccaagtatgacaggaggttcaagggtgtaaagcgagacctgctccttaccccaaagtgcttgtacttaatcggacgagaaaaagtcaaacagggcccagacaagggcctggtgaaagaagtcctgaagcggaaaatcgagatagaacggatcttgtctgtgtccctcagtactatgcaggatgacatttttattctccatgagcaagagtatgacagtttgcttgaatctgtcttcaaaactgaattcctaagcctcttagcaaagcgttacgaggagaagacccagaagcaactacctctgaaattcagcaatacgcttgaactgaagttgaaaaaggaaaactggggcccctggagtgcaggggggctcccggcaagtgcagttccaccaagggtttggggacctggctgtcctcaagcccagtaacaaagtgctgcaggtcagcatcggacctggactgcccaagaactcccgtcctaccagaaggaacactacccaaaatacaggttattccagtgggactcaaaatgccaactacccagtgagagctgcccctcctcccccaggataccatcagaacggagtcatcagaaaccagtatgtgccatatccccatgctcctggaagccagaggtccaatcagaaaagcctgtacacctccatggcccgcccgcccttgcctcggcagcagtctaccagttcagaccgagtgtcacagacgccagagagcctggatttcctcaaggtcccggaccagggagctgcaggagtcaggcacactaacacagccttctgtcctcaataacacagccattattgacactttgcatccagag

SEQ ID NO: 314879 - DNA, 3544 bp, Homo sapiens
cgagactcagccagaggagtacggattaaggggccgaagaaagaggagtgaggcaggggagcgaggcggacgctccgagcgcatcggactcacctgggccggcggcgagcggcgagtacgagtggactcttgccctccgcagcatgcgccccgcctgctaagtcgccgccgtctcgccctcacctagcaccgccaatcccgcctggatggagtcccctctgggttcccattggctcctgtgagtgcttgggtgtcgggagcctgtttttggcgaggggaaccaacttttgaagttcgcccagaagactgcgttccagccccagttccccggcagcgggacccggcgaagacgcgaccgcggcgcgagtcaccatgggaagcaaaggtgtctaccagtaccactggcaaagccacaatgtcaagcacagtggtgtggacgacatggtgctactgtccaagatcacagagaactccatcgtggagaatctgaagaagagatacatggatgactacatttttacatatataggatctgtattaatctcagtcaaccctttcaagcagatgccatattttggggaaaaggaaattgaaatgtaccaaggagcggcacagtatgaaaacccaccacatatctatgcccttgcagataatatgtacagaaacatgatcattgacagagagaaccagtgcgtcattatcagtggtgaaagtggtgctggaaaaacagtggctgccaaatatatcatgagctacatctccagagtgtctggaggagggaccaaagtccagcacgtgaaggacattatcctgcagtccaacccgctgctggaggccttcgggaacgccaagaccgtccggaacaacaactccagccgatttggaaaatactttgaaatccagttcagtccaggtggggaaccagatggtggaaagatctccaacttccttctggaaaaatctagggtggtgatgaggaacccaggagagcggagttttcacatattttaccagctcatcgagggcgcctctgcagagcagaaacacagccttggcatcaccagcatggactattattactacctgagcctctcgggctcatacaaggttgatgacattgacgacaggcgggagtttcaggaaactctgcacgccatgaatgtgattgggatctttgcagaagagcaaacgctggtgttgcagatagtggcgggtattctccacctgggaaacatcagcttcaaagaagttggcaactacgcggctgtggagagtgaagagtttttagcttttcctgcatatctgctagggataaaccaggaccggttgaaagaaaagctaacaagccggcagatggatagcaagtggggaggcaaatccgaatccatccacgtgaccctcaacgtagagcaggcctgttacacccgggatgcgctcgccaaggccctgcacgcccgggtctttgatttcttggtagattccatcaataaagccatggagaaagaccatgaagaatacaacattggcgtcctagacatctatggctttgaaatattccagaaaaatggctttgaacagttttgtatcaattttgttaatgaaaaactgcagcagatttttattgaactgacattaaaggcagaacaggaagaatatgttcaagagggaataagatggacacccattgagtactttaataataaaatcgtatgtgacctcatagagaacaaagtgaaccctcctggcatcatgagcatcctggatgacgtgtgcgccacgatgcatgcggtgggtgagggggcagatcagacgctgctccagaaacttcagatgcagattgggagtcatgagcacttcaacagttggaaccaaggcttcatcattcatcattatgctgggaaggtatcctatgacatggatggcttttgtgaaaggaaccgggatgtgctttttatggatctcatcgagcttatgcagagcagcgagctgcctttcataaagtctttatttccggaaaatctgcaggctgacaagaaagggcgcccaactactgccggaagcaaaataaagaaacaagccaatgaccttgtgagcaccctgatgaaatgtacgccccactacattcgctgcatcaagccaaacgaaaccaagaagcccagagactgggaggaaagcagggtaaagcatcaagtcgaatatttgggtctgaaagagaacattcgagtgagaagagctggctatgcctatcggcgcatcttccaaaaattcctacagaggtatgccattctgaccaaagccacctggccttcttggcagggagaggagaagcaaggcgtcctgcacctgctgcagtcggtcaacatggacagcgaccagttccagctggggaggagtaaagtgttcatcaaagcccccgagtctctatttcttttagaagagatgagagagagaaagtatgatgggtatgctcgagtgatacagaaatcatggaggaaattcgtggcccggaagaaatacgttcaaatgagagaagaagcctcagacctcttattgaacaagaaggagagaaggagaaacagtattaacaggaactttataggggattatattgggatggaagagcacccagaactccagcagttcgtgggcaagagggagaagattgatttcgcagacacagtcaccaagtatgacaggaggttcaagggtgtaaagcgagacctgctccttaccccaaagtgcttgtacttaatcggacgagaaaaagtcaaacagggcccagacaagggcctggtgaaagaagtcctgaagcggaaaatcgagatagaacggatcttgtctgtgtccctcaggtgagtagtggaggtgcagaggcaggactgccccttctcgcctcagcatcacggtccgctgttccaaacagccaggaggaaggccgggctgggcttcccagctgtcaaaatcatgatcaagagaatggaatttccctttgtcccaaagggaagactccctagtctcagcaagtcttgatatgtcaggaagaaggtaccaagaaaaggttgcctccggacagctcctctaatcaagggggacccagatctcttgtaaccgaaacatgttagaaatgaacccggtatatggaacacctcagagaataatttctcttgttgcagtagagccaaggattcagagccctgtcccccagtccacctcacccaggttggaggcctcacccatttccctgagcagagggtcctgaaagggaagtttctttgggacttccttagggagtgcaagttggtctccattctctgtagccctggagtcatcgtgagatgctctcttcgctccagttctcaggcagtggggagtggtgtttgcttccacaaggcctcaggaagggcccttgctcctcccggcagcaccttggcttcctctcggcagaagggctcctctgccggccgtcagcatctcctccgtcagtgggacctaggctaggggttcttagcataggaggtcttcccatgctaagaagtcctcccat

SEQ ID NO: 314880 - DNA, 2317 bp, Homo sapiens
cgagactcagccagaggagtacggattaaggggccgaagaaagaggagtgaggcaggggagcgaggcggacgctccgagcgcatcggactcacctgggccggcggcgagcggcgagtacgagtggactcttgccctccgcagcatgcgccccgcctgctaagtcgccgccgtctcgccctcacctagcaccgccaatcccgcctggatggagtcccctctgggttcccattggctcctgtgagtgcttgggtgtcgggagcctgtttttggcgaggggaaccaacttttgaagttcgcccagaagactgcgttccagccccagttccccggcagcgggacccggcgaagacgcgaccgcggcgcgagtcaccatgggaagcaaaggtgtctaccagtaccactggcaaagccacaatgtcaagcacagtggtgtggacgacatggtgctactgtccaagatcacagagaactccatcgtggagaatctgaagaagagatacatggatgactacatttttacatatataggatctgtattaatctcagtcaaccctttcaagcagatgccatattttggggaaaaggaaattgaaatgtaccaaggagcggcacagtatgaaaacccaccacatatctatgcccttgcagataatatgtacagaaacatgatcattgacagagagaaccagtgcgtcattatcagtggtgaaagtggtgctggaaaaacagtggctgccaaatatatcatgagctacatctccagagtgtctggaggagggaccaaagtccagcacgtgaaggacattatcctgcagtccaacccgctgctggaggccttcgggaacgccaagaccgtccggaacaacaactccagccgatttggaaaatactttgaaatccagttcagtccaggtggggaaccagatggtggaaagatctccaacttccttctggaaaaatctagggtggtgatgaggaacccaggagagcggagttttcacatattttaccagctcatcgagggcgcctctgcagagcagaaacacagccttggcatcaccagcatggactattattactacctgagcctctcgggctcatacaaggttgatgacattgacgacaggcgggagtttcaggaaactctgcacgccatgaatgtgattgggatctttgcagaagagcaaacgctggtgttgcagatagtggcgggtattctccacctgggaaacatcagcttcaaagaagttggcaactacgcggctgtggagagtgaagagtttttagcttttcctgcatatctgctagggataaaccaggaccggttgaaagaaaagctaacaagccggcagatggatagcaagtggggaggcaaatccgaatccatccacgtgaccctcaacgtagagcaggcctgttacacccgggatgcgctcgccaaggccctgcacgcccgggtctttgatttcttggtagatggtgtaaagcgagacctgctccttaccccaaagtgcttgtacttaatcggacgagaaaaagtcaaacagggcccagacaagggcctggtgaaagaagtcctgaagcggaaaatcgagatagaacggatcttgtctgtgtccctcaggtgagtagtggaggtgcagaggcaggactgccccttctcgcctcagcatcacggtccgctgttccaaacagccaggaggaaggccgggctgggcttcccagctgtcaaaatcatgatcaagagaatggaatttccctttgtcccaaagggaagactccctagtctcagcaagtcttgatatgtcaggaagaaggtaccaagaaaaggttgcctccggacagctcctctaatcaagggggacccagatctcttgtaaccgaaacatgttagaaatgaacccggtatatggaacacctcagagaataatttctcttgttgcagtagagccaaggattcagagccctgtcccccagtccacctcacccaggttggaggcctcacccatttccctgagcagagggtcctgaaagggaagtttctttgggacttccttagggagtgcaagttggtctccattctctgtagccctggagtcatcgtgagatgctctcttcgctccagttctcaggcagtggggagtggtgtttgcttccacaaggcctcaggaagggcccttgctcctcccggcagcaccttggcttcctctcggcagaagggctcctctgccggccgtcagcatctcctccgtcagtgggacctaggctaggggttcttagcataggaggtcttcccatgctaagaagtcctcccat

SEQ ID NO: 314881 - DNA, 290 bp, Homo sapiens
ccaagtatgacaggaggttcaaggtacgtgctaactgcctgcctctgagatcaccaaacagattccttatttttttaataacttgttattttgcttttgttgttaccaaatcagaatgtgttcgttgtagaaaaatttagagaaaatacagtaaaccaaaagataaacaggcacctatgcccagaaacattcactgttaacattctgtgtatatccatatctttcagaatgtttttatgaaaacatacatttgcgtatttagttttacaaaaaatgagatatacattaca

SEQ ID NO: 314882 - DNA, 504 bp, Homo sapiens
gtatcaattttgttaatgaaaaactgcagcagatttttattgaactgacattaaaggcagaacaggtaagcagtccctcttccttcatcctattctatttataatttattttgtttaagagggtatagatttctgtcttttgttaatagatttcggttccagtcttatattaggaaatgcatctaataaagtcaggcagaaaaaccatatgccattgtggcattttaatctatgaaatataaataccgtctgcagcatttgccttcttctttaagcaaatgatgctgtgatgttggaggtaagactggctgcttttactctactgactcattgagcacgtgggaaatgggagcctagttccagccccgactgtctgtggcaaatattgtgttccaaataaaagacttggtttcctcagatctacgccattttcaatcttccctaacaatacgtgcatttttaacaaagctggtatttgaatacttacctgaggtaacatgcctt

SEQ ID NO: 314883 - DNA, 714 bp, Homo sapiens
cacttagcaaaccctggcaaaggtgaatgtttaatagacgtaagctgcttctattatcaattcaaaaataatgactattgttactatctgcagatagctcaccctctctataagcgcctaggaacaagggttgtcttgtccttagcatccctggcatattgtgttgggtcatcattaaatgactggtgaatggaagacactggaaatgacaattacagatcctttagtgtgggttctttgtgtgaaataggttttacttcgatcatccaagatgacatttttttctaattgttaagacttcctgaaaaagcttacttggacagaaattaatggttatcatcattaaacaaacattttttgtttctactgtactcgcttttctgaatcctggtggttttccaaagtacttgactttggactgagagattgttaaagcagcaagtctcctgccttcacttgtcctctgtttcctgcaagcagtagtgtttgccgtgtagaatccagcttccctttccccagtgcatgcccgtttttagtatgaatggaaaggagttcactgccatgctgtttactttctctagtccatcaataaagccatggagaaagaccatgaagaatacaacattggcgtcctagacatctatggctttgaaatattccaggtaaggccagttttaataactaggggttgaggagggtgacgtatttcatctg

SEQ ID NO: 314884 - DNA, 4716 bp, Homo sapiens
cgagactcagccagaggagtacggattaaggggccgaagaaagaggagtgaggcaggggagcgaggcggacgctccgagcgcatcggactcacctgggccggcggcgagcggcgagtacgagtggactcttgccctccgcagcatgcgccccgcctgctaagtcgccgccgtctcgccctcacctagcaccgccaatcccgcctggatggagtcccctctgggttcccattggctcctgtgagtgcttgggtgtcgggagcctgtttttggcgaggggaaccaacttttgaagttcgcccagaagactgcgttccagccccagttccccggcagcgggacccggcgaagacgcgaccgcggcgcgagtcaccatgggaagcaaaggtgtctaccagtaccactggcaaagccacaatgtcaagcacagtggtgtggacgacatggtgctactgtccaagatcacagagaactccatcgtggagaatctgaagaagagatacatggatgactacatttttacatatataggatctgtattaatctcagtcaaccctttcaagcagatgccatattttggggaaaaggaaattgaaatgtaccaaggagcggcacagtatgaaaacccaccacatatctatgcccttgcagataatatgtacagaaacatgatcattgacagagagaaccagtgcgtcattatcagtggtgaaagtggtgctggaaaaacagtggctgccaaatatatcatgagctacatctccagagtgtctggaggagggaccaaagtccagcacgtgaaggacattatcctgcagtccaacccgctgctggaggccttcgggaacgccaagaccgtccggaacaacaactccagccgatttggaaaatactttgaaatccagttcagtccaggtggggaaccagatggtggaaagatctccaacttccttctggaaaaatctagggtggtgatgaggaacccaggagagcggagttttcacatattttaccagctcatcgagggcgcctctgcagagcagaaacacagccttggcatcaccagcatggactattattactacctgagcctctcgggctcatacaaggttgatgacattgacgacaggcgggagtttcaggaaactctgcacgccatgaatgtgattgggatctttgcagaagagcaaacgctggtgttgcagatagtggcgggtattctccacctgggaaacatcagcttcaaagaagttggcaactacgcggctgtggagagtgaagagtttttagcttttcctgcatatctgctagggataaaccaggaccggttgaaagaaaagctaacaagccggcagatggatagcaagtggggaggcaaatccgaatccatccacgtgaccctcaacgtagagcaggcctgttacacccgggatgcgctcgccaaggccctgcacgcccgggtctttgatttcttggtagattccatcaataaagccatggagaaagaccatgaagaatacaacattggcgtcctagacatctatggctttgaaatattccagaaaaatggctttgaacagttttgtatcaattttgttaatgaaaaactgcagcagatttttattgaactgacattaaaggcagaacaggaagaatatgttcaagagggaataagatggacacccattgagtactttaataataaaatcgtatgtgacctcatagagaacaaagtgaaccctcctggcatcatgagcatcctggatgacgtgtgcgccacgatgcatgcggtgggtgagggggcagatcagacgctgctccagaaacttcagatgcagattgggagtcatgagcacttcaacagttggaaccaaggcttcatcattcatcattatgctgggaaggtatcctatgacatggatggcttttgtgaaaggaaccgggatgtgctttttatggatctcatcgagcttatgcagagcagcgagctgcctttcataaagtctttatttccggaaaatctgcaggctgacaagaaagggcgcccaactactgccggaagcaaaataaagaaacaagccaatgaccttgtgagcaccctgatgaaatgtacgccccactacattcgctgcatcaagccaaacgaaaccaagaagcccagagactgggaggaaagcagggtaaagcatcaagtcgaatatttgggtctgaaagagaacattcgagtgagaagagctggctatgcctatcggcgcatcttccaaaaattcctacagaggtatgccattctgaccaaagccacctggccttcttggcagggagaggagaagcaaggcgtcctgcacctgctgcagtcggtcaacatggacagcgaccagttccagctggggaggagtaaagtgttcatcaaagcccccgagtctctatttcttttagaagagatgagagagagaaagtatgatgggtatgctcgagtgatacagaaatcatggaggaaattcgtggcccggaagaaatacgttcaaatgagagaagaagcctcagacctcttattgaacaagaaggagagaaggagaaacagtattaacaggaactttataggggattatattgggatggaagagcacccagaactccagcagttcgtgggcaagagggagaagattgatttcgcagacacagtcaccaagtatgacaggaggttcaagggtgtaaagcgagacctgctccttaccccaaagtgcttgtacttaatcggacgagaaaaagtcaaacagggcccagacaagggcctggtgaaagaagtcctgaagcggaaaatcgagatagaacggatcttgtctgtgtccctcagtactatgcaggatgacatttttattctccatgagcaagagtatgacagtttgcttgaatctgtcttcaaaactgaattcctaagcctcttagcaaagcgttacgaggagaagacccagaagcaactacctctgaaattcagcaatacgcttgaactgaagttgaaaaaggaaaactggggcccctggagtgcaggggggctcccggcaagtgcagttccaccaagggtttggggacctggctgtcctcaagcccagtaacaaagtgctgcaggtcagcatcggacctggactgcccaagaactcccgtcctaccagaaggaacactacccaaaatacaggttattccagtgggactcaaaatgccaactacccagtgagagctgcccctcctcccccaggataccatcagaacggagtcatcagaaaccagtatgtgccatatccccatgctcctggaagccagaggtccaatcagaaaagcctgtacacctccatggcccgcccgcccttgcctcggcagcagtctaccagttcagaccgagtgtcacagacgccagagagcctggatttcctcaaggtcccggaccagggagctgcaggggtcaggagacaaacaaccagtcggcctcccccagcagggggcagacccaagccccagcccaagcccaagcctcaggtgccacagtgcaaggctttgtatgcctatgacgctcaggacacagacgaactcagctttaatgccaatgacattattgatattatcaaagaagatccttctggctggtggacgggtcgactacgaggcaagcagggcctgttccccaacaactatgtgaccaagatctgaggtgcccgtgactctgacacatggggcagaggagctccaggcacagaccaggggaggggatatttaggggctccccttacaatccacaatgagcaattgcttctccaaggcctggagctattctggtaccttccccatggaggacactgaaaaggctgggttggggacagggagtatcactccataagtgatcctaaaaggtagcctcttcataggaacccaggaggacaaaaccaccatgcattaagatttatttattgtatttaaacctggtgagaggacaagtgaggtctgctcagaccttgtaggcttctatcaaaacagcaccctgcttgctcaccaggcctagagaatggctgtaggtggccgctgacaagtgcctttagttgaagagcacatttctttcatctctcttgtccatacctgatagacacattcctctctgccaccttccttcagggaggacccgccctctgcagactgggcttagcgtgagcaggcacttcccatgtacgtgccaagggtaagctggcctgctgagcccagggcgacagaggggcactggtttacactttgccgggaccatcagggccgccaagcaggtcaggggctgggggctgggggctgggctgctggctttgctttctctgggtcttcaattagaatgtggctggcccatattggtttgtgtttaaatgctgtacttactacaagaaggatcttttttcaagctgtacatttataaaaacagatcatatactgtatatataaaaatcttgagatggtagaaacatgtatgaatgtactaagtagtattccactgtactcattcataaggtaggttttcttacaaaactcacaccaggtacttaaagatgtgctctgcttttttccaactacggagtgtcactgctttctagctcagtccctgcagactcttctcaactctttccctataggaaacttactccgcgtcctgcccccacctcctaaataaataaaggaatcggcgaaca

SEQ ID NO: 314885 - DNA, 4969 bp, Homo sapiens
cagtcataaaaatgtagcctatcttttgaatatggaaagccagtattacacgtatgacagtgataagtttatgaagggaaagtaatttagatgacttgagaaattatgaccgtgtgacatagcctttgtgtgatacatattctttccatttctggattctgtcatgtagtttgcaaaacaagactagaaagtttctatgtcgttgcttattttcaccgacaaattcaacacaacagtatggttgaaggatagtctcatccgagactgtcaaccgtgtgttgtgctgtattcctgacactgtttagcacttcacacatattattttatttaatccttacagcagcgttgtgaaatgggtctgtctcccattttacaaatgagaaaagagaagtcactttgtgtcacttcagggacacatgagcttaggtagcttttccccacttaacttagtctgtaggtagcaaagctggaacttgaatcctcatcttattgattgcagaatctttctctgcactgctctttctgctacattttattttaagaatatttgggaaattaacagcattttgtctttgttactacaggggaaaacaaactatcctagtaattgtatgttttatgttcccagggaagcaaaggtgtctaccagtaccactggcaaagccacaatgtcaagcacagtggtgtggacgacatggtgctactgtccaagatcacagagaactccatcgtggagaatctgaagaagagatacatggatgactacatttttacatatataggatctgtattaatctcagtcaaccctttcaagcagatgccatattttggggaaaaggaaattgaaatgtaccaaggagcggcacagtatgaaaacccaccacatatctatgcccttgcagataatatgtacagaaacatgatcattgacagagagaaccagtgcgtcattatcagtggtgaaagtggtgctggaaaaacagtggctgccaaatatatcatgagctacatctccagagtgtctggaggagggaccaaagtccagcacgtgaaggacattatcctgcagtccaacccgctgctggaggccttcgggaacgccaagaccgtccggaacaacaactccagccgatttggaaaatactttgaaatccagttcagtccaggtggggaaccagatggtggaaagatctccaacttccttctggaaaaatctagggtggtgatgaggaacccaggagagcggagttttcacatattttaccagctcatcgagggcgcctctgcagagcagaaacacagccttggcatcaccagcatggactattattactacctgagcctctcgggctcatacaaggttgatgacattgacgacaggcgggagtttcaggaaactctgcacgccatgaatgtgattgggatctttgcagaagagcaaacgctggtgttgcagatagtggcgggtattctccacctgggaaacatcagcttcaaagaagttggcaactacgcggctgtggagagtgaagagtttttagcttttcctgcatatctgctagggataaaccaggaccggttgaaagaaaagctaacaagccggcagatggatagcaagtggggaggcaaatccgaatccatccacgtgaccctcaacgtagagcaggcctgttacacccgggatgcgctcgccaaggccctgcacgcccgggtctttgatttcttggtagattccatcaataaagccatggagaaagaccatgaagaatacaacattggcgtcctagacatctatggctttgaaatattccagaaaaatggctttgaacagttttgtatcaattttgttaatgaaaaactgcagcagatttttattgaactgacattaaaggcagaacaggaagaatatgttcaagagggaataagatggacacccattgagtactttaataataaaatcgtatgtgacctcatagagaacaaagtgaaccctcctggcatcatgagcatcctggatgacgtgtgcgccacgatgcatgcggtgggtgagggggcagatcagacgctgctccagaaacttcagatgcagattgggagtcatgagcacttcaacagttggaaccaaggcttcatcattcatcattatgctgggaaggtatcctatgacatggatggcttttgtgaaaggaaccgggatgtgctttttatggatctcatcgagcttatgcagagcagcgagctgcctttcataaagtctttatttccggaaaatctgcaggctgacaagaaagggcgcccaactactgccggaagcaaaataaagaaacaagccaatgaccttgtgagcaccctgatgaaatgtacgccccactacattcgctgcatcaagccaaacgaaaccaagaagcccagagactgggaggaaagcagggtaaagcatcaagtcgaatatttgggtctgaaagagaacattcgagtgagaagagctggctatgcctatcggcgcatcttccaaaaattcctacagaggtatgccattctgaccaaagccacctggccttcttggcagggagaggagaagcaaggcgtcctgcacctgctgcagtcggtcaacatggacagcgaccagttccagctggggaggagtaaagtgttcatcaaagcccccgagtctctatttcttttagaagagatgagagagagaaagtatgatgggtatgctcgagtgatacagaaatcatggaggaaattcgtggcccggaagaaatacgttcaaatgagagaagaagcctcagacctcttattgaacaagaaggagagaaggagaaacagtattaacaggaactttataggggattatattgggatggaagagcacccagaactccagcagttcgtgggcaagagggagaagattgatttcgcagacacagtcaccaagtatgacaggaggttcaagggtgtaaagcgagacctgctccttaccccaaagtgcttgtacttaatcggacgagaaaaagtcaaacagggcccagacaagggcctggtgaaagaagtcctgaagcggaaaatcgagatagaacggatcttgtctgtgtccctcagtactatgcaggatgacatttttattctccatgagcaagagtatgacagtttgcttgaatctgtcttcaaaactgaattcctaagcctcttagcaaagcgttacgaggagaagacccagaagcaactacctctgaaattcagcaatacgcttgaactgaagttgaaaaaggaaaactggggcccctggagtgcaggggggctcccggcaagtgcagttccaccaagggtttggggacctggctgtcctcaagcccagtaacaaagtgctgcaggtcagcatcggacctggactgcccaagaactcccgtcctaccagaaggaacactacccaaaatacaggttattccagtgggactcaaaatgccaactacccagtgagagctgcccctcctcccccaggataccatcagaacggagtcatcagaaaccagtatgtgccatatccccatgctcctggaagccagaggtccaatcagaaaagcctgtacacctccatggcccgcccgcccttgcctcggcagcagtctaccagttcagaccgagtgtcacagacgccagagagcctggatttcctcaaggtcccggaccagggagctgcaggggtcaggagacaaacaaccagtcggcctcccccagcagggggcagacccaagccccagcccaagcccaagcctcaggtgccacagtgcaaggctttgtatgcctatgacgctcaggacacagacgaactcagctttaatgccaatgacattattgatattatcaaagaagatccttctggctggtggacgggtcgactacgaggcaagcagggcctgttccccaacaactatgtgaccaagatctgaggtgcccgtgactctgacacatggggcagaggagctccaggcacagaccaggggaggggatatttaggggctccccttacaatccacaatgagcaattgcttctccaaggcctggagctattctggtaccttccccatggaggacactgaaaaggctgggttggggacagggagtatcactccataagtgatcctaaaaggtagcctcttcataggaacccaggaggacaaaaccaccatgcattaagatttatttattgtatttaaacctggtgagaggacaagtgaggtctgctcagaccttgtaggcttctatcaaaacagcaccctgcttgctcaccaggcctagagaatggctgtaggtggccgctgacaagtgcctttagttgaagagcacatttctttcatctctcttgtccatacctgatagacacattcctctctgccaccttccttcagggaggacccgccctctgcagactgggcttagcgtgagcaggcacttcccatgtacgtgccaagggtaagctggcctgctgagcccagggcgacagaggggcactggtttacactttgccgggaccatcagggccgccaagcaggtcaggggctgggggctgggggctgggctgctggctttgctttctctgggtcttcaattagaatgtggctggcccatattggtttgtgtttaaatgctgtacttactacaagaaggatcttttttcaagctgtacatttataaaaacagatcatatactgtatatataaaaatcttgagatggtagaaacatgtatgaatgtactaagtagtattccactgtactcattcataaggtaggttttcttacaaaactcacaccaggtacttaaagatgtgctctgcttttttccaactacggagtgtcactgctttctagctcagtccctgcagactcttctcaactctttccctataggaaacttactccgcgtcctgcccccacctcctaaataaataaaggaatcggcgaaca

SEQ ID NO: 314886 - DNA, 4623 bp, Homo sapiens
cgagactcagccagaggagtacggattaaggggccgaagaaagaggagtgaggcaggggagcgaggcggacgctccgagcgcatcggactcacctgggccggcggcgagcggcgagtacgagtggactcttgccctccgcagcatgcgccccgcctgctaagtcgccgccgtctcgccctcacctagcaccgccaatcccgcctggatggagtcccctctgggttcccattggctcctgtgagtgcttgggtgtcgggagcctgtttttggcgaggggaaccaacttttgaagttcgcccagaagactgcgttccagccccagttccccggcagcgggacccggcgaagacgcgaccgcggcgcgagtcaccatgggaagcaaaggtgtctaccagtaccactggcaaagccacaatgtcaagcacagtggtgtggacgacatggtgctactgtccaagatcacagagaactccatcgtggagaatctgaagaagagatacatggatgactacatttttacatatataggatctgtattaatctcagtcaaccctttcaagcagatgccatattttggggaaaaggaaattgaaatgtaccaaggagcggcacagtatgaaaacccaccacatatctatgcccttgcagataatatgtacagaaacatgatcattgacagagagaaccagtgcgtcattatcagtggtgaaagtggtgctggaaaaacagtggctgccaaatatatcatgagctacatctccagagtgtctggaggagggaccaaagtccagcacgtgaaggacattatcctgcagtccaacccgctgctggaggccttcgggaacgccaagaccgtccggaacaacaactccagccgatttggaaaatactttgaaatccagttcagtccaggtggggaaccagatggtggaaagatctccaacttccttctggaaaaatctagggtggtgatgaggaacccaggagagcggagttttcacatattttaccagctcatcgagggcgcctctgcagagcagaaacacagccttggcatcaccagcatggactattattactacctgagcctctcgggctcatacaaggttgatgacattgacgacaggcgggagtttcaggaaactctgcacgccatgaatgtgattgggatctttgcagaagagcaaacgctggtgttgcagatagtggcgggtattctccacctgggaaacatcagcttcaaagaagttggcaactacgcggctgtggagagtgaagagtttttagcttttcctgcatatctgctagggataaaccaggaccggttgaaagaaaagctaacaagccggcagatggatagcaagtggggaggcaaatccgaatccatccacgtgaccctcaacgtagagcaggcctgttacacccgggatgcgctcgccaaggccctgcacgcccgggtctttgatttcttggtagattccatcaataaagccatggagaaagaccatgaagaatacaacattggcgtcctagacatctatggctttgaaatattccagaaaaatggctttgaacagttttgtatcaattttgttaatgaaaaactgcagcagatttttattgaactgacattaaaggcagaacaggaagaatatgttcaagagggaataagatggacacccattgagtactttaataataaaatcgtatgtgacctcatagagaacaaagtgaaccctcctggcatcatgagcatcctggatgacgtgtgcgccacgatgcatgcggtgggtgagggggcagatcagacgctgctccagaaacttcagatgcagattgggagtcatgagcacttcaacagttggaaccaaggcttcatcattcatcattatgctgggaaggtatcctatgacatggatggcttttgtgaaaggaaccgggatgtgctttttatggatctcatcgagcttatgcagagcagcgagctgcctttcataaagtctttatttccggaaaatctgcaggctgacaagaaagggcgcccaactactgccggaagcaaaataaagaaacaagccaatgaccttgtgagcaccctgatgaaatgtacgccccactacattcgctgcatcaagccaaacgaaaccaagaagcccagagactgggaggaaagcagggtaaagcatcaagtcgaatatttgggtctgaaagagaacattcgagtgagaagagctggctatgcctatcggcgcatcttccaaaaattcctacagaggtatgccattctgaccaaagccacctggccttcttggcagggagaggagaagcaaggcgtcctgcacctgctgcagtcggtcaacatggacagcgaccagttccagctggggaggagtaaagtgttcatcaaagcccccgagtctctatttcttttagaagagatgagagagagaaagtatgatgggtatgctcgagtgatacagaaatcatggaggaaattcgtggcccggaagaaatacgttcaaatgagagaagaagcctcagacctcttattgaacaagaaggagagaaggagaaacagtattaacaggaactttataggggattatattgggatggaagagcacccagaactccagcagttcgtgggcaagagggagaagattgatttcgcagacacagtcaccaagtatgacaggaggttcaagggtgtaaagcgagacctgctccttaccccaaagtgcttgtacttaatcggacgagaaaaagtcaaacagggcccagacaagggcctggtgaaagaagtcctgaagcggaaaatcgagatagaacggatcttgtctgtgtccctcagtactatgcaggatgacatttttattctccatgagcaagagtatgacagtttgcttgaatctgtcttcaaaactgaattcctaagcctcttagcaaagcgttacgaggagaagacccagaagcaactacctctgaaattcagcaatacgcttgaactgaagttgaaaaaggaaaactggggcccctggagtgcaggggggctcccggcaagtgcagttccaccaagggtttggggacctggctgtcctcaagcccagtaacaaagtgctgcaggtcagcatcggacctggactgcccaagaactcccgataccatcagaacggagtcatcagaaaccagtatgtgccatatccccatgctcctggaagccagaggtccaatcagaaaagcctgtacacctccatggcccgcccgcccttgcctcggcagcagtctaccagttcagaccgagtgtcacagacgccagagagcctggatttcctcaaggtcccggaccagggagctgcaggggtcaggagacaaacaaccagtcggcctcccccagcagggggcagacccaagccccagcccaagcccaagcctcaggtgccacagtgcaaggctttgtatgcctatgacgctcaggacacagacgaactcagctttaatgccaatgacattattgatattatcaaagaagatccttctggctggtggacgggtcgactacgaggcaagcagggcctgttccccaacaactatgtgaccaagatctgaggtgcccgtgactctgacacatggggcagaggagctccaggcacagaccaggggaggggatatttaggggctccccttacaatccacaatgagcaattgcttctccaaggcctggagctattctggtaccttccccatggaggacactgaaaaggctgggttggggacagggagtatcactccataagtgatcctaaaaggtagcctcttcataggaacccaggaggacaaaaccaccatgcattaagatttatttattgtatttaaacctggtgagaggacaagtgaggtctgctcagaccttgtaggcttctatcaaaacagcaccctgcttgctcaccaggcctagagaatggctgtaggtggccgctgacaagtgcctttagttgaagagcacatttctttcatctctcttgtccatacctgatagacacattcctctctgccaccttccttcagggaggacccgccctctgcagactgggcttagcgtgagcaggcacttcccatgtacgtgccaagggtaagctggcctgctgagcccagggcgacagaggggcactggtttacactttgccgggaccatcagggccgccaagcaggtcaggggctgggggctgggggctgggctgctggctttgctttctctgggtcttcaattagaatgtggctggcccatattggtttgtgtttaaatgctgtacttactacaagaaggatcttttttcaagctgtacatttataaaaacagatcatatactgtatatataaaaatcttgagatggtagaaacatgtatgaatgtactaagtagtattccactgtactcattcataaggtaggttttcttacaaaactcacaccaggtacttaaagatgtgctctgcttttttccaactacggagtgtcactgctttctagctcagtccctgcagactcttctcaactctttccctataggaaacttactccgcgtcctgcccccacctcctaaataaataaaggaatcggcgaaca

SEQ ID NO: 314887 - DNA, 4650 bp, Homo sapiens
cgagactcagccagaggagtacggattaaggggccgaagaaagaggagtgaggcaggggagcgaggcggacgctccgagcgcatcggactcacctgggccggcggcgagcggcgagtacgagtggactcttgccctccgcagcatgcgccccgcctgctaagtcgccgccgtctcgccctcacctagcaccgccaatcccgcctggatggagtcccctctgggttcccattggctcctgtgagtgcttgggtgtcgggagcctgtttttggcgaggggaaccaacttttgaagttcgcccagaagactgcgttccagccccagttccccggcagcgggacccggcgaagacgcgaccgcggcgcgagtcaccatgggaagcaaaggtgtctaccagtaccactggcaaagccacaatgtcaagcacagtggtgtggacgacatggtgctactgtccaagatcacagagaactccatcgtggagaatctgaagaagagatacatggatgactacatttttacatatataggatctgtattaatctcagtcaaccctttcaagcagatgccatattttggggaaaaggaaattgaaatgtaccaaggagcggcacagtatgaaaacccaccacatatctatgcccttgcagataatatgtacagaaacatgatcattgacagagagaaccagtgcgtcattatcagtggtgaaagtggtgctggaaaaacagtggctgccaaatatatcatgagctacatctccagagtgtctggaggagggaccaaagtccagcacgtgaaggacattatcctgcagtccaacccgctgctggaggccttcgggaacgccaagaccgtccggaacaacaactccagccgatttggaaaatactttgaaatccagttcagtccaggtggggaaccagatggtggaaagatctccaacttccttctggaaaaatctagggtggtgatgaggaacccaggagagcggagttttcacatattttaccagctcatcgagggcgcctctgcagagcagaaacacagccttggcatcaccagcatggactattattactacctgagcctctcgggctcatacaaggttgatgacattgacgacaggcgggagtttcaggaaactctgcacgccatgaatgtgattgggatctttgcagaagagcaaacgctggtgttgcagatagtggcgggtattctccacctgggaaacatcagcttcaaagaagttggcaactacgcggctgtggagagtgaagagtttttagcttttcctgcatatctgctagggataaaccaggaccggttgaaagaaaagctaacaagccggcagatggatagcaagtggggaggcaaatccgaatccatccacgtgaccctcaacgtagagcaggcctgttacacccgggatgcgctcgccaaggccctgcacgcccgggtctttgatttcttggtagattccatcaataaagccatggagaaagaccatgaagaatacaacattggcgtcctagacatctatggctttgaaatattccagaaaaatggctttgaacagttttgtatcaattttgttaatgaaaaactgcagcagatttttattgaactgacattaaaggcagaacaggaagaatatgttcaagagggaataagatggacacccattgagtactttaataataaaatcgtatgtgacctcatagagaacaaagtgaaccctcctggcatcatgagcatcctggatgacgtgtgcgccacgatgcatgcggtgggtgagggggcagatcagacgctgctccagaaacttcagatgcagattgggagtcatgagcacttcaacagttggaaccaaggcttcatcattcatcattatgctgggaaggtatcctatgacatggatggcttttgtgaaaggaaccgggatgtgctttttatggatctcatcgagcttatgcagagcagcgagctgcctttcataaagtctttatttccggaaaatctgcaggctgacaagaaagggcgcccaactactgccggaagcaaaataaagaaacaagccaatgaccttgtgagcaccctgatgaaatgtacgccccactacattcgctgcatcaagccaaacgaaaccaagaagcccagagactgggaggaaagcagggtaaagcatcaagtcgaatatttgggtctgaaagagaacattcgagtgagaagagctggctatgcctatcggcgcatcttccaaaaattcctacagaggtatgccattctgaccaaagccacctggccttcttggcagggagaggagaagcaaggcgtcctgcacctgctgcagtcggtcaacatggacagcgaccagttccagctggggaggagtaaagtgttcatcaaagcccccgagtctctatttcttttagaagagatgagagagagaaagtatgatgggtatgctcgagtgatacagaaatcatggaggaaattcgtggcccggaagaaatacgttcaaatgagagaagaagcctcagacctcttattgaacaagaaggagagaaggagaaacagtattaacaggaactttataggggattatattgggatggaagagcacccagaactccagcagttcgtgggcaagagggagaagattgatttcgcagacacagtcaccaagtatgacaggaggttcaagggtgtaaagcgagacctgctccttaccccaaagtgcttgtacttaatcggacgagaaaaagtcaaacagggcccagacaagggcctggtgaaagaagtcctgaagcggaaaatcgagatagaacggatcttgtctgtgtccctcagtactatgcaggatgacatttttattctccatgagcaagagtatgacagtttgcttgaatctgtcttcaaaactgaattcctaagcctcttagcaaagcgttacgaggagaagacccagaagcaactacctctgaaattcagcaatacgcttgaactgaagttgaaaaaggaaaactggggcccctggagtgcaggggggctcccggcaagtgcagttccaccaagggtttggggacctggctgtcctcaagcccagtaacaaagtgctgcaggtcagcatcggacctggactgcccaagaactcccgtcctaccagaaggaacactacccaaaatacaggttattccagtgggactcaaaatgccaactacccagtgagagctgcccctcctcccccaggataccatcagaacggagtcatcagaaaccagtatgtgccatatccccatgctcctggaagccagaggtccaatcagaaaagcctgtacacctccatggcccgcccgcccttgcctcggcagcagtctaccagttcagaccgagtgtcacagacgccagagagcctggatttcctcaaggtcccggaccagggagctgcaggggtcaggagacaaacaaccagtcggcctcccccagcagggggcagacccaagccccagcccaagcccaagcctcaggtgccacagtgcaaggctttgtatgcctatgacgctcaggacacagacgaactcagctttaatgccaatgacattattgatattatcaaagaagatccttctggctggtggacgggtcgactacgaggcaagcagggcctgttccccaacaactatgtgaccaagatctgaggtgcccgtgactctgacacatggggcagaggagctccaggcacagaccaggggaggggatatttaggggctccccttacaatccacaatgagcaattgcttctccaaggcctggagctattctggtaccttccccatggaggacactgaaaaggctgggttggggacagggagtatcactccataagtgatcctaaaaggtagcctcttcataggaacccaggaggacaaaaccaccatgcattaagatttatttattgtatttaaacctggtgagaggacaagtgaggtctgctcagaccttgtaggcttctatcaaaacagcaccctgcttgctcaccaggcctagagaatggctgtaggtggccgctgacaagtgcctttagttgaagagcacatttctttcatctctcttgtccatacctgatagacacattcctctctgccaccttccttcagggaggacccgccctctgcagactgggcttagcgtgagcaggcacttcccatgtacgtgccaagggtaagctggcctgctgagcccagggcgacagaggggcactggtttacatttgctttctctgggtcttcaattagaatgtggctggcccatattggtttgtgtttaaatgctgtacttactacaagaaggatcttttttcaagctgtacatttataaaaacagatcatatactgtatatataaaaatcttgagatggtagaaacatgtatgaatgtactaagtagtattccactgtactcattcataaggtaggttttcttacaaaactcacaccaggtacttaaagatgtgctctgcttttttccaactacggagtgtcactgctttctagctcagtccctgcagactcttctcaactctttccctataggaaacttactccgcgtcctgcccccacctcctaaataaataaaggaatcggcgaaca

SEQ ID NO: 314888 - DNA, 1362 bp, Homo sapiens
gctcaggaccagatcgtactcagctttaatgccaatgacattattgatattatcaaagaagatccttctggctggtggacgggtcgactacgaggcaagcagggcctgttccccaacaactatgtgaccaagatctgaggtgcccgtgactctgacacatggggcagaggagctccaggataccatcagaacggagtcatcagaaaccagtatgtgccatatccccatgctcctggaagccagaggtccaatcagaaaagcctgtacacctccatggcccgcccgcccttgcctcggcagcagtctaccagttcagaccgagtgtcacagacgccagagagcctggatttcctcaaggtcccggaccagggagctgcaggggtcaggagacaaacaaccagtcggcctcccccagcagggggcagacccaagccccagcccaagcccaagcctcaggtgccacagtgcaaggctttgtatgcctatgagacactgaaaaggctgggttggggacagggagtatcactccataagtgatcctaaaaggtagcctcttcataggaacccaggaggacaaaaccaccatgcattaagatttatttattgtatttaaacctggtgagaggacaagtgaggtctgctcagaccttgtaggcttctatcaaaacagcaccctgcttgctcaccaggcctagagaatggctgtaggtggccgctgacaagtgcctttagttgaagagcacatttctttcatctctcttgtccatacctgatagacacattcctctctgccaccttccttcagggaggacccgccctctgcagactgggcttagcgtgagcaggcacttcccatgtacgtgccaagggtaagctggcctgctgagcccagggcgacagaggggcactggtttacactttgccgggaccatcagggccgccaagcaggtcaggggctgggggctgggggctgggctgctggctttgctttctctgggtcttcaattagaatgtggctggcccatattggtttgtgtttaaatgctgtacttactacaagaaggatcttttttcaagctgtacatttataaaaacagatcatatactgtatatataaaaatcttgagatggtagaaacatgtatgaatgtactaagtagtattccactgtactcattcataaggtaggttttcttacaaaactcacaccaggtacttaaagatgtgctctgcttttttccaactacggagtgtcactgctttctagctcagtccctgcagactcttctcaactctttccctataggaaacttactccgcgtcctgcccccacctcctaaataaataaaggaatcggcgaaca

SEQ ID NO: 314889 - DNA, 3212 bp, Homo sapiens
cgagactcagccagaggagtacggattaaggggccgaagaaagaggagtgaggcaggggagcgaggcggacgctccgagcgcatcggactcacctgggccggcggcgagcggcgagtacgagtggactcttgccctccgcagcatgcgccccgcctgctaagtcgccgccgtctcgccctcacctagcaccgccaatcccgcctggatggagtcccctctgggttcccattggctcctgtgagtgcttgggtgtcgggagcctgtttttggcgaggggaaccaacttttgaagttcgcccagaagactgcgttccagccccagttccccggcagcgggacccggcgaagacgcgaccgcggcgcgagtcaccatgggaagcaaaggtgtctaccagtaccactggcaaagccacaatgtcaagcacagtggtgtggacgacatggtgctactgtccaagatcacagagaactccatcgtggagaatctgaagaagagatacatggatgactacatttttacatatataggatctgtattaatctcagtcaaccctttcaagcagatgccatattttggggaaaaggaaattgaaatgtaccaaggagcggcacagtatgaaaacccaccacatatctatgcccttgcagataatatgtacagaaacatgatcattgacagagagaaccagtgcgtcattatcagtggtgaaagtggtgctggaaaaacagtggctgccaaatatatcatgagctacatctccagagtgtctggaggagggaccaaagtccagcacgtgaaggacattatcctgcagtccaacccgctgctggaggccttcgggaacgccaagaccgtccggaacaacaactccagccgatttggaaaatactttgaaatccagttcagtccaggtggggaaccagatggtggaaagatctccaacttccttctggaaaaatctagggtggtgatgaggaacccaggagagcggagttttcacatattttaccagctcatcgagggcgcctctgcagagcagaaacacagccttggcatcaccagcatggactattattactacctgagcctctcgggctcatacaaggttgatgacattgacgacaggcgggagtttcaggaaactctgcacgccatgaatgtgattgggatctttgcagaagagcaaacgctggtgttgcagatagtggcgggtattctccacctgggaaacatcagcttcaaagaagttggcaactacgcggctgtggagagtgaagagtttttagcttttcctgcatatctgctagggataaaccaggaccggttgaaagaaaagctaacaagccggcagatggatagcaagtggggaggcaaatccgaatccatccacgtgaccctcaacgtagagcaggcctgttacacccgggatgcgctcgccaaggccctgcacgcccgggtctttgatttcttggtagattccatcaataaagccatggagaaagaccatgaagaatacaacattggcgtcctagacatctatggctttgaaatattccagaaaaatggctttgaacagttttgtatcaattttgttaatgaaaaactgcagcagatttttattgaactgacattaaaggcagaacaggaagaatatgttcaagagggaataagatggacacccattgagtactttaataataaaatcgtatgtgacctcatagagaacaaagtgaaccctcctggcatcatgagcatcctggatgacgtgtgcgccacgatgcatgcggtgggtgagggggcagatcagacgctgctccagaaacttcagatgcagattgggagtcatgagcacttcaacagttggaaccaaggcttcatcattcatcattatgctgggaaggtatcctatgacatggatggcttttgtgaaaggaaccgggatgtgctttttatggatctcatcgagcttatgcagagcagcgagctgcctttcataaagtctttatttccggaaaatctgcaggctgacaagaaagggcgcccaactactgccggaagcaaaataaagaaacaagccaatgaccttgtgagcaccctgatgaaatgtacgccccactacattcgctgcatcaagccaaacgaaaccaagaagcccagagactgggaggaaagcagggtaaagcatcaagtcgaatatttgggtctgaaagagaacattcgagtgagaagagctggctatgcctatcggcgcatcttccaaaaattcctacagaggtaatgaactagtgactctggccttttttaaaacaggtttattgagctataattcaaatctatacaattcacccacttcaagcgtacgagtcaatggcttttaacgtattcacagagttgtgcaactatcaccaccgttaattttaggacattttcttaccctgaaaagaaatcacgcttccctttgttgtcaacctccaattctccccttgcctctgggcccagtcagtcacttatctaccttctgtctatagatttgcctatgcttttcatagcaatggaatcatatatgtgtcctctgtgactgacttctttcactgaacataagattcatccatgttgttgcatttccatgcttccttcctgttaattgcagaataatattccattgtgtggatataccacagtttacttatgcattcatcagttgataaacgtcagttgtttccacttcttggctattatgaataatgctgctatgaaaatctgtgtacaagtttttatgtggtcatatttcatttctttcgggtatatgcttcaaagtgcaattgcttggtcatatggtaactctgcatttaacctttgagaggaactgcctgattgttttctgaagtggctgcaccacttcacattttgtaccaccagcagtatttgaggcttccaatttatctaaatccttgccaacataagttattttctaaccatcctagtgagtgtggagtggtatttcatgatggttttgatttgcatttcccagatggcaaattatattgaggattttttcatgtgcctgttagccatttgtatttcctctttggagaaatgtctgtgaggccctttgccattttttaattgggtgttttgtctttttatcattgcattgtaataataattcttttactgttatttattgtagaataaatcagtagccataag

SEQ ID NO: 314890 - DNA, 1970 bp, Homo sapiens
cgagactcagccagaggagtacggattaaggggccgaagaaagaggagtgaggcaggggagcgaggcggacgctccgagcgcatcggactcacctgggccggcggcgagcggcgagtacgagtggactcttgccctccgcagcatgcgccccgcctgctaagtcgccgccgtctcgccctcacctagcaccgccaatcccgcctggatggagtcccctctgggttcccattggctcctgtgagtgcttgggtgtcgggagcctgtttttggcgaggggaaccaacttttgaagttcgcccagaagactgcgttccagccccagttccccggcagcgggacccggcgaagacgcgaccgcggcgcgagtcaccatgggaagcaaaggtgtctaccagtaccactggcaaagccacaatgtcaagcacagtggtgtggacgacatggtgctactgtccaagatcacagagaactccatcgtggagaatctgaagaagagatacatggatgactacatttttacatatataggatctgtattaatctcagtcaaccctttcaagcagatgccatattttggggaaaaggaaattgaaatgtaccaaggagcggcacagtatgaaaacccaccacatatctatgcccttgcagataatatgtacagaaacatgatcattgacagagagaaccagtgcgtcattatcagtggtgaaagtggtgctggaaaaacagtggctgccaaatatatcatgagctacatctccagagtgtctggaggagggaccaaagtccagcacgtgaaggacattatcctgcagtccaacccgctgctggaggccttcgggaacgccaagaccgtccggaacaacaactccagccgatttggaaaatactttgaaatccagttcagtccaggtggggaaccagatggtggaaagatctccaacttccttctggaaaaatctagggtggtgatgaggaacccaggagagcggagttttcacatattttaccagctcatcgagggcgcctctgcagagcagaaacacagccttggcatcaccagcatggactattattactacctgagcctctcgggctcatacaaggttgatgacattgacgacaggcgggagtttcaggaaactctgcacgccatgaatgtgattgggatctttgcagaagagcaaacgctggtgttgcagatagtggcgggtattctccacctgggaaacatcagcttcaaagaagttggcaactacgcggctgtggagagtgaagagtttttagcttttcctgcatatctgctagggataaaccaggaccggttgaaagaaaagctaacaagccggcagatggatagcaagtggggaggcaaatccgaatccatccacgtgaccctcaacgtagagcaggcctgttacacccgggatgcgctcgccaaggccctgcacgcccgggtctttgatttcttggtagattccatcaataaagccatggagaaagaccatgaagaatacaacattggcgtcctagacatctatggctttgaaatattccagaaaaatggctttgaacagttttgtatcaattttgttaatgaaaaactgcagcagatttttattgaactgacattaaaggcagaacaggaagaatatgttcaagagggaataagatggacacccattgagtactttaataataaaatcgtatgtgacctcatagagaacaaagtgaaccctcctggcatcatgagcatcctggatgacgtgtgcgccacgatgcatgcggtgggtgagggggcagatcagacgctgctccagaaacttcagatgcagattgggagtcatgagcacttcaacagttggaagctaggaatcatgagccatgagcattgtgcgataggtgacgaaatgagacgcatcggtcccttgatatgtccttgcagggggcgttcaccgaacgcgtgggg

SEQ ID NO: 314891 - DNA, 3295 bp, Homo sapiens
agcggtgtcaaaggcttgtgagaatctggtggatgctggaccttgctgctgctgctactgctgtttccaggggctgcagagcatggactgttaaatcttgcacttcttctgagtgagctgaattcttgccgccaggatggggaaacagaacagcaagctgcgcccggaggtcatgcaggacttgctggaaagcacagactttacagagcatgagatccaggaatggtataaaggcttcttgagagactgccccagtggacatttgtcaatggaagagtttaagaaaatatatgggaactttttcccttatggggatgcttccaaatttgcagagcatgtcttccgcaccttcgatgcaaatggagatgggacaatagactttagagaattcatcatcgccttgagtgtaacttcgagggggaagctggagcagaagctgaaatgggccttcagcatgtacgacctggacggaaatggctatatcagcaaggcagagatgctagagatcgtgcaggcaatctataagatggtttcctctgtaatgaaaatgcctgaagatgagtcaaccccagagaaaagaacagaaaagatcttccgccagatggacaccaatagagacggaaaactctccctggaagagttcatccgaggagccaaaagcgacccgtccattgtgcgcctcctgcagtgcgacccgagcagtgccggccagttctgagccctgcgcccaccaatcgaattgtagagctgcttgtgttcccttttgattcttctttttaacaatttttttttttttttgccaaacaatatcaatggtgatgccgtcccctgtgcggtctgatgcgccttcctccgtgacgccttcagcttcttttgtcgtggatgcttcgtgggaatgcccagagccccagtgtgcttgtggagagcatggacagacttcgtggtgttcattgtttgatgatttttaatcgttactattatttttttttattctaatgtctctgttctaaaacgtaagactcgggggttggggcaaaagaagggaaacccatccagtcctgtgattctattgcaagcttcaaggggcttttgtttgaaagacaaaactccccacctgggtctgttgtcacacgtgccgtaggggtgatggatggcaccggatgctggattccccaagaacaagttaccctctggggtgaggctattccagcgagctgggacatttccccatgggggcccactcccctctcttccccagcaggctgtagtttctaagctgtgaacatttcaagataaattaacagaggagaggaaaaagatggctcagctattttttcacaggtttacactagttgagctaatatgcgtgtctttggaaattaaacacaaatggtaacatattccaaaaccagacccatcttgttgcctattgtgataaaataaaaagacggctgtatataacatattgggtaatgcagaccaaattaagtgttttgccttgtttaaatgaaatgcatgtttagtgagcactaatacaatcttattccagaagactgtttttagtagcttattgtgaagtaagacaactataatgaatgtctgtcttgtttggaagtcatatctgtctttgcacaaatgtaccaatcgacaagtatattttatatattccataaaaatacaaagtaaccctgactagggcccaactttaattttgaatgcatttccagagtggccatgcctagagggcagatgcagagcaggtggtagtgggacaggacaattggagcacaggaatgttaacatgtatgacaggggaccagtagggtggtttccctctcaggcccagcagcccattgacagcattagactggcggcatggtgcttttctgagcagatcaatactctgcagactcgaaaaaacatcacatacattcttggaacttcccagtggtttaatctatgtgcatggttagggagccaggtctggaatattcagtttccctgcccctgttaaagaatcagaggttgggcagtcatcaaattcatcataaagacatgggcaagtgtgtctgtggtttccaaggcccccctatggagaatccaaaagtattttccattgccgtgctctttgaatgcagacttctatttccagaagtgacagcacaagtctgagttgctgtttggtctggtgacctcagacacactaatttgaattgaaagctaagagtaaaaatttgctggttacaggcgagtcatactcttgcaagtagttagcaaagggaggcccaaattctcaaggttgttgatggggaacttgccactaagagaaggcagagaggtccctagtgggtatatttgctgccaagccacttgccaaagaagaggaaccacagaaagagagacatcatgaccaggagaaaaatgtgactagacatgctaacctccaggtttttatatatgacttgagtctgctgtaattggcagcagaaatccaaatttgtatggtagaccaaaaagaaccaaatccatagggtgaaattttgagacctagactctgtaaaaataatcctagtcttcctccaggggtcagttcctcacagtggttctgtaccaaaacttgccaaattcctccatggccaagtgttaaaatctgtgtttggaaaatagcgaattaacctaagacacagaaggcagactgggtgaggagacctagcatgccctattggcagtgctcaggagctgcatcccacttttccctgctctgaatcgaagtcctagttccttcctttgattctcctttggtaggtggaatcagttaatgttttgagaaacctgcctgggctctgcccttagtcatgacatctcgctgagccagacccactctgttccttggaacctagagctggagtgaggagtagaggtctccggctattccagaaagaaaagtgagccacatgcaggctgatgaatgccgacacttccagaatgtatagaaatagtccctgtcctggcctgccactgaccctgtctgtattttctcggaggttgtttttctccttctccttcccaggaaggtctttgtatgtcgaatccagtgcactcaagtttggccaagggactccacagcacccagaagactgcatgcctcaaggtttatgtcactcctctgctgggctgttcattgtcattgctgtgttcagggacctttggaaataaaacctgttctgtcccaaataaaaccagcctgtgatgttcaagggactggaataaagtggcttacgacctgaaggattct

SEQ ID NO: 314892 - DNA, 3365 bp, Homo sapiens
  misc_feature (59)..(59): n is a, c, g, or t
gggggaggcgggcggagggaaggcgctgccgctgctgccgccgcctcgcccgaagcganacagacgctgggagcggccgaggcgagtgatttcttctgacttgagcctgcagtgtgctgtgagagatctaccactagattatctcaactttggtctcctgggaccactcgttgctgacagtcagaaactgaattcttgccgccaggatggggaaacagaacagcaagctgcgcccggaggtcatgcaggacttgctggaaagcacagactttacagagcatgagatccaggaatggtataaaggcttcttgagagactgccccagtggacatttgtcaatggaagagtttaagaaaatatatgggaactttttcccttatggggatgcttccaaatttgcagagcatgtcttccgcaccttcgatgcaaatggagatgggacaatagactttagagaattcatcatcgccttgagtgtaacttcgagggggaagctggagcagaagctgaaatgggccttcagcatgtacgacctggacggaaatggctatatcagcaaggcagagatgctagagatcgtgcaggcaatctataagatggtttcctctgtaatgaaaatgcctgaagatgagtcaaccccagagaaaagaacagaaaagatcttccgccagatggacaccaatagagacggaaaactctccctggaagagttcatccgaggagccaaaagcgacccgtccattgtgcgcctcctgcagtgcgacccgagcagtgccggccagttctgagccctgcgcccaccaatcgaattgtagagctgcttgtgttcccttttgattcttctttttaacaatttttttttttttttgccaaacaatatcaatggtgatgccgtcccctgtgcggtctgatgcgccttcctccgtgacgccttcagcttcttttgtcgtggatgcttcgtgggaatgcccagagccccagtgtgcttgtggagagcatggacagacttcgtggtgttcattgtttgatgatttttaatcgttactattatttttttttattctaatgtctctgttctaaaacgtaagactcgggggttggggcaaaagaagggaaacccatccagtcctgtgattctattgcaagcttcaaggggcttttgtttgaaagacaaaactccccacctgggtctgttgtcacacgtgccgtaggggtgatggatggcaccggatgctggattccccaagaacaagttaccctctggggtgaggctattccagcgagctgggacatttccccatgggggcccactcccctctcttccccagcaggctgtagtttctaagctgtgaacatttcaagataaattaacagaggagaggaaaaagatggctcagctattttttcacaggtttacactagttgagctaatatgcgtgtctttggaaattaaacacaaatggtaacatattccaaaaccagacccatcttgttgcctattgtgataaaataaaaagacggctgtatataacatattgggtaatgcagaccaaattaagtgttttgccttgtttaaatgaaatgcatgtttagtgagcactaatacaatcttattccagaagactgtttttagtagcttattgtgaagtaagacaactataatgaatgtctgtcttgtttggaagtcatatctgtctttgcacaaatgtaccaatcgacaagtatattttatatattccataaaaatacaaagtaaccctgactagggcccaactttaattttgaatgcatttccagagtggccatgcctagagggcagatgcagagcaggtggtagtgggacaggacaattggagcacaggaatgttaacatgtatgacaggggaccagtagggtggtttccctctcaggcccagcagcccattgacagcattagactggcggcatggtgcttttctgagcagatcaatactctgcagactcgaaaaaacatcacatacattcttggaacttcccagtggtttaatctatgtgcatggttagggagccaggtctggaatattcagtttccctgcccctgttaaagaatcagaggttgggcagtcatcaaattcatcataaagacatgggcaagtgtgtctgtggtttccaaggcccccctatggagaatccaaaagtattttccattgccgtgctctttgaatgcagacttctatttccagaagtgacagcacaagtctgagttgctgtttggtctggtgacctcagacacactaatttgaattgaaagctaagagtaaaaatttgctggttacaggcgagtcatactcttgcaagtagttagcaaagggaggcccaaattctcaaggttgttgatggggaacttgccactaagagaaggcagagaggtccctagtgggtatatttgctgccaagccacttgccaaagaagaggaaccacagaaagagagacatcatgaccaggagaaaaatgtgactagacatgctaacctccaggtttttatatatgacttgagtctgctgtaattggcagcagaaatccaaatttgtatggtagaccaaaaagaaccaaatccatagggtgaaattttgagacctagactctgtaaaaataatcctagtcttcctccaggggtcagttcctcacagtggttctgtaccaaaacttgccaaattcctccatggccaagtgttaaaatctgtgtttggaaaatagcgaattaacctaagacacagaaggcagactgggtgaggagacctagcatgccctattggcagtgctcaggagctgcatcccacttttccctgctctgaatcgaagtcctagttccttcctttgattctcctttggtaggtggaatcagttaatgttttgagaaacctgcctgggctctgcccttagtcatgacatctcgctgagccagacccactctgttccttggaacctagagctggagtgaggagtagaggtctccggctattccagaaagaaaagtgagccacatgcaggctgatgaatgccgacacttccagaatgtatagaaatagtccctgtcctggcctgccactgaccctgtctgtattttctcggaggttgtttttctccttctccttcccaggaaggtctttgtatgtcgaatccagtgcactcaagtttggccaagggactccacagcacccagaagactgcatgcctcaaggtttatgtcactcctctgctgggctgttcattgtcattgctgtgttcagggacctttggaaataaaacctgttctgtcccaaataaaaccagcctgtgatgttcaagggactggaataaagtggcttacgacctgaaggattct

SEQ ID NO: 314893 - DNA, 760 bp, Homo sapiens
agcggaaagcttggttatggccaggcccagtggctcatgtctgtaatcccagcacttgggaggtcgaggcaggaggattgcttgagcccaggagttcaaaaacagcctggccaacaagagatcctatcattattttaaaattcctcctcctccacgaagtccttcctgattccttcaaagaaatatcactcctccgaattcccagagtgatttcttctgacttgagcctgcagtgtgctgtgagagatctaccactagaagagtcatgtccttgggcttcagcttttgccttgttctaggctccaagataggcccatccaggcatggctgtgccttgactgacattggactccatgctctggagaggaccaggggctcagcatggagggtgctggccacttggtcctacctgtggatgcctgagggacagtctgaagcaggacaaacagaccacagaagttctcaggcatctctgtagcttgaggatcaggatggatatccatcgtggaaacttattgctgaacgagacccaggaaactgaacctctgaaaacatatatattgcaacaggttgtagttataatatattgctacctgtgacctattcccaaaaccaagaccaacattggaaatgattctcccagaaggagggctggctgagacgtgtctggttggcattgcctgcatggcttggtctagcacctgcggcctccaaaaccaaaggaaatgcctggtcctgctaattcctgagccatttgggg

SEQ ID NO: 314894 - DNA, 3491 bp, Homo sapiens
agcggtgtcaaaggcttgtgagaatctggtggatgctggaccttgctgctgctgctactgctgtttccaggggctgcagagcatggactgttaaatcttgcacttcttctgagtgagctgaattcttgccgccaggatggggaaacagaacagcaagctgcgcccggaggtcatgcaggacttgctggaaagcacagactttacagagcatgagatccaggaatggtataaaggcttcttgagagactgccccagtggacatttgtcaatggaagagtttaagaaaatatatgggaactttttcccttatggggatgcttccaaatttgcagagcatgtcttccgcaccttcgatgcaaatggagatgggacaatagactttagagaattcatcatcgccttgagtgtaacttcgagggggaagctggagcagaagctgaaatgggccttcagcatgtacgacctggacggaaatggctatatcagcaaggcagagatgctagagatcgtgcaggcaatctataagatggtttcctctgtaatgaaaatgcctgaagatgagtcaaccccagagaaaagaacagaaaagatcttccgccagatggacaccaatagagacggaaaactctccctggaagagttcatccgaggagccaaaagcgacccgtccattgtgcgcctcctgcagtgcgacccgagcagtgccggccagttctgagccctgcgcccaccaatcgaattgtagagctgcttgtgttcccttttgattcttctttttaacaatttttttttttttttgccaaacaatatcaatggtgatgccgtcccctgtgcggtctgatgcgccttcctccgtgacgccttcagcttcttttgtcgtggatgcttcgtgggaatgcccagagccccagtgtgcttgtggagagcatggacagacttcgtggtgttcattgtttgatgatttttaatcgttactattatttttttttattctaatgtctctgttctaaaacgtaagactcgggggttggggcaaaagaagggaaacccatccagtcctgtgattctattgcaagcttcaaggggcttttgtttgaaagacaaaactccccacctgggtctgttgtcacacgtgccgtaggggtgatggatggcaccggatgctggattccccaagaacaagttaccctctggggtgaggctattccagcgagctgggacatttccccatgggggcccactcccctctcttccccagcaggctgtagtttctaagctgtgaacatttcaagataaattaacagaggagaggaaaaagatggctcagctattttttcacaggtttacactagttgagctaatatgcgtgtctttggaaattaaacacaaatggtaacatattccaaaaccagacccatcttgttgcctattgtgataaaataaaaagacggctgtatataacatattgggtaatgcagaccaaattaagtgttttgccttgtttaaatgaaatgcatgtttagtgagcactaatacaatcttattccagaagactgtttttagtagcttattgtgaagtaagacaactataatgaatgtctgtcttgtttggaagtcatatctgtctttgcacaaatgtaccaatcgacaagtatattttatatattccataaaaatacaaagtaaccctgactagggcccaactttaattttgaatgcatttccagagtggccatgcctagagggcagatgcagagcaggtggtagtgggacaggacaattggagcacaggaatgttaacatgtatgacaggggaccagtagggtggtttccctctcaggcccagcagcccattgacagcattagactggcggcatggtgcttttctgagcagatcaatactctgcagactcgaaaaaacatcacatacattcttggaacttcccagtggtttaatctatgtgcatggttagggagccaggtctggaatattcagtttccctgcccctgttaaagaatcagaggttgggcagtcatcaaattcatcataaagacatgggcaagtgtgtctgtggtttccaaggcccccctatggagaatccaaaagtattttccattgccgtgctctttgaatgcagacttctatttccagaagtgacagcacaagtctgagttgctgtttggtctggtgacctcagacacactaatttgaattgaaagctaagagtaaaaatttgctggttacaggcgagtcatactcttgcaagtagttagcaaagggaggcccaaattctcaaggttgttgatggggaacttgccactaagagaaggcagagaggtccctagtgggtatatttgctgccaagccacttgccaaagaagaggaaccacagaaagagagacatcatgaccaggagaaaaatgtgactagacatgctaacctccaggtttttatatatgacttgagtctgctgtaattggcagcagaaatccaaatttgtatggtagaccaaaaagaaccaaatccatagggtgaaattttgagacctagactctgtaaaaataatcctagtcttcctccaggggtcagttcctcacagtggttctgtaccaaaacttgccaaattcctccatggccaagtgttaaaatctgtgtttggaaaatagcgaattaacctaagacacagaaggcagactgggtgaggagacctagcatgccctattggcagtgctcaggagctgcatcccacttttccctgctctgaatcgaagtcctagttccttcctttgattctcctttggtaggtggaatcagttaatgttttgagaaacctgcctgggctctgcccttagtcatgacatctcgctgagccagacccactctgttccttggaacctagagctggagtgaggagtagaggtctccggctattccagaaagaaaagtgagccacatgcaggctgatgaatgccgacacttccagaatgtatagaaatagtccctgtcctggcctgccactgaccctgtctgtattttctcggaggttgtttttctccttctccttcccaggaaggtctttgtatgtcgaatccagtgcactcaagtttggccaagggactccacagcacccagaagactgcatgcctcaaggtttatgtcactcctctgctgggctgttcattgtcattgctgtgttcagggacctttggaaataaaacctgttctgtcccaaataaaaccagcctgtgatgttcaagggactggaataaagtggcttacgacctgaaggattctacagagtgctcaactgttcatacatcattcagagtgggagggagctgggggtgctgtcccatcccatctgtatgcccacggtggatttaataatatataatttataaatcatagcctatggagtggcccgtaaatcagttgactgtgtagctcttgcctggcattaaagcatgtttttggtttaacatgaaaaaca

SEQ ID NO: 314895 - DNA, 3825 bp, Homo sapiens
agcggaaagcttggttatggccaggcccagtggctcatgtctgtaatcccagcacttgggaggtcgaggcaggaggattgcttgagcccaggagttcaaaaacagcctggccaacaagagatcctatcattattttaaaattcctcctcctccacgaagtccttcctgattccttcaaagaaatatcactcctccgaattcccagagtgatttcttctgacttgagcctgcagtgtgctgtgagagatctaccactagattatctcaactttggtctcctgggaccactcgttgctgacagtcagaaattgcaaggcatctgatctcctggtgttaaaatctgtcgtgataccgaggaaggccccgagatcccaggcactgagtgactgcatactaagaaaaagaactctgaaatgaaattgaggatttgaacttcacacagctgtttgaactgaattcttgccgccaggatggggaaacagaacagcaagctgcgcccggaggtcatgcaggacttgctggaaagcacagactttacagagcatgagatccaggaatggtataaaggcttcttgagagactgccccagtggacatttgtcaatggaagagtttaagaaaatatatgggaactttttcccttatggggatgcttccaaatttgcagagcatgtcttccgcaccttcgatgcaaatggagatgggacaatagactttagagaattcatcatcgccttgagtgtaacttcgagggggaagctggagcagaagctgaaatgggccttcagcatgtacgacctggacggaaatggctatatcagcaaggcagagatgctagagatcgtgcaggcaatctataagatggtttcctctgtaatgaaaatgcctgaagatgagtcaaccccagagaaaagaacagaaaagatcttccgccagatggacaccaatagagacggaaaactctccctggaagagttcatccgaggagccaaaagcgacccgtccattgtgcgcctcctgcagtgcgacccgagcagtgccggccagttctgagccctgcgcccaccaatcgaattgtagagctgcttgtgttcccttttgattcttctttttaacaatttttttttttttttgccaaacaatatcaatggtgatgccgtcccctgtgcggtctgatgcgccttcctccgtgacgccttcagcttcttttgtcgtggatgcttcgtgggaatgcccagagccccagtgtgcttgtggagagcatggacagacttcgtggtgttcattgtttgatgatttttaatcgttactattatttttttttattctaatgtctctgttctaaaacgtaagactcgggggttggggcaaaagaagggaaacccatccagtcctgtgattctattgcaagcttcaaggggcttttgtttgaaagacaaaactccccacctgggtctgttgtcacacgtgccgtaggggtgatggatggcaccggatgctggattccccaagaacaagttaccctctggggtgaggctattccagcgagctgggacatttccccatgggggcccactcccctctcttccccagcaggctgtagtttctaagctgtgaacatttcaagataaattaacagaggagaggaaaaagatggctcagctattttttcacaggtttacactagttgagctaatatgcgtgtctttggaaattaaacacaaatggtaacatattccaaaaccagacccatcttgttgcctattgtgataaaataaaaagacggctgtatataacatattgggtaatgcagaccaaattaagtgttttgccttgtttaaatgaaatgcatgtttagtgagcactaatacaatcttattccagaagactgtttttagtagcttattgtgaagtaagacaactataatgaatgtctgtcttgtttggaagtcatatctgtctttgcacaaatgtaccaatcgacaagtatattttatatattccataaaaatacaaagtaaccctgactagggcccaactttaattttgaatgcatttccagagtggccatgcctagagggcagatgcagagcaggtggtagtgggacaggacaattggagcacaggaatgttaacatgtatgacaggggaccagtagggtggtttccctctcaggcccagcagcccattgacagcattagactggcggcatggtgcttttctgagcagatcaatactctgcagactcgaaaaaacatcacatacattcttggaacttcccagtggtttaatctatgtgcatggttagggagccaggtctggaatattcagtttccctgcccctgttaaagaatcagaggttgggcagtcatcaaattcatcataaagacatgggcaagtgtgtctgtggtttccaaggcccccctatggagaatccaaaagtattttccattgccgtgctctttgaatgcagacttctatttccagaagtgacagcacaagtctgagttgctgtttggtctggtgacctcagacacactaatttgaattgaaagctaagagtaaaaatttgctggttacaggcgagtcatactcttgcaagtagttagcaaagggaggcccaaattctcaaggttgttgatggggaacttgccactaagagaaggcagagaggtccctagtgggtatatttgctgccaagccacttgccaaagaagaggaaccacagaaagagagacatcatgaccaggagaaaaatgtgactagacatgctaacctccaggtttttatatatgacttgagtctgctgtaattggcagcagaaatccaaatttgtatggtagaccaaaaagaaccaaatccatagggtgaaattttgagacctagactctgtaaaaataatcctagtcttcctccaggggtcagttcctcacagtggttctgtaccaaaacttgccaaattcctccatggccaagtgttaaaatctgtgtttggaaaatagcgaattaacctaagacacagaaggcagactgggtgaggagacctagcatgccctattggcagtgctcaggagctgcatcccacttttccctgctctgaatcgaagtcctagttccttcctttgattctcctttggtaggtggaatcagttaatgttttgagaaacctgcctgggctctgcccttagtcatgacatctcgctgagccagacccactctgttccttggaacctagagctggagtgaggagtagaggtctccggctattccagaaagaaaagtgagccacatgcaggctgatgaatgccgacacttccagaatgtatagaaatagtccctgtcctggcctgccactgaccctgtctgtattttctcggaggttgtttttctccttctccttcccaggaaggtctttgtatgtcgaatccagtgcactcaagtttggccaagggactccacagcacccagaagactgcatgcctcaaggtttatgtcactcctctgctgggctgttcattgtcattgctgtgttcagggacctttggaaataaaacctgttctgtcccaaataaaaccagcctgtgatgttcaagggactggaataaagtggcttacgacctgaaggattctacagagtgctcaactgttcatacatcattcagagtgggagggagctgggggtgctgtcccatcccatctgtatgcccacggtggatttaataatatataatttataaatcatagcctatggagtggcccgtaaatcagttgactgtgtagctcttgcctggcattaaagcatgtttttggtttaacatgaaaaaca

SEQ ID NO: 314896 - DNA, 3244 bp, Homo sapiens
agcggtgtcaaaggcttgtgagaatctggtggatgctggaccttgctgctgctgctactgctgtttccaggggctgcagagcatggactgttaaatcttgcacttcttctgagtgagctgaattcttgccgccaggatggggaaacagaacagcaagctgcgcccggaggtcatgcaggacttgctggaaagcacagactttacagagcatgagatccaggaatggtataaaggcttcttgagagactgccccagtggacatttgtcaatggaagagtttaagaaaatatatgggaactttttcccttatggggatgcttccaaatttgcagagcatgtcttccgcaccttcgatgcaaatggagatgggacaatagactttagagaattcatcatcgccttgagtgtaacttcgagggggaagctggagcagaagctgaaatgggccttcagcatgtacgacctggacggaaatggctatatcagcaaggcagagatgctagagatcgtgcaggcaatctataagatggtttcctctgtaatgaaaatgcctgaagatgagtcaaccccagagaaaagaacagaaaagatcttccgccagatggacaccaatagagacggaaaactctccctggaagagttcatccgaggagccaaaagcgacccgtccattgtgcgcctcctgcagtgcgacccgagcagtgccggccagttctgagccctgcgcccaccaatcgaattgtagagctgcttgtgttcccttttgattcttctttttaacaatttttttttttttttgccaaacaatatcaatggtgatgccgtcccctgtgcggtctgatgcgccttcctccgtgacgccttcagcttcttttgtcgtggatgcttcgtgggaatgcccagagccccagtgtgcttgtggagagcatggacagacttcgtggtgttcattgtttgatgatttttaatcgttactattatttttttttattctaatgtctctgttctaaaacgtaagactcgggggttggggcaaaagaagggaaacccatccagtcctgtgattctattgcaagcttcaaggggcttttgtttgaaagacaaaactccccacctgggtctgttgtcacacgtgccgtaggggtgatggatggcaccggatgctggattccccaagaacaagttaccctctggggtgaggctattccagcgagctgggacatttccccatgggggcccactcccctctcttccccagcaggctgtagtttctaagctgtgaacatttcaagataaattaacagaggagaggaaaaagatggctcagctattttttcacaggtttacactagttgagctaatatgcgtgtctttggaaattaaacacaaatggtaacatattccaaaaccagacccatcttgttgcctattgtgataaaataaaaagacggctgtatataacatattgggtaatgcagaccaaattaagtgttttgccttgtttaaatgaaatgcatgtttagtgagcactaatacaatcttattccagaagactgtttttagtagcttattgtgaagtaagacaactataatgaatgtctgtcttgtttggaagtcatatctgtctttgcacaaatgtaccaatcgacaagtatattttatatattccataaaaatacaaagtaaccctgactagggcccaactttaattttgaatgcatttccagagtggccatgcctagagggcagatgcagagcaggtggtagtgggacaggacaattggagcacaggaatgttaacatgtatgacaggggaccagtagggtggtttccctctcaggcccagcagcccattgacagcattagactggcggcatggtgcttttctgagcagatcaatactctgcagactcgaaaaaacatcacatacattcttggaacttcccagtggtttaatctatgtgcatggttagggagccaggtctggaatattcagtttccctgcccctgttaaagaatcagaggttgggcagtcatcaaattcatcataaagacatgggcaagtgtgtctgtggtttccaaggcccccctatggagaatccaaaagtattttccattgccgtgctctttgaatgcagacttctatttccagaagtgacagcacaagtctgagttgctgtttggtctggtgacctcagacacactaatttgaattgaaagctaagagtaaaaatttgctggttacaggcgagtcatactcttgcaagtagttagcaaagggaggcccaaattctcaaggttgttgatggggaacttgccactaagagaaggcagagaggtccctagtgggtatatttgctgccaagccacttgccaaagaagaggaaccacagaaagagagacatcatgaccaggagaaaaatgtgactagacatgctaacctccaggtttttatatatgacttgagtctgctgtaattggcagcagaaatccaaatttgtatggtagaccaaaaagaaccaaatccatagggtgaaattttgagacctagactctgtaaaaataatcctagtcttcctccaggggtcagttcctcacagtggttctgtaccaaaacttgccaaattcctccatggccaagtgttaaaatctgtgtttggaaaatagcgaattaacctaagacacagaaggcagactgggtgaggagacctagcatgccctattggcagtgctcaggagctgcatcccacttttccctgctctgaatcgaagtcctagttccttcctttgattctcctttggtaggtggaatcagttaatgttttgagaaacctgcctgggctctgcccttagtcatgacatctcgctgagccagacccactctgttccttggaacctagagctggagtgaggagtagaggtctccggctattccagaaagaaaagtgagccacatgcaggctgatgaatgccgacacttccagaatgtatagaaatagtccctgtcctggcctgccactgaccctgtctgtattttctcggaggttgtttttctccttctccttcccaggaaggtctttgtatgtcgaatccagtgcactcaagtttggccaagggactccacagcacccagaagactgcatgcctcaaggtttatgtcactcctctgctgggctgttcattgtcattgctgtgttcagggacctttggaaataaaacctgttctgtcccaaataaaaccagc

SEQ ID NO: 314897 - DNA, 3443 bp, Homo sapiens
agcggtgtcaaaggcttgtgagaatctggtggatgctggaccttgctgctgctgctactgctgtttccaggggctgcagagcatggactgttaaatcttgcacttcttctgagtgagctgaattcttgccgccaggatggggaaacagaacagcaagctgcgcccggaggtcatgcaggacttgctggaaagcacagactttacagagcatgagatccaggaatggtataaaggcttcttgagagactgccccagtggacatttgtcaatggaagagtttaagaaaatatatgggaactttttcccttatggggatgcttccaaatttgcagagcatgtcttccgcaccttcgatgcaaatggagatgggacaatagactttagagaattcatcatcgccttgagtgtaacttcgagggggaagctggagcagaagctgaaatgggccttcagcatgtacgacctggacggaaatggctatatcagcaaggcagagatgctagagatcgtgcaggcaatctataagatggtttcctctgtaatgaaaatgcctgaagatgagtcaaccccagagaaaagaacagaaaagatcttccgccagatggacaccaatagagacggaaaactctccctggaagagttcatccgaggagccaaaagcgacccgtccattgtgcgcctcctgcagtgcgacccgagcagtgccggccagttctgagccctgcgcccaccaatcgaattgtagagctgcttgtgttcccttttgattcttctttttaacaatttttttttttttttgccaaacaatatcaatggtgatgccgtcccctgtgcggtctgatgcgccttcctccgtgacgccttcagcttcttttgtcgtggatgcttcgtgggaatgcccagagccccagtgtgcttgtggagagcatggacagacttcgtggtgttcattgtttgatgatttttaatcgttactattatttttttttattctaatgtctctgttctaaaacgtaagactcgggggttggggcaaaagaagggaaacccatccagtcctgtgattctattgcaagcttcaaggggcttttgtttgaaagacaaaactccccacctgggtctgttgtcacacgtgccgtaggggtgatggatggcaccggatgctggattccccaagaacaagttaccctctggggtgaggctattccagcgagctgggacatttccccatgggggcccactcccctctcttccccagcaggctgtagtttctaagctgtgaacatttcaagataaattaacagaggagaggaaaaagatggctcagctattttttcacaggtttacactagttgagctaatatgcgtgtctttggaaattaaacacaaatggtaacatattccaaaaccagacccatcttgttgcctattgtgataaaataaaaagacggctgtatataacatattgggtaatgcagaccaaattaagtgttttgccttgtttaaatgaaatgcatgtttagtgagcactaatacaatcttattccagaagactgtttttagtagcttattgtgaagtaagacaactataatgaatgtctgtcttgtttggaagtcatatctgtctttgcacaaatgtaccaatcgacaagtatattttatatattccataaaaatacaaagtaaccctgactagggcccaactttaattttgaatgcatttccagagtggccatgcctagagggcagatgcagagcaggtggtagtgggacaggacaattggagcacaggaatgttaacatgtatgacaggggaccagtagggtggtttccctctcaggcccagcagcccattgacagcattagactggcggcatggtgcttttctgagcagatcaatactctgcagactcgaaaaaacatcacatacattcttggaacttcccagtggtttaatctatgtgcatggttagggagccaggtctggaatattcagtttccctgcccctgttaaagaatcagaggttgggcagtcatcaaattcatcataaagacatgggcaagtgtgtctgtggtttccaaggcccccctatggagaatccaaaagtattttccattgccgtgctctttgaatgcagacttctatttccagaagtgacagcacaagtctgagttgctgtttggtctggtgacctcagacacactaatttgaattgaaagctaagagtaaaaatttgctggttacaggcgagtcatactcttgcaagtagttagcaaagggaggcccaaattctcaaggttgttgatggggaacttgccactaagagaaggcagagaggtccctagtgggtatatttgctgccaagccacttgccaaagaagaggaaccacagaaagagagacatcatgaccaggagaaaaatgtgactagacatgctaacctccaggtttttatatatgacttgagtctgctgtaattggcagcagaaatccaaatttgtatggtagaccaaaaagaaccaaatccatagggtgaaattttgagacctagactctgtaaaaataatcctagtcttcctccaggggtcagttcctcacagtggttctgtaccaaaacttgccaaattcctccatggccaagtgttaaaatctgtgtttggaaaatagcgaattaacctaagacacagaaggcagactgggtgaggagacctagcatgccctattggcagtgctcaggagctgcatcccacttttccctgctctgaatcgaagtcctagttccttcctttgattctcctttggtaggtggaatcagttaatgttttgagaaacctgcctgggctctgcccttagtcatgacatctcgctgagccagacccactctgttccttggaacctagagctggagtgaggagtagaggtctccggctattccagaaagaaaagtgagccacatgcaggctgatgaatgccgacacttccagaatgtatagaaatagtccctgtcctggcctgccactgaccctgtctgtattttctcggaggttgtttttctccttctccttcccaggaaggtctttgtatgtcgaatccagtgcactcaagtttggccaagggactccacagcacccagaagactgcatgcctcaaggtttatgtcactcctctgctgggctgttcattgtcattgctgtgttcagggacctttggaaataaaacctgttctgtcccaaataaaaccagcctgtgatgttcaagggactggaataaagtggcttacgacctgaaggattctacagagtgctcaactgttcatacatcattcagagtgggagggagctgggggtgctgtcccatcccatctgtatgcccacggtggatttaataatatataatttataaatcatagcctatggagtaaatgcagggacctctagaacacc

SEQ ID NO: 314898 - DNA, 695 bp, Homo sapiens
  misc_feature (24)..(24): n is a, c, g, or t
gggtggcgttctagaggatcccgncatttactccatggcagtgttaaaatctgtgtttggaaaatagcgaattaacctaagacacagaaggcagactgggtgaggagacctagcatgccctattggcagtgctcaggagctgcatcccacttttccctgctctgaatcgaagtcctagttccttcctttgattctcctttggtaggtggaatcagttaatgttttgagaaacctgcctgggctctgcccttagtcatgacatctcgctgagccagacccactctgttccttggaacctagagctggagtgaggagtagaggtctccggctattccagaaagaaaagtgagccacatgcaggctgatgaatgccgacacttccagaatgtatagaaatagtccctgtcctggcctgccactgaccctgtctgtattttctcggaggttgtttttctccttctccttcccaggaaggtctttgtatgtcgaatccagtgcactcaagtttggccaagggactccacagcacccagaagactgcatgcctcaaggtttatgtcactcctctgctgggctgttcattgtcattgctgtgttcagggacctttggaaataaaacctgttctgtcccaaataaaaccagcctgtgatgttcaagggactggaataaagtggcttacgacctgaaggattct

SEQ ID NO: 314899 - DNA, 2450 bp, Homo sapiens
agcggtgtcaaaggcttgtgagaatctggtggatgctggaccttgctgctgctgctactgctgtttccaggggctgcagagcatggactgttaaatcttgcacttcttctgagtgagctgaattcttgccgccaggatggggaaacagaacagcaagctgcgcccggaggtcatgcaggacttgctggaaagcacagactttacagagcatgagatccaggaatggtataaaggcttcttgagagactgccccagtggacatttgtcaatggaagagtttaagaaaatatatgggaactttttcccttatggggatgcttccaaatttgcagagcatgtcttccgcaccttcgatgcaaatggagatgggacaatagactttagagaattcatcatcgccttgagtgtaacttcgagggggaagctggagcagaagctgaaatgggccttcagcatgtacgacctggacggaaatggctatatcagcaaggcagagatgctagagatcgtgcaggcaatctataagatggtttcctctgtaatgaaaatgcctgaagatgagtcaaccccagagaaaagaacagaaaagatcttccgccagatggacaccaatagagacggaaaactctccctggaagagttcatccgaggagccaaaagcgacccgtccattgtgcgcctcctgcagtgcgacccgagcagtgccggccagttctgagccctgcgcccaccaatcgaattgtagagctgcttgtgttcccttttgattcttctttttaacaatttttttttttttttgccaaacaatatcaatggtgatgccgtcccctgtgcggtctgatgcgccttcctccgtgacgccttcagcttcttttgtcgtggatgcttcgtgggaatgcccagagccccagtgtgcttgtggagagcatggacagacttcgtggtgttcattgtttgatgatttttaatcgttactattatttttttttattctaatgtctctgttctaaaacgtaagactcgggggttggggcaaaagaagggaaacccatccagtcctgtgattctattgcaagcttcaaggggcttttgtttgaaagacaaaactccccacctgggtctgttgtcacacgtgccgtaggggtgatggatggcaccggatgctggattccccaagaacaagttaccctctggggtgaggctattccagcgagctgggacatttccccatgggggcccactcccctctcttccccagcaggctgtagtttctaagctgtgaacatttcaagataaattaacagaggagaggaaaaagatggctcagctattttttcacaggtttacactagttgagctaatatgcgtgtctttggaaattaaacacaaatggtaacatattccaaaaccagacccatcttgttgcctattgtgataaaataaaaagacggctgtatataacatattgggtaatgcagaccaaattaagtgttttgccttgtttaaatgaaatgcatgtttagtgagcactaatacaatcttattccagaagactgtttttagtagcttattgtgaagtaagacaactataatgaatgtctgtcttgtttggaagtcatatctgtctttgcacaaatgtaccaatcgacaagtatattttatatattccataaaaatacaaagtaaccctgactagggcccaactttaattttgaatgcatttccagagtggccatgcctagagggcagatgcagagcaggtggtagtgggacaggacaattggagcacaggaatgttaacatgtatgacaggggaccagtagggtggtttccctctcaggcccagcagcccattgacagcattagactggcggcatggtgcttttctgagcagatcaatactctgcagactcgaaaaaacatcacatacattcttggaacttcccagtggtttaatctatgtgcatggttagggagccaggtctggaatattcagtttccctgcccctgttaaagaatcagaggttgggcagtcatcaaattcatcataaagacatgggcaagtgtgtctgtggtttccaaggcccccctatggagaatccaaaagtattttccattgccgtgctctttgaatgcagaaatgtatagaaatagtccctgtcctggcctgccactgaccctgtctgtattttctcggaggttgtttttctccttctccttcccaggaaggtctttgtatgtcgaatccagtgcactcaagtttggccaagggactccacagcacccagaagactgcatgcctcaaggtttatgtcactcctctgctgggctgttcattgtcattgctgtgttcagggacctttggaaataaaacctgttctgtcccaaataaaaccagcctgtgatgttcaagggactggaataaagtggcttacgacctgaaggattct

SEQ ID NO: 314900 - DNA, 1305 bp, Homo sapiens
agcggtgtcaaaggcttgtgagaatctggtggatgctggaccttgctgctgctgctactgctgtttccaggggctgcagagcatggactgttaaatcttgcacttcttctgagtgagctgaattcttgccgccaggatggggaaacagaacagcaagctgcgcccggaggtcatgcaggacttgctggaaagcacagactttacagagcatgagatccaggaatggtataaaggcttcttgagagactgccccagtggacatttgtcaatggaagagtttaagaaaatatatgggaactttttcccttatggggatgcttccaaatttgcagagcatgtcttccgcaccttcgatgcaaatggagatgggacaatagactttagagaattcatcatcgccttgagtgtaacttcgagggggaagctggagcagaagctgaaatgggccttcagcatgtacgacctggacggaaatggctatatcagcaaggcagagatgctagagatcgtgcaggcaatctataagatggtttcctctgtaatgaaaatgcctgaagatgagtcaaccccagagaaaagaacagaaaagatcttccgccagatggacaccaatagagacggaaaactctccctggaagagttcatccgaggagccaaaagcgacccgtccattgtgcgcctcctgcagtgcgacccgagcagtgccggccagttctgagccctgcgcccaccaatcgaattgtagagctgcttgtgttcccttttgattcttctttttaacaatttttttttttttttgccaaacaatatcaatggtgatgccgtcccctgtgcggtctgatgcgccttcctccgtgacgccttcagcttcttttgtcgtggatgcttcgtgggaatgcccagagccccagtgtgcttgtggagagcatggacagacttcgtggtgttcattgtttgatgatttttaatcgttactattatttttttttattctaatgtctctgttctaaaacgtaagactcgggggttggggcaaaagaagggaaacccatccagtcctgtgatgttcaagggactggaataaagtggcttacgacctgaaggattctacagagtgctcaactgttcatacatcattcagagtgggagggagctgggggtgctgtcccatcccatctgtatgcccacggtggatttaataatatataatttataaatcatagcctatggagtggcccgtaaatcagttgactgtgtagctcttgcctggcattaaagcatgtttttggtttaacatgaaaaaca

SEQ ID NO: 314901 - DNA, 1845 bp, Homo sapiens
gagctggttgccgtggtcaatgaacaccctcatggacctgttgacacccttcaggtactgtgtgcggtagaggtgctggcggtctttgtcccaggccactgcatgctctggccgggccccaggacaggagatgatgagtccatggcccagtctctgctggtggaactgaatgggcacctggggcacccagggccggctgcccactttggacacatagttaatgatggccagcacgccctcccggatggtctttgtcttctcacagggtactaagcagctccgaaccagcacctcaggcgtgtggtccctggccttggtccgcagcttccttggcacagcccttgagccacaagacaccacatcgggcacggccttgaggtagcgtggggagaggtctgggctctgcaggtagcagaggccgatgcgccactgctccccacgcactccgcagcggtcacagggggtccattcccagaaggtggtgaagacatggaggtgcccatagtattcatctgcaaagggctcctggcccttgtcctggaaagtggccaccattccctcactgttctggatgtccacatcgtaggcgtaaaagtagtcccccttgcgggtgccgcagaagtacaggcctgagtcctcagactgagccctgaaaaccaacaagctgaacatgcggatgctgaagcgggtcagcatgtcgctgcccacacgtacctgggctgcctccgtcagcacccgcccatcaaagtccgtcagcactttggtgtggctgctacctaggtgcttttggtagaaccagactacagctggcacctcttcgggtttgcagtgacagggaagctcaaagctcatgtcggccaggtaggctgcattttcaaacatcaggaaagcagggcagggggtcctctgaaaaatgttttccttctccacaatttcaaaggcctggagcccccatgcccacaggagcacagtggtgagggccaggtgcatacctgaaggaggcaggggtcagaggggcagggcaaaaccagggcattaaaggctcatagggctcctagaaagctctgctaagcggaagcctctagatgaggaaaggattatgcagccaggaaaagcagcaacaatctgcagaggaagccgccaagtgcaaggcaatttattcccagtggatgtacaagatgcccttctaacattccagacctgatctcagggtagggggggaaagccattctagaacctggcctttactcccctttctagaacactggcgctcacccaagaatgggtcaaaggaaaccggaatgagaagggcgggccgaggtgctcgggcagggagatctctgcctcagtgctccaggccctgccctgccagcctggtggaaaagtctttcatcaacctgggggatgaaggaaacccaccctcctgcatatctggccatccgggaggctggctggacctgagctgatggcttgggactttcccaggcccaacctgcacaagaactgagtctctaggggaaaattcaacacctcaaatgatgtagtatttgatcatttgttgattacatgtccattcattggtttggggctataaacattcttgttaagagctgtggagatcagtgtttgtttaccataaagattttgctttttcccttttatgagtggaggctgtaactggtatagccagcatttggttgggcacacactcatctctcaaggccagtgggctagaggcttggcagactctaaggctttggaaataaaacctgttctgtcccaaataaaaccagcctgtgatgttcaagggactggaataaagtggcttacgacctgaaggattct

SEQ ID NO: 314902 - DNA, 3437 bp, Homo sapiens
agcggtgtcaaaggcttgtgagaatctggtggatgctggaccttgctgctgctgctactgctgtttccaggggctgcagagcatggactgttaaatcttgcacttcttctgagtgagctgaattcttgccgccaggatggggaaacagaacagcaagctgcgcccggaggtcatgcaggacttgctggaaagcacagactttacagagcatgagatccaggaatggtataaaggcttcttgagagactgccccagtggacatttgtcaatggaagagtttaagaaaatatatgggaactttttcccttatggggatgcttccaaatttgcagagcatgtcttccgcaccttcgatgcaaatggagatgggacaatagactttagagaattcatcatcgccttgagtgtaacttcgagggggaagctggagcagaagctgaaatgggccttcagcatgtacgacctggacggaaatggctatatcagcaaggcagagatgctagagatcgtgcaggcaatctataagatggtttcctctgtaatgaaaatgcctgaagatgagtcaaccccagagaaaagaacagaaaagatcttccgccagatggacaccaatagagacggaaaactctccctggaagagttcatccgaggagccaaaagcgacccgtccattgtgcgcctcctgcagtgcgacccgagcagtgccggccagttctgagccctgcgcccaccaatcgaattgtagagctgcttgtgttcccttttgattcttctttttaacaatttttttttttttttgccaaacaatatcaatggtgatgccgtcccctgtgcggtctgatgcgccttcctccgtgacgccttcagcttcttttgtcgtggatgcttcgtgggaatgcccagagccccagtgtgcttgtggagagcatggacagacttcgtggtgttcattgtttgatgatttttaatcgttactattatttttttttattctaatgtctctgttctaaaacgtaagactcgggggttggggcaaaagaagggaaacccatccagtcctgtgattctattgcaagcttcaaggggcttttgtttgaaagacacggatgctggattccccaagaacaagttaccctctggggtgaggctattccagcgagctgggacatttccccatgggggcccactcccctctcttccccagcaggctgtagtttctaagctgtgaacatttcaagataaattaacagaggagaggaaaaagatggctcagctattttttcacaggtttacactagttgagctaatatgcgtgtctttggaaattaaacacaaatggtaacatattccaaaaccagacccatcttgttgcctattgtgataaaataaaaagacggctgtatataacatattgggtaatgcagaccaaattaagtgttttgccttgtttaaatgaaatgcatgtttagtgagcactaatacaatcttattccagaagactgtttttagtagcttattgtgaagtaagacaactataatgaatgtctgtcttgtttggaagtcatatctgtctttgcacaaatgtaccaatcgacaagtatattttatatattccataaaaatacaaagtaaccctgactagggcccaactttaattttgaatgcatttccagagtggccatgcctagagggcagatgcagagcaggtggtagtgggacaggacaattggagcacaggaatgttaacatgtatgacaggggaccagtagggtggtttccctctcaggcccagcagcccattgacagcattagactggcggcatggtgcttttctgagcagatcaatactctgcagactcgaaaaaacatcacatacattcttggaacttcccagtggtttaatctatgtgcatggttagggagccaggtctggaatattcagtttccctgcccctgttaaagaatcagaggttgggcagtcatcaaattcatcataaagacatgggcaagtgtgtctgtggtttccaaggcccccctatggagaatccaaaagtattttccattgccgtgctctttgaatgcagacttctatttccagaagtgacagcacaagtctgagttgctgtttggtctggtgacctcagacacactaatttgaattgaaagctaagagtaaaaatttgctggttacaggcgagtcatactcttgcaagtagttagcaaagggaggcccaaattctcaaggttgttgatggggaacttgccactaagagaaggcagagaggtccctagtgggtatatttgctgccaagccacttgccaaagaagaggaaccacagaaagagagacatcatgaccaggagaaaaatgtgactagacatgctaacctccaggtttttatatatgacttgagtctgctgtaattggcagcagaaatccaaatttgtatggtagaccaaaaagaaccaaatccatagggtgaaattttgagacctagactctgtaaaaataatcctagtcttcctccaggggtcagttcctcacagtggttctgtaccaaaacttgccaaattcctccatggccaagtgttaaaatctgtgtttggaaaatagcgaattaacctaagacacagaaggcagactgggtgaggagacctagcatgccctattggcagtgctcaggagctgcatcccacttttccctgctctgaatcgaagtcctagttccttcctttgattctcctttggtaggtggaatcagttaatgttttgagaaacctgcctgggctctgcccttagtcatgacatctcgctgagccagacccactctgttccttggaacctagagctggagtgaggagtagaggtctccggctattccagaaagaaaagtgagccacatgcaggctgatgaatgccgacacttccagaatgtatagaaatagtccctgtcctggcctgccactgaccctgtctgtattttctcggaggttgtttttctccttctccttcccaggaaggtctttgtatgtcgaatccagtgcactcaagtttggccaagggactccacagcacccagaagactgcatgcctcaaggtttatgtcactcctctgctgggctgttcattgtcattgctgtgttcagggacctttggaaataaaacctgttctgtcccaaataaaaccagcctgtgatgttcaagggactggaataaagtggcttacgacctgaaggattctacagagtgctcaactgttcatacatcattcagagtgggagggagctgggggtgctgtcccatcccatctgtatgcccacggtggatttaataatatataatttataaatcatagcctatggagtggcccgtaaatcagttgactgtgtagctcttgcctggcattaaagcatgtttttggtttaacatgaaaaaca

SEQ ID NO: 314903 - DNA, 3648 bp, Homo sapiens
  misc_feature (59)..(59): n is a, c, g, or t
gggggaggcgggcggagggaaggcgctgccgctgctgccgccgcctcgcccgaagcganacagacgctgggagcggccgaggcgagatcctatcattattttaaaattcctcctcctccacgaagtccttcctgattccttcaaagaaatatcactcctccgaattcccagagtgatttcttctgacttgagcctgcagtgtgctgtgagagatctaccactagattatctcaactttggtctcctgggaccactcgttgctgacagtcagaaactgaattcttgccgccaggatggggaaacagaacagcaagctgcgcccggaggtcatgcaggacttgctggaaagcacagactttacagagcatgagatccaggaatggtataaaggcttcttgagagactgccccagtggacatttgtcaatggaagagtttaagaaaatatatgggaactttttcccttatggggatgcttccaaatttgcagagcatgtcttccgcaccttcgatgcaaatggagatgggacaatagactttagagaattcatcatcgccttgagtgtaacttcgagggggaagctggagcagaagctgaaatgggccttcagcatgtacgacctggacggaaatggctatatcagcaaggcagagatgctagagatcgtgcaggcaatctataagatggtttcctctgtaatgaaaatgcctgaagatgagtcaaccccagagaaaagaacagaaaagatcttccgccagatggacaccaatagagacggaaaactctccctggaagagttcatccgaggagccaaaagcgacccgtccattgtgcgcctcctgcagtgcgacccgagcagtgccggccagttctgagccctgcgcccaccaatcgaattgtagagctgcttgtgttcccttttgattcttctttttaacaatttttttttttttttgccaaacaatatcaatggtgatgccgtcccctgtgcggtctgatgcgccttcctccgtgacgccttcagcttcttttgtcgtggatgcttcgtgggaatgcccagagccccagtgtgcttgtggagagcatggacagacttcgtggtgttcattgtttgatgatttttaatcgttactattatttttttttattctaatgtctctgttctaaaacgtaagactcgggggttggggcaaaagaagggaaacccatccagtcctgtgattctattgcaagcttcaaggggcttttgtttgaaagacaaaactccccacctgggtctgttgtcacacgtgccgtaggggtgatggatggcaccggatgctggattccccaagaacaagttaccctctggggtgaggctattccagcgagctgggacatttccccatgggggcccactcccctctcttccccagcaggctgtagtttctaagctgtgaacatttcaagataaattaacagaggagaggaaaaagatggctcagctattttttcacaggtttacactagttgagctaatatgcgtgtctttggaaattaaacacaaatggtaacatattccaaaaccagacccatcttgttgcctattgtgataaaataaaaagacggctgtatataacatattgggtaatgcagaccaaattaagtgttttgccttgtttaaatgaaatgcatgtttagtgagcactaatacaatcttattccagaagactgtttttagtagcttattgtgaagtaagacaactataatgaatgtctgtcttgtttggaagtcatatctgtctttgcacaaatgtaccaatcgacaagtatattttatatattccataaaaatacaaagtaaccctgactagggcccaactttaattttgaatgcatttccagagtggccatgcctagagggcagatgcagagcaggtggtagtgggacaggacaattggagcacaggaatgttaacatgtatgacaggggaccagtagggtggtttccctctcaggcccagcagcccattgacagcattagactggcggcatggtgcttttctgagcagatcaatactctgcagactcgaaaaaacatcacatacattcttggaacttcccagtggtttaatctatgtgcatggttagggagccaggtctggaatattcagtttccctgcccctgttaaagaatcagaggttgggcagtcatcaaattcatcataaagacatgggcaagtgtgtctgtggtttccaaggcccccctatggagaatccaaaagtattttccattgccgtgctctttgaatgcagacttctatttccagaagtgacagcacaagtctgagttgctgtttggtctggtgacctcagacacactaatttgaattgaaagctaagagtaaaaatttgctggttacaggcgagtcatactcttgcaagtagttagcaaagggaggcccaaattctcaaggttgttgatggggaacttgccactaagagaaggcagagaggtccctagtgggtatatttgctgccaagccacttgccaaagaagaggaaccacagaaagagagacatcatgaccaggagaaaaatgtgactagacatgctaacctccaggtttttatatatgacttgagtctgctgtaattggcagcagaaatccaaatttgtatggtagaccaaaaagaaccaaatccatagggtgaaattttgagacctagactctgtaaaaataatcctagtcttcctccaggggtcagttcctcacagtggttctgtaccaaaacttgccaaattcctccatggccaagtgttaaaatctgtgtttggaaaatagcgaattaacctaagacacagaaggcagactgggtgaggagacctagcatgccctattggcagtgctcaggagctgcatcccacttttccctgctctgaatcgaagtcctagttccttcctttgattctcctttggtaggtggaatcagttaatgttttgagaaacctgcctgggctctgcccttagtcatgacatctcgctgagccagacccactctgttccttggaacctagagctggagtgaggagtagaggtctccggctattccagaaagaaaagtgagccacatgcaggctgatgaatgccgacacttccagaatgtatagaaatagtccctgtcctggcctgccactgaccctgtctgtattttctcggaggttgtttttctccttctccttcccaggaaggtctttgtatgtcgaatccagtgcactcaagtttggccaagggactccacagcacccagaagactgcatgcctcaaggtttatgtcactcctctgctgggctgttcattgtcattgctgtgttcagggacctttggaaataaaacctgttctgtcccaaataaaaccagcctgtgatgttcaagggactggaataaagtggcttacgacctgaaggattctacagagtgctcaactgttcatacatcattcagagtgggagggagctgggggtgctgtcccatcccatctgtatgcccacggtggatttaataatatataatttataaatcatagcctatggagtggcccgtaaatcagttgactgtgtagctcttgcctggcattaaagcatgtttttggtttaacatgaaaaaca

SEQ ID NO: 314904 - DNA, 2764 bp, Homo sapiens
agcggtgtcaaaggcttgtgagaatctggtggatgctggaccttgctgctgctgctactgctgtttccaggggctgcagagcatggactgttaaatcttgcacttcttctgagtgagctgaattcttgccgccaggatggggaaacagaacagcaagctgcgcccggaggtcatgcaggacttgctggaaagcacagactttacagagcatgagatccaggaatggtataaaggcttcttgagagactgccccagtggacatttgtcaatggaagagtttaagaaaatatatgggaactttttcccttatggggatgcttccaaatttgcagagcatgtcttccgcaccttcgatgcaaatggagatgggacaatagactttagagaattcatcatcgccttgagtgtaacttcgagggggaagctggagcagaagctgaaatgggccttcagcatgtacgacctggacggaaatggctatatcagcaaggcagagatgctagagatcgtgcaggcaatctataagatggtttcctcttagtttctaagctgtgaacatttcaagataaattaacagaggagaggaaaaagatggctcagctattttttcacaggtttacactagttgagctaatatgcgtgtctttggaaattaaacacaaatggtaacatattccaaaaccagacccatcttgttgcctattgtgataaaataaaaagacggctgtatataacatattgggtaatgcagaccaaattaagtgttttgccttgtttaaatgaaatgcatgtttagtgagcactaatacaatcttattccagaagactgtttttagtagcttattgtgaagtaagacaactataatgaatgtctgtcttgtttggaagtcatatctgtctttgcacaaatgtaccaatcgacaagtatattttatatattccataaaaatacaaagtaaccctgactagggcccaactttaattttgaatgcatttccagagtggccatgcctagagggcagatgcagagcaggtggtagtgggacaggacaattggagcacaggaatgttaacatgtatgacaggggaccagtagggtggtttccctctcaggcccagcagcccattgacagcattagactggcggcatggtgcttttctgagcagatcaatactctgcagactcgaaaaaacatcacatacattcttggaacttcccagtggtttaatctatgtgcatggttagggagccaggtctggaatattcagtttccctgcccctgttaaagaatcagaggttgggcagtcatcaaattcatcataaagacatgggcaagtgtgtctgtggtttccaaggcccccctatggagaatccaaaagtattttccattgccgtgctctttgaatgcagacttctatttccagaagtgacagcacaagtctgagttgctgtttggtctggtgacctcagacacactaatttgaattgaaagctaagagtaaaaatttgctggttacaggcgagtcatactcttgcaagtagttagcaaagggaggcccaaattctcaaggttgttgatggggaacttgccactaagagaaggcagagaggtccctagtgggtatatttgctgccaagccacttgccaaagaagaggaaccacagaaagagagacatcatgaccaggagaaaaatgtgactagacatgctaacctccaggtttttatatatgacttgagtctgctgtaattggcagcagaaatccaaatttgtatggtagaccaaaaagaaccaaatccatagggtgaaattttgagacctagactctgtaaaaataatcctagtcttcctccaggggtcagttcctcacagtggttctgtaccaaaacttgccaaattcctccatggccaagtgttaaaatctgtgtttggaaaatagcgaattaacctaagacacagaaggcagactgggtgaggagacctagcatgccctattggcagtgctcaggagctgcatcccacttttccctgctctgaatcgaagtcctagttccttcctttgattctcctttggtaggtggaatcagttaatgttttgagaaacctgcctgggctctgcccttagtcatgacatctcgctgagccagacccactctgttccttggaacctagagctggagtgaggagtagaggtctccggctattccagaaagaaaagtgagccacatgcaggctgatgaatgccgacacttccagaatgtatagaaatagtccctgtcctggcctgccactgaccctgtctgtattttctcggaggttgtttttctccttctccttcccaggaaggtctttgtatgtcgaatccagtgcactcaagtttggccaagggactccacagcacccagaagactgcatgcctcaaggtttatgtcactcctctgctgggctgttcattgtcattgctgtgttcagggacctttggaaataaaacctgttctgtcccaaataaaaccagcctgtgatgttcaagggactggaataaagtggcttacgacctgaaggattctacagagtgctcaactgttcatacatcattcagagtgggagggagctgggggtgctgtcccatcccatctgtatgcccacggtggatttaataatatataatttataaatcatagcctatggagtggcccgtaaatcagttgactgtgtagctcttgcctggcattaaagcatgtttttggtttaacatgaaaaaca

SEQ ID NO: 314905 - DNA, 2334 bp, Homo sapiens
agcggtgtcaaaggcttgtgagaatctggtggatgctggaccttgctgctgctgctactgctgtttccaggggctgcagagcatggactgttaaatcttgcacttcttctgagtgagctgaattcttgccgccaggatggggaaacagaacagcaagctgcgcccggaggtcatgcaggacttgctggaaagcacagactttacagagcatgagatccaggaatggtataaaggcttcttgagagactgccccagtggacatttgtcaatggaagagtttaagaaaatatatgggaactttttcccttatggggatgcttccaaatttgcagagcatgtcttccgcaccttcgatgcaaatggagatgggacaatagactttagagaattcatcatcgccttgagtgtaacttcgagggggaagctggagcagaagctgaaatgggccttcagcatgtacgacctggacggaaatggctatatcagcaaggcagagatgctagagatcgtgcaggcaatctataagatggtttcctctgtaatgaaaatgcctgaagatgagtcaaccccagagaaaagaacagaaaagatcttccgccagatggacaccaatagagacggaaaactctccctggaagagttcatccgaggagccaaaagcgacccgtccattgtgcgcctcctgcagtgcgacccgagcagtgccggccagttctgagccctgcgcccaccaatcgaattgtagagctgcttgtgttcccttttgattcttctttttaacaatttttttttttttttgccaaacaatatcaatggtgatgccgtcccctgtgcggtctgatgcgccttcctccgtgacgccttcagcttcttttgtcgtggatgcttcgtgggaatgcccagagccccagtgtgcttgtggagagcatggacagacttcgtggtgttcattgtttgatgatttttaatcgttactattatttttttttattctaatgtctctgttctaaaacgtaagactcgggggttggggcaaaagaagggaaacccatccagtcctgtgattctattgcaagcttcaaggggcttttgtttgaaagacaaaactccccacctgggtctgttgtcacacgtgccgtaggggtgatggatggcaccggatgctggattccccaagaacaagttaccctctggggtgaggctattccagcgagctgggacatttccccatgggggcccactcccctctcttccccagcaggctgtagtttctaagctgtgaacatttcaagataaattaacagaggagaggaaaaagatggctcagctattttttcacaggtttacactagttgagctaatatgcgtgtctttggaaattaaacacaaatggtaacatattccaaaaccagacccatcttgttgcctattgtgataaaataaaaagacggctgtatataacatattgggtaatgcagaccaaattaagtgttttgccttgtttaaatgaaatgcatgtttagtgagcactaatacaatcttattccagaagactgtttttagtagcttattgtgaagtaagacaactataatgaatgtctgtcttgtttggaagtcatatctgtctttgcacaaatgtaccaatcgacaagtatattttatatattccataaaaatacaaagtaaccctgactagggcccaactttaattttgaatgcatttccagagtggccatgcctagagggcagatgcagagcaggtggtagtgggacaggacaattggagcacaggaatgttaacatgtatgacaggggaccagtagggtggtttccctctcaggcccagcagcccattgacagcattagactggcggcatggtgcttttctgagcagatcaatactctgcagactcgaaaaaacatcacatacattcttggaacttcccagtggtttaatctatgtgcatggttagggaaaagaaaagtgagccacatgcaggctgatgaatgccgacacttccagaatgtatagaaatagtccctgtcctggcctgccactgaccctgtctgtattttctcggaggttgtttttctccttctccttcccaggaaggtctttgtatgtcgaatccagtgcactcaagtttggccaagggactccacagcacccagaagactgcatgcctcaaggtttatgtcactcctctgctgggctgttcattgtcattgctgtgttcagggacctttggaaataaaacctgttctgtcccaaataaaaccagcctgtgatgttcaagggactggaataaagtggcttacgacctgaaggattct

SEQ ID NO: 314906 - DNA, 671 bp, Homo sapiens
aaggatgtgtttactgggttaaagggcataaatatttctctggttcatggtacaagttgtaacagtttttgccagcaggggtatgtcagtgaagtatttttactacaacttcaccagcattgcatcccccccacaaattctttctaagttaatagacattaaatggtattacagggtaactttagtttgtgtttcttccattaatggtggggataaacattttttcatcatcggatgtttatatttccttttgaatgatttgcttatatatgtcctttgcctgtgtgtttattgggttcatgtttttcttattaatttatataatttcttcataaattatacctaataatacttttaaaatattttgtgtacttttaggctgggcgcggtggctcatgcctgtaatcccagcgctttgggaggccgaggtgggtggatcacgaggtcaggagtttgagaccggcctggccaacatggtgaaccccatctctactaaaaatacaaaaattagccaggcatggtggcgcgcgtctgtaatcccagctactcgggaggctgaggcaggagaattgcttgaacccaggaggcaggggttgcagtgagccgagatcatgctactgcactccagcctgggtaacagagtgagactctgtctcaaaataaataaataa

SEQ ID NO: 314907 - DNA, 355 bp, Homo sapiens
ccgccgcggcggggggtgggaaaagagaagcagagggaggagttgttgctgccgccgccgcagccgcagctactgtgacttctccgattgtgtgagctttgttggagcctgcgtacgtggatttatcgctgccacggtctgcgtagctccagaggtttaaccataggatagagaaaccagacccttcttcagcatcttccctgggcattgctgtgagtttaggccggcccgttttgagcaggagcagcagcggaacagtagacctgctggaggaagtggggctgcagatcagagacacagcattttcgtcaaccaaactttcttgaagccatatctacagtatcagctcaagtgg

SEQ ID NO: 314908 - DNA, 7591 bp, Homo sapiens
cggtctctttgcaaatgtcaatgtatttttttccttcaatatactgtatctattcctctattattaagttctgagcttgctttaccttgtccgctatttaaaacattctgatttgaaagtatcaccaacagcttatgtgattttccaaatttctcaaaatacagttgtcaccattagtcacatgaagtctgctgccgccgccgcagccgcagctactgtgacttctccgattgtgtgagctttgttggagcctgcgtacgtggatttatcgctgccacggtctgcgtagctccagaggtttaaccataggatagagaaaccaggaatgtaatgaggaaatcaaaatggatccaagtatgggtgtgaattctgttaccatttctgttgagggtatgacttgcaattcctgtgtttggaccattgagcagcagattggaaaagtgaatggtgtgcatcacattaaggtatcactggaagaaaaaaatgcaactattatttatgaccctaaactacagactccaaagaccctacaggaagctattgatgacatgggctttgatgctgttatccataatcctgaccctctccctgttttaactgacaccttgtttctgactgttacggcgtcactgactttgccatgggaccatatccaaagcacattgctgaagaccaagggtgtgacagacattaaaatttaccctcagaaaagaactgtagcagtgacaataatcccttctatagtgaatgccaatcagataaaagagctggttccagaactcagtttagatactgggacactggagaaaaagtcaggagcttgtgaagatcatagtatggctcaagctggtgaagtcgtgctgaagatgaaagtggaagggatgacctgccattcatgtactagcactattgaaggaaaaattgggaaactgcaaggtgttcagcgaattaaagtctccctggacaatcaagaagctactattgtttatcaacctcatcttatctcagtagaggaaatgaaaaagcagattgaagctatgggctttccagcatttgtcaaaaagcagcccaagtacctcaaattgggagctattgatgtagaacgtctaaagaacacaccagttaaatcctcagaagggtcacagcaaaggagtccatcatataccaatgattcaacagccactttcatcattgatggcatgcattgtaaatcatgtgtgtcaaatattgaaagtactttatctgcactccaatatgtaagcagcatagtagtttctttagagaataggtctgccattgtgaagtataatgcaagctcagtcactccagaatccctgagaaaagcaatagaggctgtatcaccggggctatatagagttagtatcacaagtgaagttgagagtacctcaaactctccctccagctcatctcttcagaagattcctttgaatgtagttagccagcctctgacacaagaaactgtgataaacattgatggcatgacttgtaattcctgtgtgcagtctattgagggtgtcatatcaaaaaagccaggtgtaaaatccatacgagtctcccttgcaaatagcaatgggactgttgagtatgatcctctactaacctctccagaaacgttgagaggagcaatagaagacatgggatttgatgctaccttgtcagacacgaatgagccgttggtagtaatagctcagccttcatcggaaatgccgcttttgacttcaactaatgaattttatactaaagggatgacaccagttcaagacaaggaggaaggaaagaattcatctaagtgttacatacaggtcactggcatgacttgcgcttcctgtgtagcaaacattgaacggaatttaaggcgggaagaaggaatatattctatacttgtggccctgatggctggcaaggcagaagtaaggtataatcctgctgttatacaacccccaatgatagcagagttcatccgagaacttggatttggagccactgtgatagaaaatgctgatgaaggagatggtgttttggaacttgttgtgaggggaatgacgtgtgcctcctgcgtacataaaatagagtctagtctcacaaaacacagagggatcctatactgctccgtggccctggcaaccaacaaagcacatattaaatatgacccagaaattattggtcctagagatattatccatacaattgaaagcttaggttttgaagcttctttggtcaagaaggatcggtcagcaagtcacttagatcataaacgagaaataagacaatggagacggtcttttcttgtgagtctgtttttctgtattcctgtaatggggctgatgacatatatgatggttatggaccaccactttgcaactcttcaccataatcaaaacatgagtaaagaagaaatgatcaaccttcattcttctatgttcctggagcgccagattcttccaggattgtctgttatgaatttgctgtcctttttattgtgtgtacctgtacagtttttcggaggctggtacttctacattcaggcttataaagcactgaagcataagacagcaaatatggacgtactgattgtgctggcaaccaccattgcatttgcctactctttgattattcttctagttgcaatgtatgagagagccaaagtgaaccctattactttctttgacacaccccctatgctgtttgtgtttattgcactaggccgatggctggaacatatagcaaagggcaaaacatcagaggctcttgcaaagttaatttcactacaagctacagaagcaactattgtaactcttgattctgataatatcctcctcagtgaagaacaagtggatgtggaacttgtacaacgtggagatatcattaaagtagttccaggaggcaaatttccagtggatggtcgtgttattgaaggacattctatggtagatgagtccctcatcacaggggaggcaatgcctgtggctaagaaacctggcagcacagtgattgctggttccattaaccagaacgggtcactgcttatctgcgcaacacatgttggagcagacacaaccctttctcaaattgtcaaacttgtggaagaggcacaaacatcaaaggctcctatccagcagtttgcagacaaactcagtggctattttgttccttttattgtttttgtttccattgccaccctcttggtatggattgtaattggatttctgaattttgaaattgtggaaacctactttcctggctacaatagaagtatctcccgaacagaaacgataatacgatttgctttccaagcctctatcacagttctgtgtattgcatgtccctgttcactgggactggccactccaactgctgtgatggtgggtacaggagtaggtgctcaaaatggcatactaataaaaggtggagagccattggagatggctcataaggtaaaggtagtggtatttgataagactggaaccattactcacggaaccccagtggtgaatcaagtaaaggttctaactgaaagtaacagaatatcacaccataaaatcttggccattgtgggaactgctgaaagtaacagtgaacaccctctaggaacagccataaccaaatattgcaaacaggagctggacactgaaaccttgggtacctgcatagatttccaggttgtgccaggctgtggtattagctgtaaagtcaccaatattgaaggcttgctacataagaataactggaatatagaggacaataatattaaaaatgcatccctggttcaaattgatgccagtaatgaacagtcatcaacttcgtcttccatgattattgatgcccagatctcaaatgctcttaatgctcagcagtataaagtcctcattggtaaccgggagtggatgattagaaatggtcttgtcattaataacgatgtaaatgatttcatgactgaacatgagagaaaaggtcggactgctgtattagtagcagttgatgatgagctgtgtggcttgatagccattgcagacacagtgaagcctgaagcagaactggctatccatattctgaaatctatgggcttagaagtagttctgatgactggagacaacagtaaaacagctagatctattgcttctcaggttggcattactaaggtgtttgctgaagttctaccttctcacaaggttgctaaagtgaagcaacttcaagaggaggggaaacgggtagcaatggtgggagatggaatcaatgactccccagctctggcaatggctaatgtgggaattgctattggcacaggcacagatgtagccattgaagcagctgatgtggttttgataaggaatgatcttctggatgtagtggcaagtattgacttatcaagaaagacagtcaagaggattcggataaattttgtctttgctctaatttataatctggttggaattcccatagctgctggagtttttatgcccattggtttggttttgcagccctggatgggatctgcagcaatggctgcttcatctgtttctgtagtactttcttctctcttccttaaactttacaggaaaccaacttacgagagttatgaactgcctgcccggagccagataggacagaagagtccttcagaaatcagcgttcatgttggaatagatgatacctcaaggaattctcctaaactgggtttgctggaccggattgttaattatagcagagcctctataaactcactactgtctgataaacgctccctaaacagtgttgttaccagtgaacctgacaagcactcactcctggtgggagacttcagggaagatgatgacactgcattataaaaggccatggagagtgctgccagtttaacttgtcatgcactgacacagcattcatgatgttaccttcacttttcaaaatattgtagaaggatttttctcatgctcttatattagggattctatttgagttgcgtttatctgttggcaaaaatatctttttcaaggcatcagctctgaacctagctttatttaaactgaatttccagtatatttttgttttcactaacaacagataaggtagagcagtgaggtttacaacaagccctacaattagagattgctgaactgctgctaaagtgattttttttttatttgaccaaaaaaaaaaaggcccaagaagaagaaaatgaaaaatttgaagatttgagagcatgaagatattcatgcttttgaactcaaaatattgaagatactctcaagcctgtatccctgccccactggggagcaatgactttcaaagcactgtgtataaaacatctagttttagaagggaaacagttgaaactgtttaaaaatagatgtgccttatttattgcaggctttctttcccccattctccctgcatccttgtccttgcaggtgcttttttagatgctccaatatgtcttcttttgttattttctttcgagctaaccagtttagggtggtttttcattgattaaaaataactgacaactgttctaatattttgctcctttttaaattttgtagctcaaaagaccttaaaggtctgtagggttccctgcctcccatctttccactgttgtaaaaagtatatcaaattattccttcaagtttcctagctctgtgctcagtttcagttcactcctgccaagttggactctaagttattcttcatgtagtctgctgatctcagtctggaaacttaacattatgagccttttctgctcaaaaaattttcaaagattaaaactattatacatatacaggtcatataaaattacctggattcactaaatttgtttgttgttgttgttgttgttgttgttgttgttgagacagagtcttgttttgcagcccaggctggagtgcagtggcaccatcttggctcactgcaacctctgcctaccggattcaaggaattctccctgcctcagcctcctgagtagctaggattacaggtgcctgccaccacacccggctaattttcatatttttcagtagagacggggtttcgccatgttggctagcctggtcttaaactcctaacctcaggtgatccacccgccttggcctcccaaagtgctgggattacaggtgtgagcctccatgcccagcctaaatttgtattttttgaattgagtataacactttgctagtatatataatttaatagattttatttatctttttagtgtttcagataacctctcaaaaagactttaaaataatgctattacacaaaagctgcatttaccaaaaaatacaagtaaaatcataatacagaaactaaaatttccctaggttatgacgctttttagctaaatatatactcttctctagtttaaaacatttgaacttgcctagttagtgtggttggcaaatttaggagcttgttcccattgccaaatggatttagaaattcccttgtgagtgcctggtagctaatacactggtcagagatctggtacttgtaagactatttaaatttctttgttagttgcaagatggatttcatatgcagaatatgtaaatgaagaggactcataagtaaattcctaacattttgttcccattaccagaagcaaagctgctgctaacccaacatctggcacataggatttgtactcggtaaatgttagttcttttctccccttgaggtcagtaataaatacaaaaaaatcatttttctagagcagagtcttaaaatcaggtgggggtaggggatggagttcttcctttcctaccccttttctcttttatcctttcatatatacacatgcaaagtttacaaccttattccatgctgtctttcagatttagaaaagatctaatttctgtctcagctgtcttaaagagagaactgaagcttttgatgaaggtgctattaatctagaaaggcaaacccatttcactgaaatatcaatgggtttgcatatctaggccctttttttagaccaatgcctatgccatcctccatgctttcagtttgagttttattatttattattttaattccagtggcccatcttataatacaacttgtttcttctagaagacagagctgatagggtaaatgttgaaaaaagaagcatgcctccttctccctcccacccacctcaagcagttgaacacagccagttattcttccattattatgtgtaccttggagtcatcctcttggtcttgtattcatattgtgggacagtgggaatagcagcttgtagtattgaaataatcaaagagataatttcagctcttacaacaagaacagaaaacatgctaattagaaaaagtcctgctttaagtaatatgtagccacatttgaatcctctaccacaagtcttttttgcaatcttgaactttcattagcttcaaagagaagctgtatttacaggagaaagaggtgattatggagggaatcaaaaatactgctttcagttagtagctagctttaagtcaggagttagtaatgagaaattttataaatgtgtatttctgtgtattcaccatcctattttttatcccccccatttttttgtccattccccttacattccttt

SEQ ID NO: 314909 - DNA, 708 bp, Homo sapiens
caaaaattagccaggcatggtggcgcgcgtctgtaatcccagctactcgggaggctgaggcaggagaattgcttgaacccaggaggcaggggttgcagtgagccgagatcatgctactgcactccagcctgggtaacagagtgagactctgtctcaaaataaataaataaataaataaataataaaatattttgtgtacttcgtctttctgaagtgaaacattttctagtgaaacattttgaagtgaaacattcaaacattttgaagtgaaacattttcatattaatttttaaacaaattaatattcctaaagctgtcttttgggtaaatgctaaagattgtatttttattttagttaagacctgaactttttcttccttagcattttcaatgtgtttgttttaatttatagggcaaaacatcagaggctcttgcaaagttaatttcactacaagctacagaagcaactattgtaactcttgattctgataatatcctcctcaggtatttatcttcactcttccctcttctctttttttaacttcttaagaaaaatttcaaatatatacagaagtagaaaaaggactatcatgaattcacataatctgtctcccagatataaaaattatccacattttgccatacttcatctatccattttgtctgtctttcttgttgcagtagtattaaaccaaatttcagtcatat

SEQ ID NO: 314910 - DNA, 8679 bp, Homo sapiens
cggtctctttgcaaatgtcaatgtatttttttccttcaatatactgtatctattcctctattattaagttctgagcttgctttaccttgtccgctatttaaaacattctgatttgaaagtatcaccaacagcttatgtgattttccaaatttctcaaaatacagttgtcaccattagtcacatgaagtctgctgccgccgccgcagccgcagctactgtgacttctccgattgtgtgagctttgttggagcctgcgtacgtggatttatcgctgccacggtctgcgtagctccagaggtttaaccataggatagagaaaccaggaatgtaatgaggaaatcaaaatggatccaagtatgggtgtgaattctgttaccatttctgttgagggtatgacttgcaattcctgtgtttggaccattgagcagcagattggaaaagtgaatggtgtgcatcacattaaggtatcactggaagaaaaaaatgcaactattatttatgaccctaaactacagactccaaagaccctacaggaagctattgatgacatgggctttgatgctgttatccataatcctgaccctctccctgttttaactgacaccttgtttctgactgttacggcgtcactgactttgccatgggaccatatccaaagcacattgctgaagaccaagggtgtgacagacattaaaatttaccctcagaaaagaactgtagcagtgacaataatcccttctatagtgaatgccaatcagataaaagagctggttccagaactcagtttagatactgggacactggagaaaaagtcaggagcttgtgaagatcatagtatggctcaagctggtgaagtcgtgctgaagatgaaagtggaagggatgacctgccattcatgtactagcactattgaaggaaaaattgggaaactgcaaggtgttcagcgaattaaagtctccctggacaatcaagaagctactattgtttatcaacctcatcttatctcagtagaggaaatgaaaaagcagattgaagctatgggctttccagcatttgtcaaaaagcagcccaagtacctcaaattgggagctattgatgtagaacgtctaaagaacacaccagttaaatcctcagaagggtcacagcaaaggagtccatcatataccaatgattcaacagccactttcatcattgatggcatgcattgtaaatcatgtgtgtcaaatattgaaagtactttatctgcactccaatatgtaagcagcatagtagtttctttagagaataggtctgccattgtgaagtataatgcaagctcagtcactccagaatccctgagaaaagcaatagaggctgtatcaccggggctatatagagttagtatcacaagtgaagttgagagtacctcaaactctccctccagctcatctcttcagaagattcctttgaatgtagttagccagcctctgacacaagaaactgtgataaacattgatggcatgacttgtaattcctgtgtgcagtctattgagggtgtcatatcaaaaaagccaggtgtaaaatccatacgagtctcccttgcaaatagcaatgggactgttgagtatgatcctctactaacctctccagaaacgttgagaggagcaatagaagacatgggatttgatgctaccttgtcagacacgaatgagccgttggtagtaatagctcagccttcatcggaaatgccgcttttgacttcaactaatgaattttatactaaagggatgacaccagttcaagacaaggaggaaggaaagaattcatctaagtgttacatacaggtcactggcatgacttgcgcttcctgtgtagcaaacattgaacggaatttaaggcgggaagaaggaatatattctatacttgtggccctgatggctggcaaggcagaagtaaggtataatcctgctgttatacaacccccaatgatagcagagttcatccgagaacttggatttggagccactgtgatagaaaatgctgatgaaggagatggtgttttggaacttgttgtgaggggaatgacgtgtgcctcctgcgtacataaaatagagtctagtctcacaaaacacagagggatcctatactgctccgtggccctggcaaccaacaaagcacatattaaatatgacccagaaattattggtcctagagatattatccatacaattgaaagcttaggttttgaagcttctttggtcaagaaggatcggtcagcaagtcacttagatcataaacgagaaataagacaatggagacggtcttttcttgtgagtctgtttttctgtattcctgtaatggggctgatgacatatatgatggttatggaccaccactttgcaactcttcaccataatcaaaacatgagtaaagaagaaatgatcaaccttcattcttctatgttcctggagcgccagattcttccaggattgtctgttatgaatttgctgtcctttttattgtgtgtacctgtacagtttttcggaggctggtacttctacattcaggcttataaagcactgaagcataagacagcaaatatggacgtactgattgtgctggcaaccaccattgcatttgcctactctttgattattcttctagttgcaatgtatgagagagccaaagtgaaccctattactttctttgacacaccccctatgctgtttgtgtttattgcactaggccgatggctggaacatatagcaaagggcaaaacatcagaggctcttgcaaagttaatttcactacaagctacagaagcaactattgtaactcttgattctgataatatcctcctcagtgaagaacaagtggatgtggaacttgtacaacgtggagatatcattaaagtagttccaggaggcaaatttccagtggatggtcgtgttattgaaggacattctatggtagatgagtccctcatcacaggggaggcaatgcctgtggctaagaaacctggcagcacagtgattgctggttccattaaccagaacgggtcactgcttatctgcgcaacacatgttggagcagacacaaccctttctcaaattgtcaaacttgtggaagaggcacaaacatcaaaggctcctatccagcagtttgcagacaaactcagtggctattttgttccttttattgtttttgtttccattgccaccctcttggtatggattgtaattggatttctgaattttgaaattgtggaaacctactttcctggctacaatagaagtatctcccgaacagaaacgataatacgatttgctttccaagcctctatcacagttctgtgtattgcatgtccctgttcactgggactggccactccaactgctgtgatggtgggtacaggagtaggtgctcaaaatggcatactaataaaaggtggagagccattggagatggctcataaggtaaaggtagtggtatttgataagactggaaccattactcacggaaccccagtggtgaatcaagtaaaggttctaactgaaagtaacagaatatcacaccataaaatcttggccattgtgggaactgctgaaagtaacagtgaacaccctctaggaacagccataaccaaatattgcaaacaggagctggacactgaaaccttgggtacctgcatagatttccaggttgtgccaggctgtggtattagctgtaaagtcaccaatattgaaggcttgctacataagaataactggaatatagaggacaataatattaaaaatgcatccctggttcaaattgatgccagtaatgaacagtcatcaacttcgtcttccatgattattgatgcccagatctcaaatgctcttaatgctcagcagtataaagtcctcattggtaaccgggagtggatgattagaaatggtcttgtcattaataacgatgtaaatgatttcatgactgaacatgagagaaaaggtcggactgctgtattagtagcagttgatgatgagctgtgtggcttgatagccattgcagacacagtgaagcctgaagcagaactggctatccatattctgaaatctatgggcttagaagtagttctgatgactggagacaacagtaaaacagctagatctattgcttctcaggttggcattactaaggtgtttgctgaagttctaccttctcacaaggttgctaaagtgaagcaacttcaagaggaggggaaacgggtagcaatggtgggagatggaatcaatgactccccagctctggcaatggctaatgtgggaattgctattggcacaggcacagatgtagccattgaagcagctgatgtggttttgataaggaatgatcttctggatgtagtggcaagtattgacttatcaagaaagacagtcaagaggattcggataaattttgtctttgctctaatttataatctggttggaattcccatagctgctggagtttttatgcccattggtttggttttgcagccctggatgggatctgcagcaatggctgcttcatctgtttctgtagtactttcttctctcttccttaaactttacaggaaaccaacttacgagagttatgaactgcctgcccggagccagataggacagaagagtccttcagaaatcagcgttcatgttggaatagatgatacctcaaggaattctcctaaactgggtttgctggaccggattgttaattatagcagagcctctataaactcactactgtctgataaacgctccctaaacagtgttgttaccagtgaacctgacaagcactcactcctggtgggagacttcagggaagatgatgacactgcattataaaaggccatggagagtgctgccagtttaacttgtcatgcactgacacagcattcatgatgttaccttcacttttcaaaatattgtagaaggatttttctcatgctcttatattagggattctatttgagttgcgtttatctgttggcaaaaatatctttttcaaggcatcagctctgaacctagctttatttaaactgaatttccagtatatttttgttttcactaacaacagataaggtagagcagtgaggtttacaacaagccctacaattagagattgctgaactgctgctaaagtgattttttttttatttgaccaaaaaaaaaaaggcccaagaagaagaaaatgaaaaatttgaagatttgagagcatgaagatattcatgcttttgaactcaaaatattgaagatactctcaagcctgtatccctgccccactggggagcaatgactttcaaagcactgtgtataaaacatctagttttagaagggaaacagttgaaactgtttaaaaatagatgtgccttatttattgcaggctttctttcccccattctccctgcatccttgtccttgcaggtgcttttttagatgctccaatatgtcttcttttgttattttctttcgagctaaccagtttagggtggtttttcattgattaaaaataactgacaactgttctaatattttgctcctttttaaattttgtagctcaaaagaccttaaaggtctgtagggttccctgcctcccatctttccactgttgtaaaaagtatatcaaattattccttcaagtttcctagctctgtgctcagtttcagttcactcctgccaagttggactctaagttattcttcatgtagtctgctgatctcagtctggaaacttaacattatgagccttttctgctcaaaaaattttcaaagattaaaactattatacatatacaggtcatataaaattacctggattcactaaatttgtttgttgttgttgttgttgttgttgttgttgttgagacagagtcttgttttgcagcccaggctggagtgcagtggcaccatcttggctcactgcaacctctgcctaccggattcaaggaattctccctgcctcagcctcctgagtagctaggattacaggtgcctgccaccacacccggctaattttcatatttttcagtagagacggggtttcgccatgttggctagcctggtcttaaactcctaacctcaggtgatccacccgccttggcctcccaaagtgctgggattacaggtgtgagcctccatgcccagcctaaatttgtattttttgaattgagtataacactttgctagtatatataatttaatagattttatttatctttttagtgtttcagataacctctcaaaaagactttaaaataatgctattacacaaaagctgcatttaccaaaaaatacaagtaaaatcataatacagaaactaaaatttccctaggttatgacgctttttagctaaatatatactcttctctagtttaaaacatttgaacttgcctagttagtgtggttggcaaatttaggagcttgttcccattgccaaatggatttagaaattcccttgtgagtgcctggtagctaatacactggtcagagatctggtacttgtaagactatttaaatttctttgttagttgcaagatggatttcatatgcagaatatgtaaatgaagaggactcataagtaaattcctaacattttgttcccattaccagaagcaaagctgctgctaacccaacatctggcacataggatttgtactcggtaaatgttagttcttttctccccttgaggtcagtaataaatacaaaaaaatcatttttctagagcagagtcttaaaatcaggtgggggtaggggatggagttcttcctttcctaccccttttctcttttatcctttcatatatacacatgcaaagtttacaaccttattccatgctgtctttcagatttagaaaagatctaatttctgtctcagctgtcttaaagagagaactgaagcttttgatgaaggtgctattaatctagaaaggcaaacccatttcactgaaatatcaatgggtttgcatatctaggccctttttttagaccaatgcctatgccatcctccatgctttcagtttgagttttattatttattattttaattccagtggcccatcttataatacaacttgtttcttctagaagacagagctgatagggtaaatgttgaaaaaagaagcatgcctccttctccctcccacccacctcaagcagttgaacacagccagttattcttccattattatgtgtaccttggagtcatcctcttggtcttgtattcatattgtgggacagtgggaatagcagcttgtagtattgaaataatcaaagagataatttcagctcttacaacaagaacagaaaacatgctaattagaaaaagtcctgctttaagtaatatgtagccacatttgaatcctctaccacaagtcttttttgcaatcttgaactttcattagcttcaaagagaagctgtatttacaggagaaagaggtgattatggagggaatcaaaaatactgctttcagttagtagctagctttaagtcaggagttagtaatgagaaattttataaatgtgtatttctgtgtattcacatacatatatatatacacacatatatatgtacatacacatacatacatattaccatactgaagggaaatggatttatatttgaatttgatatttgaatatttgaagttctctatttatatttcatttatcactcttctgtattcactcagcaaccatgcccttagtctgaagataacaaggatactttaatatccagtgccggttcagactcacctatgtggcaccttaaacttaaatatccaaagatgccttttgaatttcaaagattaaaacacagctagagtagtagtattgtagtctcaagatgtatggtgtgtcatttgtgaaaatagaaacgttatttttcctagtttagtatcaacattttagaatgtcaaatttgatgccttgtgaacaagtaattttatattgtgctttaattttttaaaaagtattctttattcatatgtatagaatgcttaaaatagcactgtagacaagatgtttccaaaactttaagtgcgcatatcttttctgtatacagcttaaaatcaaaaatgtatgttaagagaattttttctattacttatggatcatgctttaaaatgatttttcttgatatttattttactccattttgtttttttctctgggtgaggcatctggttactggttattttaaaaagaataaagacattcctggaatcactccttttgggtttttgtttgttttgtttcttttctacatttttaagtattattttacaaaatagaaaaaatatagattcatgccaaattattacctatttttacactaactttctgcagtccctccatctggtatgagtaaccagatagagcacaaagcatgagttcttgttcttcagttaaaagagcttctttcacagtgttgataacaaatgccttttgtagccaaaaccaggcgtctcaaccttacgtttttagttaaagaaatgtttagctaaacgttgttgaacattgattgtttggtaccgaaaacagcagtggacgatgttgtgcaatatccatctactgtagttaagatattcagtagtttgtttttcataagcatgtaattgatcatatttctgccaaggatgtgccttcaactttataattatagtgttgtaaaataaaaat

SEQ ID NO: 314911 - DNA, 1211 bp, Homo sapiens
cacaccaaacttacaaaacttacaacagtagttacctgtggggaggaagattaggtcccctgtcctcctttgagtaacaataaaagaaaaaaaccttgaaaaaatgacctcttgacttgtggaactgttattttcatagttagtaggagtttaaccttgctctggtctcaccttctcatccccagataaaagctgaggatgaccagcccctcccgggagtcctcttatccctgagtggtggcctgtttcgttccaacctcttgacccaggacaacggcattctgacattctcaaacctggtaacgtgttctgcaatttaccacctgcctgtcttccctgagagagagccaggatgcagcatgcgaggacttatgtgttgcttgacaacgtgagaagagaaggccaatgtggagtggtttcagtttcttgggggcccacggtcattagagtattgctcttactcgaacttaatgctgctgattcatgttcccttccacacgcgcttcttgttttctgatcacccgcttgtcactaagacagtgtaattaatttccctggccacaacggctgctctcttaggcgtcttctcgttttgccacggaatcatgcttatgatgctgagtcttgtttggtggttagcttgcgtttcttctgaaaagacattccacttggtgggaagagagcagcagtttttctttcaagatgcagtcggaggccctgactggtggggattcaggaagtgtgtgttagttggtcatcttgtcagtcatggtgacaaagtggctgtggtggggctactggagaccgggcagcgggggcatctgaagacaccactttgcagtgatgcagactgctccttacttgctgtgtcctatcaggcaagttactttgcctctctgagcctcagtttctttattcattaaattcaaatatgagccaggtatggtggcccacgcctgtaatcccaccgctttgggagggtgaggcagtaggatcgcttgagcttgggagtttgagaccagcaacataggaagaccccatctctacaaaaaataaaaaaattagctgggcatggtggtgcatgcctgtggtcccaggtactcaggaggccgaggtgggagatttgcttgagcccagaaggttgagactacggtgtgctgtgatcgtgcactccatcctgggggacagagtcaggccctgtctcagaaaaa

SEQ ID NO: 314912 - DNA, 2279 bp, Homo sapiens
  misc_feature (29)..(29): n is a, c, g, or t
  misc_feature (115)..(115): n is a, c, g, or t
  misc_feature (146)..(146): n is a, c, g, or t
  misc_feature (419)..(419): n is a, c, g, or t
  misc_feature (502)..(502): n is a, c, g, or t
  misc_feature (947)..(947): n is a, c, g, or t
aaatgggttgggttctaagagatgtccanagatacaggagtaggcagttgttgatggaaatctgttcctgcccttattctttcatttatgaaagggcatcccaggtacagcggcncccacagtcactctctagcccagcagttctnggatgggttggttgcaggacccctttatactgttaaaaattattgaggattttaaagagtttgagtttgcatggattatctctgtgtatatttatcatattagtaattaaaaccgagatgttgaaaacgcaagaactcacaagctacacattccgttagctgtgggcgtgatgacatcagggtgcgtagtctctggaaaagtccactgtgtgcttgcgaatgaaagagggcggaaaaggcacatcacatcttactattggcaaatgctgtctncccagcaaaagggagggcacaccacttccctagggtccagccagggtgtggcacttaccgcttctgttcctgtaccattggcnaaaatttagttccagggctgcgcctgctgcagggaaggctggaaaaggtgatctatattgtcggtggcccagataaaagttgggggttctattgggagaaagggagaatggccacagggatgctagtagcagtgcctgctttgcttcctcactagaccgtactggctgggaatagctgcccatcactgtgtgccctgggtctagaactgtaggttcttgatacatccttgtaggactaagtccctgcatgttgctgggactcaacaaactgagacccagttgcttttcaaccaccaagactctctgatagctgcatctcttcatttcctcagttgggaggagggtccagaggctgaggaatgccttgtcattggaatctctttgtccctgagtttcagaagcaaatagtgaagctttgggcagaagaggattcatgggaaaatanatccaaatcactttggttccttcctttggatagaaggaatttggatcatgagggcccctgggtgtcctcaagtggccactttggaaggctgggtgggtggtggctgtggcattgtggatgatggacaagcttgtggccttggtgaggagtgatggggctctcggtgtttgcagaggaagctgcctgaacaggacatcgcacaaggatcctacattgccctgccattgacgctgctggttctgctggccggttacaaccatgacaaggtaggaaatccagaggcctcaggagatggcgggcatgtcagggagagcgagtcctcacagctgcaggagtgatagcagagggatgtccagggtcacagaaatcacatttccgggtcgggagggcccgtgaaggcctcaagtccagacttaggtctcctttcaaggctgtaaacttctgtaacatctcctaatccttaacctggaacacctctagggacatattaggcccggagagaggccagcccatccctggggactcattagtaagaggcctgcctcgtttgaactgaaacccacccattagcacgtggcagctgctgatcatgtctgaagaaggtgtgttgagaagtgaggctccgctgttcatctggcaaaagcctcctctttgtacccctctctctcacactttctctcttttctagctcattcctttgctgctgcagttgacaagccggctacagggagtcggcgcgctcggccaggcagcctctgacaatagcggcccagaagatgcaaagagacaagccaagaaacagaagacaaggcggacgtgaggaggaaggggacagttgcagtctcacttgggacaggccacagccaggggtccggccactacccgcccgtgggataaaagccaaaagcatgcgtcagctaacttcagcctgtgctgctgggcccgcaccccatgtcccttgtcactgtggcatcctgcacccatcctcacccctccgtagagcccctcgtgcaatgcaatgaatggaccctcctgtcactctgctgaacagaatttattttctgagtcaaatataatttattattatttttgtcaaagaagtatttaagctgtgctgtggtgtgagaatgtcattcttgatcttcagccttcgtttgcaagaagagttccagttgatgtggtgtttggttccatggcggggtaccctagggattcatctgttttcttcacttccctttgcatctgagatcctgctggaaaccacggcaacctgtatccactattaggaggtaaaaatcaataaaatggcccattcatttgtgttgtagctca

SEQ ID NO: 314913 - DNA, 281 bp, Homo sapiens
tgatgtggtgtttggttccacatcaactggaactcttcttgcaaacgaaggctgaagatcaagaatgacattctcacaccacagcacagcttaaatccttcgtttgcaagaagagttccagttgatgtggtgtttggttccatggcggggtaccctagggattcatctgttttcttcacttccctttgcatctgagatcctgctggaaaccacggcaacctgtatccactattaggaggtaaaaatcaataaaatggcccattcatttgtgttgtagctca

SEQ ID NO: 314914 - DNA, 674 bp, Homo sapiens
  misc_feature (29)..(29): n is a, c, g, or t
  misc_feature (115)..(115): n is a, c, g, or t
  misc_feature (146)..(146): n is a, c, g, or t
aaatgggttgggttctaagagatgtccanagatacaggagtaggcagttgttgatggaaatctgttcctgcccttattctttcatttatgaaagggcatcccaggtacagcggcncccacagtcactctctagcccagcagttctnggatgggttggttgcaggacccctttatactgttaaaaattattgaggattttaaagagtttgagtttgcatggattatctctgtgtatatttatcatattagtaattaaaaccgagatgttgaaaacgcaagaactcacaagctacacattccgttagctgtgggcgtgatgacatcagggtgcgtagtctctggaaaagtccactgtgtgcttgcgaatgaaagagggcggaaaaggcacatcacatcttactattggctgaaaatagctgtggcctcgggaacctctgcgagaggagtcccggtatcctacactgagaacactgctctggctcattaacttgtttttatcattattgggaagttctccttccaatgggatataggttcacttgatgctttagaacccagcatttcaggggctttagcaagatggaaatgtctgtctcatgtcaagtgtccaggagtgaccagtgcagagatagtctggtagctccaaggcgtcaggggacccaggccccttctgt

SEQ ID NO: 314915 - DNA, 396 bp, Homo sapiens
aatgctatcatgcagggaactttttaatatccggtttctttcactcaacattatgaactttatctgtatcatttgtagctttagttcattctctttgctgttgagaattctgatgcataaatataaaattatttatattttataaaatacttatattttattttatttttttcttttttttgagactgagtctcgctctgttgcccaggctggagtgtgatctcagttcactgcaacttctgcccgggttcaagcaattcttgtgcatgcctgtggtcccaggtactcaggaggccgaggtgggagatttgcttgagcccagaaggttgagactacggtgtgctgtgatcgtgcactccatcctgggggacagagtcaggccctgtctcagaaaaa

SEQ ID NO: 314916 - DNA, 3880 bp, Homo sapiens
agccgacgaccgtggagctccatgtggatggagtcagtgacatctgcacaaagggtggggacatcaactttgtcttcactgggttctctgtgaatggcaaggtcctcagcaaagggcagcccctgggtcctgcgggagttcaggtgtctctgagaaacactgggaccgaagcaaagatccagtccacagttacacagcctggcggaaagtttgcattttttaaagttctgcctggagattatgaaatcctcgcaactcatccaacctgggcgttgaaagaggcaagcaccacagtgcgtgtaaccaactccaatgccaatgcggccagtcccctcatagttgctggctacaatgtgtctggctctgtccgaagtgatggggagcccatgaaaggcgtgaagtttcttctcttttcttctttagtaactaaagaggatgtcctgggctgcaatgtctcaccagtgcctgggttccagccccaagacgagagtctggtgtatttgtgctacacggtctccagagaagatggctcgttctctttctattccttgccaagtgggggctacactgtgattccgttctatcgaggggagaggattacctttgatgtggcgccttccagacttgacttcacagtggagcatgacagcttgaaaatcgagcccgtgttccacgtcatgggattctccgtcaccgggagggtcttgaacggacccgaaggagatggtgttccagaagcagtagtcaccctgaataaccaaatcaaagttaaaacaaaagctgatggctcattccgccttgagaacataaccacagggacatacaccatccatgctcagaaagagcacctctactttgaaacggtcaccatcaaaattgcaccaaacacacctcagctggctgacattgttgcaacagggttcagtgtctgtggtcagatatcaatcattcgcttccccgacaccgtcaagcagatgaataaatacaaagttgtcctgtcatctcaagacaaggacaagtctttggtcaccgtggagacagatgctcatggatcattttgttttaaagcaaacccagggacttacaaagtgcaggtgatggttcctgaggcagaaaccagagcagggctgacgttgaaaccccagacatttcctcttactgtgaccgacaggcctgtgatggatgtggcctttgtacagttcttggcatcagtttctgggaaagtctcttgtttggacacctgtggtgacttgctggtgactctacagtccctgagccgccagggtgagaagcggagcctccagctctccggcaaggtcaacgccatgactttcacctttgacaacgtgctccctggaaaatacaaaataagcatcatgcatgaggattggtgctggaagaacaagagcctggaggtggaagtgctggaggatgacgtgtctgcagttgagttcaggcagacgggctacatgctgagatgttccctgtctcacgccatcactctggaattttatcaggatggaaatgggcgtgagaatgtggggatttataacctctccaaaggagtcaaccgattctgcctgtccaagcctggtgtgtacaaagtgacccctcgctcctgccaccggtttgagcaagcgttctacacctatgacacgtcttcacctagtatcttgacattgacagccattcgccaccatgtccttggaactatcaccaccgacaaaatgatggatgtcactgtgactatcaagtcttccatcgacagtgaacccgccttggtcttaggccctctgaagtctgtgcaggagctgcggagggagcagcagctggctgagatcgaggcccgcaggcaggagagggagaaaaacggcaatgaggaaggtgaagaaagaatgaccaagcctcccgtgcaggagatggtagatgagttacaaggccccttctcgtatgatttctcttactgggcgcggtctggagagaaaatcactgttacaccgtcatctaaagagctgctcttttatcccccttcaatggaagccgttgtcagtggagaaagctgcccagggaagctgatcgagatccacgggaaggcaggcctgtttttagaaggccagatccaccccgagttggaaggagtcgagattgtcatcagtgaaaagggggcaagttcaccgctgatcacagtctttactgatgacaaaggtgcctacagtgttggccccctgcacagtgacctggagtacacggtgacctcacagaaggagggctatgttctgactgcagtggaaggaaccatcggagacttcaaggcctatgccctggcaggcgtaagctttgagataaaagctgaggatgaccagcccctcccgggagtcctcttatccctgagtggtggcctgtttcgttccaacctcttgacccaggacaacggcattctgacattctcaaacctgagccctggccagtattacttcaaacccatgatgaaggagttccggtttgagccatcctcacagatgatcgaggtgcaggaaggccagaacctgaagatcaccatcacggggtaccgaaccgcttacagttgctatggcacagtgtcttccttaaacggagagcccgaacaaggggttgccatggaagcggtgggccagaacgactgcagcatttacggagaagacaccgtgacagacgaagagggcaagttcagattacgtggattgctgccgggatgtgtgtaccacgttcagctcaaggcagaaggcaacgaccacattgagcgggcgctcccccaccatagggtgattgaggttgggaataatgacatcgatgatgtaaacatcatagttttccggcagattaatcaatttgatttaagtggaaatgtgatcacttcctctgaataccttcctacgttatgggtcaagctttacaaaagcgaaaacctcgacaatccaatccagacagtttcccttggccagtccctgttcttccatttccccccactgctcagagatggcgagaactatgttgtgcttctggactccacactccccagatcccagtatgactacatcttgcctcaagtttctttcaccgcagtgggctaccataaacacatcaccttgatttttaatcccacgaggaagctgcctgaacaggacatcgcacaaggatcctacattgccctgccattgacgctgctggttctgctggccggttacaaccatgacaagctcattcctttgctgctgcagttgacaagccggctacagggagtcggcgcgctcggccaggcagcctctgacaatagcggcccagaagatgcaaagagacaagccaagaaacagaagacaaggcggacgtgaggaggaaggggacagttgcagtctcacttgggacaggccacagccaggggtccggccactacccgcccgtgggataaaagccaaaagcatgcgtcagctaacttcagcctgtgctgctgggcccgcaccccatgtcccttgtcactgtggcatcctgcacccatcctcacccctccgtagagcccctcgtgcaatgcaatgaatggaccctcctgtcactctgctgaacagaatttattttctgagtcaaatataatttattattatttttgtcaaagaagtatttaagctgtgctgtggtgtgagaatgtcattcttgatcttcagccttcgtttgcaagaagagttccagttgatgtggtgtttggttccatggcggggtaccctagggattcatctgttttcttcacttccctttgcatctgagatcctgctggaaaccacggcaacctgtatccactattaggaggtaaaaatcaataaaatggcccattcatttgtgttgtagctca

SEQ ID NO: 314917 - DNA, 3046 bp, Homo sapiens
  misc_feature (18)..(18): n is a, c, g, or t
aaggctaggtacaggctngtgttaatcggccgagcatcaaaattgcaccaaacacacctcagctggctgacattgttgcaacagggttcagtgtctgtggtcagatatcaatcattcgcttccccgacaccgtcaagcagatgaataaatacaaagttgtcctgtcatctcaagacaaggacaagtctttggtcaccgtggagacagatgctcatggatcattttgttttaaagcaaacccagggacttacaaagtgcaggtgatggttcctgaggcagaaaccagagcagggctgacgttgaaaccccagacatttcctcttactgtgaccgacaggcctgtgatggatgtggcctttgtacagttcttggcatcagtttctgggaaagtctcttgtttggacacctgtggtgacttgctggtgactctacagtccctgagccgccagggtgagaagcggagcctccagctctccggcaaggtcaacgccatgactttcacctttgacaacgtgctccctggaaaatacaaaataagcatcatgcatgaggattggtgctggaagaacaagagcctggaggtggaagtgctggaggatgacgtgtctgcagttgagttcaggcagacgggctacatgctgagatgttccctgtctcacgccatcactctggaattttatcaggatggaaatgggcgtgagaatgtggggatttataacctctccaaaggagtcaaccgattctgcctgtccaagcctggtgtgtacaaagtgacccctcgctcctgccaccggtttgagcaagcgttctacacctatgacacgtcttcacctagtatcttgacattgacagccattcgccaccatgtccttggaactatcaccaccgacaaaatgatggatgtcactgtgactatcaagtcttccatcgacagtgaacccgccttggtcttaggccctctgaagtctgtgcaggagctgcggagggagcagcagctggctgagatcgaggcccgcaggcaggagagggagaaaaacggcaatgaggaaggtgaagaaagaatgaccaagcctcccgtgcaggagatggtagatgagttacaaggccccttctcgtatgatttctcttactgggcgcggtctggagagaaaatcactgttacaccgtcatctaaagagctgctcttttatcccccttcaatggaagccgttgtcagtggagaaagctgcccagggaagctgatcgagatccacgggaaggcaggcctgtttttagaaggccagatccaccccgagttggaaggagtcgagattgtcatcagtgaaaagggggcaagttcaccgctgatcacagtctttactgatgacaaaggtgcctacagtgttggccccctgcacagtgacctggagtacacggtgacctcacagaaggagggctatgttctgactgcagtggaaggaaccatcggagacttcaaggcctatgccctggcaggcgtaagctttgagataaaagctgaggatgaccagcccctcccgggagtcctcttatccctgagtggtggcctgtttcgttccaacctcttgacccaggacaacggcattctgacattctcaaacctgagccctggccagtattacttcaaacccatgatgaaggagttccggtttgagccatcctcacagatgatcgaggtgcaggaaggccagaacctgaagatcaccatcacggggtaccgaaccgcttacagttgctatggcacagtgtcttccttaaacggagagcccgaacaaggggttgccatggaagcggtgggccagaacgactgcagcatttacggagaagacaccgtgacagacgaagagggcaagttcagattacgtggattgctgccgggatgtgtgtaccacgttcagctcaaggcagaaggcaacgaccacattgagcgggcgctcccccaccatagggtgattgaggttgggaataatgacatcgatgatgtaaacatcatagttttccggcagattaatcaatttgatttaagtggaaatgtgatcacttcctctgaataccttcctacgttatgggtcaagctttacaaaagcgaaaacctcgacaatccaatccagacagtttcccttggccagtccctgttcttccatttccccccactgctcagagatggcgagaactatgttgtgcttctggactccacactccccagatcccagtatgactacatcttgcctcaagtttctttcaccgcagtgggctaccataaacacatcaccttgatttttaatcccacgaggaagctgcctgaacaggacatcgcacaaggatcctacattgccctgccattgacgctgctggttctgctggccggttacaaccatgacaagctcattcctttgctgctgcagttgacaagccggctacagggagtcggcgcgctcggccaggcagcctctgacaatagcggcccagaagatgcaaagagacaagccaagaaacagaagacaaggcggacgtgaggaggaaggggacagttgcagtctcacttgggacaggccacagccaggggtccggccactacccgcccgtgggataaaagccaaaagcatgcgtcagctaacttcagcctgtgctgctgggcccgcaccccatgtcccttgtcactgtggcatcctgcacccatcctcacccctccgtagagcccctcgtgcaatgcaatgaatggaccctcctgtcactctgctgaacagaatttattttctgagtcaaatataatttattattatttttgtcaaagaagtatttaagctgtgctgtggtgtgagaatgtcattcttgatcttcagccttcgtttgcaagaagagttccagttgatgtggtgtttggttccatggcggggtaccctagggattcatctgttttcttcacttccctttgcatctgagatcctgctggaaaccacggcaacctgtatccactattaggaggtaaaaatcaataaaatggcccattcatttgtgttgtagctca

SEQ ID NO: 314918 - DNA, 2432 bp, Homo sapiens
  misc_feature (18)..(18): n is a, c, g, or t
aaggctaggtacaggctngtgttaatcggccgaggccgctctcacgccatcactctggaattttatcaggatggaaatgggcgtgagaatgtggggatttataacctctccaaaggagtcaaccgattctgcctgtccaagcctggtgtgtacaaagtgacccctcgctcctgccaccggtttgagcaagcgttctacacctatgacacgtcttcacctagtatcttgacattgacagccattcgccaccatgtccttggaactatcaccaccgacaaaatgatggatgtcactgtgactatcaagtcttccatcgacagtgaacccgccttggtcttaggccctctgaagtctgtgcaggagctgcggagggagcagcagctggctgagatcgaggcccgcaggcaggagagggagaaaaacggcaatgaggaaggtgaagaaagaatgaccaagcctcccgtgcaggagatggtagatgagttacaaggccccttctcgtatgatttctcttactgggcgcggtctggagagaaaatcactgttacaccgtcatctaaagagctgctcttttatcccccttcaatggaagccgttgtcagtggagaaagctgcccagggaagctgatcgagatccacgggaaggcaggcctgtttttagaaggccagatccaccccgagttggaaggagtcgagattgtcatcagtgaaaagggggcaagttcaccgctgatcacagtctttactgatgacaaaggtgcctacagtgttggccccctgcacagtgacctggagtacacggtgacctcacagaaggagggctatgttctgactgcagtggaaggaaccatcggagacttcaaggcctatgccctggcaggcgtaagctttgagataaaagctgaggatgaccagcccctcccgggagtcctcttatccctgagtggtggcctgtttcgttccaacctcttgacccaggacaacggcattctgacattctcaaacctgagccctggccagtattacttcaaacccatgatgaaggagttccggtttgagccatcctcacagatgatcgaggtgcaggaaggccagaacctgaagatcaccatcacggggtaccgaaccgcttacagttgctatggcacagtgtcttccttaaacggagagcccgaacaaggggttgccatggaagcggtgggccagaacgactgcagcatttacggagaagacaccgtgacagacgaagagggcaagttcagattacgtggattgctgccgggatgtgtgtaccacgttcagctcaaggcagaaggcaacgaccacattgagcgggcgctcccccaccatagggtgattgaggttgggaataatgacatcgatgatgtaaacatcatagttttccggcagattaatcaatttgatttaagtggaaatgtgatcacttcctctgaataccttcctacgttatgggtcaagctttacaaaagcgaaaacctcgacaatccaatccagacagtttcccttggccagtccctgttcttccatttccccccactgctcagagatggcgagaactatgttgtgcttctggactccacactccccagatcccagtatgactacatcttgcctcaagtttctttcaccgcagtgggctaccataaacacatcaccttgatttttaatcccacgaggaagctgcctgaacaggacatcgcacaaggatcctacattgccctgccattgacgctgctggttctgctggccggttacaaccatgacaagctcattcctttgctgctgcagttgacaagccggctacagggagtcggcgcgctcggccaggcagcctctgacaatagcggcccagaagatgcaaagagacaagccaagaaacagaagacaaggcggacgtgaggaggaaggggacagttgcagtctcacttgggacaggccacagccaggggtccggccactacccgcccgtgggataaaagccaaaagcatgcgtcagctaacttcagcctgtgctgctgggcccgcaccccatgtcccttgtcactgtggcatcctgcacccatcctcacccctccgtagagcccctcgtgcaatgcaatgaatggaccctcctgtcactctgctgaacagaatttattttctgagtcaaatataatttattattatttttgtcaaagaagtatttaagctgtgctgtggtgtgagaatgtcattcttgatcttcagccttcgtttgcaagaagagttccagttgatgtggtgtttggttccatggcggggtaccctagggattcatctgttttcttcacttccctttgcatctgagatcctgctggaaaccacggcaacctgtatccactattaggaggtaaaaatcaataaaatggcccattcatttgtgttgtagctca

SEQ ID NO: 314919 - DNA, 2301 bp, Homo sapiens
cagctatgtagaggcgataccggatgtttatgttcatacgagggcgtgtgtgaacaagcgttctacctggacgacagcgtcttcacctagtatcttgacattgacagccattcgccaccatgtccttggaactatcaccaccgacaaaatgatggatgtcactgtgactatcaagtcttccatcgacagtgaacccgccttggtcttaggccctctgaagtctgtgcaggagctgcggagggagcagcagctggctgagatcgaggcccgcaggcaggagagggagaaaaacggcaatgaggaaggtgaagaaagaatgaccaagcctcccgtgcaggagatggtagatgagttacaaggccccttctcgtatgatttctcttactgggcgcggtctggagagaaaatcactgttacaccgtcatctaaagagctgctcttttatcccccttcaatggaagccgttgtcagtggagaaagctgcccagggaagctgatcgagatccacgggaaggcaggcctgtttttagaaggccagatccaccccgagttggaaggagtcgagattgtcatcagtgaaaagggggcaagttcaccgctgatcacagtctttactgatgacaaaggtgcctacagtgttggccccctgcacagtgacctggagtacacggtgacctcacagaaggagggctatgttctgactgcagtggaaggaaccatcggagacttcaaggcctatgccctggcaggcgtaagctttgagataaaagctgaggatgaccagcccctcccgggagtcctcttatccctgagtggtggcctgtttcgttccaacctcttgacccaggacaacggcattctgacattctcaaacctgagccctggccagtattacttcaaacccatgatgaaggagttccggtttgagccatcctcacagatgatcgaggtgcaggaaggccagaacctgaagatcaccatcacggggtaccgaaccgcttacagttgctatggcacagtgtcttccttaaacggagagcccgaacaaggggttgccatggaagcggtgggccagaacgactgcagcatttacggagaagacaccgtgacagacgaagagggcaagttcagattacgtggattgctgccgggatgtgtgtaccacgttcagctcaaggcagaaggcaacgaccacattgagcgggcgctcccccaccatagggtgattgaggttgggaataatgacatcgatgatgtaaacatcatagttttccggcagattaatcaatttgatttaagtggaaatgtgatcacttcctctgaataccttcctacgttatgggtcaagctttacaaaagcgaaaacctcgacaatccaatccagacagtttcccttggccagtccctgttcttccatttccccccactgctcagagatggcgagaactatgttgtgcttctggactccacactccccagatcccagtatgactacatcttgcctcaagtttctttcaccgcagtgggctaccataaacacatcaccttgatttttaatcccacgaggaagctgcctgaacaggacatcgcacaaggatcctacattgccctgccattgacgctgctggttctgctggccggttacaaccatgacaagctcattcctttgctgctgcagttgacaagccggctacagggagtcggcgcgctcggccaggcagcctctgacaatagcggcccagaagatgcaaagagacaagccaagaaacagaagacaaggcggacgtgaggaggaaggggacagttgcagtctcacttgggacaggccacagccaggggtccggccactacccgcccgtgggataaaagccaaaagcatgcgtcagctaacttcagcctgtgctgctgggcccgcaccccatgtcccttgtcactgtggcatcctgcacccatcctcacccctccgtagagcccctcgtgcaatgcaatgaatggaccctcctgtcactctgctgaacagaatttattttctgagtcaaatataatttattattatttttgtcaaagaagtatttaagctgtgctgtggtgtgagaatgtcattcttgatcttcagccttcgtttgcaagaagagttccagttgatgtggtgtttggttccatggcggggtaccctagggattcatctgttttcttcacttccctttgcatctgagatcctgctggaaaccacggcaacctgtatccactattaggaggtaaaaatcaataaaatggcccattcatttgtgttgtagctca

SEQ ID NO: 314920 - DNA, 4669 bp, Homo sapiens
  misc_feature (3901)..(3901): n is a, c, g, or t
  misc_feature (3914)..(3914): n is a, c, g, or t
  misc_feature (3924)..(3924): n is a, c, g, or t
  misc_feature (3926)..(3926): n is a, c, g, or t
  misc_feature (3937)..(3937): n is a, c, g, or t
agccgacgaccgtggagctccatgtggatggagtcagtgacatctgcacaaagggtggggacatcaactttgtcttcactgggttctctgtgaatggcaaggtcctcagcaaagggcagcccctgggtcctgcgggagttcaggtgtctctgagaaacactgggaccgaagcaaagatccagtccacagttacacagcctggcggaaagtttgcattttttaaagttctgcctggagattatgaaatcctcgcaactcatccaacctgggcgttgaaagaggcaagcaccacagtgcgtgtaaccaactccaatgccaatgcggccagtcccctcatagttgctggctacaatgtgtctggctctgtccgaagtgatggggagcccatgaaaggcgtgaagtttcttctcttttcttctttagtaactaaagaggatgtcctgggctgcaatgtctcaccagtgcctgggttccagccccaagacgagagtctggtgtatttgtgctacacggtctccagagaagatggctcgttctctttctattccttgccaagtgggggctacactgtgattccgttctatcgaggggagaggattacctttgatgtggcgccttccagacttgacttcacagtggagcatgacagcttgaaaatcgagcccgtgttccacgtcatgggattctccgtcaccgggagggtcttgaacggacccgaaggagatggtgttccagaagcagtagtcaccctgaataaccaaatcaaagttaaaacaaaagctgatggctcattccgccttgagaacataaccacagggacatacaccatccatgctcagaaagagcacctctactttgaaacggtcaccatcaaaattgcaccaaacacacctcagctggctgacattgttgcaacagggttcagtgtctgtggtcagatatcaatcattcgcttccccgacaccgtcaagcagatgaataaatacaaagttgtcctgtcatctcaagacaaggacaagtctttggtcaccgtggagacagatgctcatggatcattttgttttaaagcaaacccagggacttacaaagtgcaggtgatggttcctgaggcagaaaccagagcagggctgacgttgaaaccccagacatttcctcttactgtgaccgacaggcctgtgatggatgtggcctttgtacagttcttggcatcagtttctgggaaagtctcttgtttggacacctgtggtgacttgctggtgactctacagtccctgagccgccagggtgagaagcggagcctccagctctccggcaaggtcaacgccatgactttcacctttgacaacgtgctccctggaaaatacaaaataagcatcatgcatgaggattggtgctggaagaacaagagcctggaggtggaagtgctggaggatgacgtgtctgcagttgagttcaggcagacgggctacatgctgagatgttccctgtctcacgccatcactctggaattttatcaggatggaaatgggcgtgagaatgtggggatttataacctctccaaaggagtcaaccgattctgcctgtccaagcctggtgtgtacaaagtgacccctcgctcctgccaccggtttgagcaagcgttctacacctatgacacgtcttcacctagtatcttgacattgacagccattcgccaccatgtccttggaactatcaccaccgacaaaatgatggatgtcactgtgactatcaagtcttccatcgacagtgaacccgccttggtcttaggccctctgaagtctgtgcaggagctgcggagggagcagcagctggctgagatcgaggcccgcaggcaggagagggagaaaaacggcaatgaggaaggtgaagaaagaatgaccaagcctcccgtgcaggagatggtagatgagttacaaggccccttctcgtatgatttctcttactgggcgcggtctggagagaaaatcactgttacaccgtcatctaaagagctgctcttttatcccccttcaatggaagccgttgtcagtggagaaagctgcccagggaagctgatcgagatccacgggaaggcaggcctgtttttagaaggccagatccaccccgagttggaaggagtcgagattgtcatcagtgaaaagggggcaagttcaccgctgatcacagtctttactgatgacaaaggtgcctacagtgttggccccctgcacagtgacctggagtacacggtgacctcacagaaggagggctatgttctgactgcagtggaaggaaccatcggagacttcaaggcctatgccctggcaggcgtaagctttgagataaaagctgaggatgaccagcccctcccgggagtcctcttatccctgagtggtggcctgtttcgttccaacctcttgacccaggacaacggcattctgacattctcaaacctgagccctggccagtattacttcaaacccatgatgaaggagttccggtttgagccatcctcacagatgatcgaggtgcaggaaggccagaacctgaagatcaccatcacggggtaccgaaccgcttacagttgctatggcacagtgtcttccttaaacggagagcccgaacaaggggttgccatggaagcggtgggccagaacgactgcagcatttacggagaagacaccgtgacagacgaagagggcaagttcagattacgtggattgctgccgggatgtgtgtaccacgttcagctcaaggcagaaggcaacgaccacattgagcgggcgctcccccaccatagggtgattgaggttgggaataatgacatcgatgatgtaaacatcatagttttccggcagattaatcaatttgatttaagtggaaatgtgatcacttcctctgaataccttcctacgttatgggtcaagctttacaaaagcgaaaacctcgacaatccaatccagacagtttcccttggccagtccctgttcttccatttccccccactgctcagagatggcgagaactatgttgtgcttctggactccacactccccagatcccagtatgactacatcttgcctcaagtttctttcaccgcagtgggctaccataaacacatcaccttgatttttaatcccacgaggaagctgcctgaacaggacatcgcacaaggatcctacattgccctgccattgacgctgctggttctgctggccggttacaaccatgacaagctcattcctttgctgctgcagttgacaagccggctacagggagtcggcgcgctcggccaggcagcctctgacaatagcggcccagaagatgcaaagagacaagccaagaaacagaagacaaggcggacgtgaggaggaaggggacagttgcagtctcacttgggacaggccacagccaggggtccggccactacccgcccgtgggataaaagccaaaagcatgcgtcagctaacttcagcctgtgctgctgggcccgcaccccatgtcccttgtcactgtggcatcctgcacccatcctcacccctccgtagagcccctcgtgcaatgcaatgaatggaccctcctgtcactctgctgaacagaatttattttctgagtcaaatataatttattattatttttgtcaaagaagtatttaagctgtgctgtggtgtgagaatgtcattcttgatcttcagccttcgtttgcaagaagagttccagttgatgtggtgtttggttccatggcggggtaccctagggattcatctgttttcttcacttccctttgcatctgagatcctgctggaaaccacggcaacctgtatccactattaggaggtaaaaatcaataaaatggcccattcatttgtgttgtagctcaaaaaaaaaaaaaaaaaaaaanaaaaaaaaaaaanaaaaaaaaananaaaaaaaaaanaaaaaaaaagaggggggggggggatgaacgattcacgctcctccaaggggggcagcgtgaaagcaccgacaccgagccattcaagtggtaaagcagggggccaacaaagggcagggtagaattagaccatagaaagcaggacgagggcgcaaattaaacacacgggtaatgagccggcaagaaatagtgaactagcacagcgacagacatcaagaagaagaaacaccacacgatataagccagggaggggaaccagaaacaagaggggaacgcacgcatacagagcaaaaataacacaagccaacagtggggcgacataaaaataacaaagtataaaaccggatgcaatagcgtggcaaaacgaacagacaagagatacacaagggcccaagagcgcacaagagacagaatgatgcgcagacagcctgacgatccagtaagatagttccagacaagacgcatattaacccacagggcgggacacagatgtggaattacattaagcagggaacccaagaaccaagcacaggcaagagcaggagggactggatacaatccaacacaaacacagacgccacaacgacgcacaacaggcgacggacaggacagacatgcggagagaaggccacaccccagacgatcatgcggaccccaaaacaagcctcgacgaaagggccaacacagcgaacatcatcacactgcacggtacatcagcctggaccaacccaccaa

SEQ ID NO: 314921 - DNA, 4302 bp, Homo sapiens
agccgacgaccgtggagctccatgtggatggagtcagtgacatctgcacaaagggtggggacatcaactttgtcttcactgggttctctgtgaatggcaaggtcctcagcaaagggcagcccctgggtcctgcgggagttcaggtgtctctgagaaacactgggaccgaagcaaagatccagtccacagttacacagcctggcggaaagtttgcattttttaaagttctgcctggagattatgaaatcctcgcaactcatccaacctgggcgttgaaagaggcaagcaccacagtgcgtgtaaccaactccaatgccaatgcggccagtcccctcatagttgctggctacaatgtgtctggctctgtccgaagtgatggggagcccatgaaaggcgtgaagtttcttctcttttcttctttagtaactaaagaggatgtcctgggctgcaatgtctcaccagtgcctgggttccagccccaagacgagagtctggtgtatttgtgctacacggtctccagagaagatggctcgttctctttctattccttgccaagtgggggctacactgtgattccgttctatcgaggggagaggattacctttgatgtggcgccttccagacttgacttcacagtggagcatgacagcttgaaaatcgagcccgtgttccacgtcatgggattctccgtcaccgggagggtcttgaacggacccgaaggagatggtgttccagaagcagtagtcaccctgaataaccaaatcaaagttaaaacaaaagctgatggctcattccgccttgagaacataaccacagggacatacaccatccatgctcagaaagagcacctctactttgaaacggtcaccatcaaaattgcaccaaacacacctcagctggctgacattgttgcaacagggttcagtgtctgtggtcagatatcaatcattcgcttccccgacaccgtcaagcagatgaataaatacaaagttgtcctgtcatctcaagacaaggacaagtctttggtcaccgtggagacagatgctcatggatcattttgttttaaagcaaacccagggacttacaaagtgcaggtgatggttcctgaggcagaaaccagagcagggctgacgttgaaaccccagacatttcctcttactgtgaccgacaggcctgtgatggatgtggcctttgtacagttcttggcatcagtttctgggaaagtctcttgtttggacacctgtggtgacttgctggtgactctacagtccctgagccgccagggtgagaagcggagcctccagctctccggcaaggtcaacgccatgactttcacctttgacaacgtgctccctggaaaatacaaaataagcatcatgcatgaggattggtgctggaagaacaagagcctggaggtggaagtgctggaggatgacgtgtctgcagttgagttcaggcagacgggctacatgctgagatgttccctgtctcacgccatcactctggaattttatcaggatggaaatgggcgtgagaatgtggggatttataacctctccaaaggagtcaaccgattctgcctgtccaagcctggtgtgtacaaagtgacccctcgctcctgccaccggtttgagcaagcgttctacacctatgacacgtcttcacctagtatcttgacattgacagccattcgccaccatgtccttggaactatcaccaccgacaaaatgatggatgtcactgtgactatcaagtcttccatcgacagtgaacccgccttggtcttaggccctctgaagtctgtgcaggagctgcggagggagcagcagctggctgagatcgaggcccgcaggcaggagagggagaaaaacggcaatgaggaaggtgaagaaagaatgaccaagcctcccgtgcaggagatggtagatgagttacaaggccccttctcgtatgatttctcttactgggcgcggtctggagagaaaatcactgttacaccgtcatctaaagagctgctcttttatcccccttcaatggaagccgttgtcagtggagaaagctgcccagggaagctgatcgagatccacgggaaggcaggcctgtttttagaaggccagatccaccccgagttggaaggagtcgagattgtcatcagtgaaaagggggcaagttcaccgctgatcacagtctttactgatgacaaaggtgcctacagtgttggccccctgcacagtgacctggagtacacggtgacctcacagaaggagggctatgttctgactgcagtggaaggaaccatcggagacttcaaggcctatgccctggcaggcgtaagctttgagataaaagctgaggatgaccagcccctcccgggagtcctcttatccctgagtggtggcctgtttcgttccaacctcttgacccaggacaacggcattctgacattctcaaacctgagccctggccagtattacttcaaacccatgatgaaggagttccggtttgagccatcctcacagatgatcgaggtgcaggaaggccagaacctgaagatcaccatcacggggtaccgaaccgcttacagttgctatggcacagtgtcttccttaaacggagagcccgaacaaggggttgccatggaagcggtgggccagaacgactgcagcatttacggagaagacaccgtgacagacgaagagggcaagttcagattacgtggattgctgccgggatgtgtgtaccacgttcagctcaaggcagaaggcaacgaccacattgagcgggcgctcccccaccatagggtgattgaggttgggaataatgacatcgatgatgtaaacatcatagttttccggcagattaatcaatttgatttaagtggaaatgtgatcacttcctctgaataccttcctacgttatgggtcaagctttacaaaagcgaaaacctcgacaatccaatccagacagtttcccttggccagtccctgttcttccatttccccccactgctcagagatggcgagaactatgttgtgcttctggactccacactccccagatcccagtatgactacatcttgcctcaagtttctttcaccgcagtgggctaccataaacacatcaccttgatttttaatcccacgaggaagctgcctgaacaggacatcgcacaaggatcctacattgccctgccattgacgctgctggttctgctggccggttacaaccatgacaaggtaggaaatccagaggcctcaggagatggcgggcatgtcagggagagcgagtcctcacagctgcaggagtgatagcagagggatgtccagggtcacagaaatcacatttccgggtcgggagggcccgtgaaggcctcaagtccagacttaggtctcctttcaaggctgtaaacttctgtaacatctcctaatccttaacctggaacacctctagggacatattaggcccggagagaggccagcccatccctggggactcattagtaagaggcctgcctcgtttgaactgaaacccacccattagcacgtggcagctgctgatcatgtctgaagaaggtgtgttgagaagtgaggctccgctgttcatctggcaaaagcctcctctttgtacccctctctctcacactttctctcttttctagctcattcctttgctgctgcagttgacaagccggctacagggagtcggcgcgctcggccaggcagcctctgacaatagcggcccagaagatgcaaagagacaagccaagaaacagaagacaaggcggacgtgaggaggaaggggacagttgcagtctcacttgggacaggccacagccaggggtccggccactacccgcccgtgggataaaagccaaaagcatgcgtcagctaacttcagcctgtgctgctgggcccgcaccccatgtcccttgtcactgtggcatcctgcacccatcctcacccctccgtagagcccctcgtgcaatgcaatgaatggaccctcctgtcactctgctgaacagaatttattttctgagtcaaatataatttattattatttttgtcaaagaagtatttaagctgtgctgtggtgtgagaatgtcattcttgatcttcagccttcgtttgcaagaagagttccagttgatgtggtgtttggttccatggcggggtaccctagggattcatctgttttcttcacttccctttgcatctgagatcctgctggaaaccacggcaacctgtatccactattaggaggtaaaaatcaataaaatggcccattcatttgtgttgtagctca

SEQ ID NO: 314922 - DNA, 1734 bp, Homo sapiens
  misc_feature (7)..(7): n is a, c, g, or t
  misc_feature (10)..(11): n is a, c, g, or t
  misc_feature (13)..(13): n is a, c, g, or t
ttcgggnagnngngtgagtctcaagccagtggacagtgaggggtgagggcacgtcctccgaaggagcagtgttggccccctgcacagtgacctggagtacacggtgacctcacagaaggagggctatgttctgactgcagtggaaggaaccatcggagacttcaaggcctatgccctggcaggcgtaagctttgagataaaagctgaggatgaccagcccctcccgggagtcctcttatccctgagtggtggcctgtttcgttccaacctcttgacccaggacaacggcattctgacattctcaaacctgagccctggccagtattacttcaaacccatgatgaaggagttccggtttgagccatcctcacagatgatcgaggtgcaggaaggccagaacctgaagatcaccatcacggggtaccgaaccgcttacagttgctatggcacagtgtcttccttaaacggagagcccgaacaaggggttgccatggaagcggtgggccagaacgactgcagcatttacggagaagacaccgtgacagacgaagagggcaagttcagattacgtggattgctgccgggatgtgtgtaccacgttcagctcaaggcagaaggcaacgaccacattgagcgggcgctcccccaccatagggtgattgaggttgggaataatgacatcgatgatgtaaacatcatagttttccggcagattaatcaatttgatttaagtggaaatgtgatcacttcctctgaataccttcctacgttatgggtcaagctttacaaaagcgaaaacctcgacaatccaatccagacagtttcccttggccagtccctgttcttccatttccccccactgctcagagatggcgagaactatgttgtgcttctggactccacactccccagatcccagtatgactacatcttgcctcaagtttctttcaccgcagtgggctaccataaacacatcaccttgatttttaatcccacgaggaagctgcctgaacaggacatcgcacaaggatcctacattgccctgccattgacgctgctggttctgctggccggttacaaccatgacaagctcattcctttgctgctgcagttgacaagccggctacagggagtcggcgcgctcggccaggcagcctctgacaatagcggcccagaagatgcaaagagacaagccaagaaacagaagacaaggcggacgtgaggaggaaggggacagttgcagtctcacttgggacaggccacagccaggggtccggccactacccgcccgtgggataaaagccaaaagcatgcgtcagctaacttcagcctgtgctgctgggcccgcaccccatgtcccttgtcactgtggcatcctgcacccatcctcacccctccgtagagcccctcgtgcaatgcaatgaatggaccctcctgtcactctgctgaacagaatttattttctgagtcaaatataatttattattatttttgtcaaagaagtatttaagctgtgctgtggtgtgagaatgtcattcttgatcttcagccttcgtttgcaagaagagttccagttgatgtggtgtttggttccatggcggggtaccctagggattcatctgttttcttcacttccctttgcatctgagatcctgctggaaaccacggcaacctgtatccactattaggaggtaaaaatcaataaaatggcccattcatttgtgttgtagctca

SEQ ID NO: 314923 - DNA, 1604 bp, Homo sapiens
agttgtgattgccattacctgactgtgagtggtgattatagagagagggttactatttttggctgccagggaagccatggcgctcccctggtgtaattctggtccatcgtgacattcgcccctcacttttaagccatgcctagatgtggctgctgaggctcagtgtgattatcttggcagagccctggccagtattacttcaaacccatgatgaaggagttccggtttgagccatcctcacagatgatcgaggtgcaggaaggccagaacctgaagatcaccatcacggggtaccgaaccgcttacagttgctatggcacagtgtcttccttaaacggagagcccgaacaaggggttgccatggaagcggtgggccagaacgactgcagcatttacggagaagacaccgtgacagacgaagagggcaagttcagattacgtggattgctgccgggatgtgtgtaccacgttcagctcaaggcagaaggcaacgaccacattgagcgggcgctcccccaccatagggtgattgaggttgggaataatgacatcgatgatgtaaacatcatagttttccggcagattaatcaatttgatttaagtggaaatgtgatcacttcctctgaataccttcctacgttatgggtcaagctttacaaaagcgaaaacctcgacaatccaatccagacagtttcccttggccagtccctgttcttccatttccccccactgctcagagatggcgagaactatgttgtgcttctggactccacactccccagatcccagtatgactacatcttgcctcaagtttctttcaccgcagtgggctaccataaacacatcaccttgatttttaatcccacgaggaagctgcctgaacaggacatcgcacaaggatcctacattgccctgccattgacgctgctggttctgctggccggttacaaccatgacaagctcattcctttgctgctgcagttgacaagccggctacagggagtcggcgcgctcggccaggcagcctctgacaatagcggcccagaagatgcaaagagacaagccaagaaacagaagacaaggcggacgtgaggaggaaggggacagttgcagtctcacttgggacaggccacagccaggggtccggccactacccgcccgtgggataaaagccaaaagcatgcgtcagctaacttcagcctgtgctgctgggcccgcaccccatgtcccttgtcactgtggcatcctgcacccatcctcacccctccgtagagcccctcgtgcaatgcaatgaatggaccctcctgtcactctgctgaacagaatttattttctgagtcaaatataatttattattatttttgtcaaagaagtatttaagctgtgctgtggtgtgagaatgtcattcttgatcttcagccttcgtttgcaagaagagttccagttgatgtggtgtttggttccatggcggggtaccctagggattcatctgttttcttcacttccctttgcatctgagatcctgctggaaaccacggcaacctgtatccactattaggaggtaaaaatcaataaaatggcccattcatttgtgttgtagctca

SEQ ID NO: 314924 - DNA, 3999 bp, Homo sapiens
agccgacgaccgtggagctccatgtggatggagtcagtgacatctgcacaaagggtggggacatcaactttgtcttcactgggttctctgtgaatggcaaggtcctcagcaaagggcagcccctgggtcctgcgggagttcaggtgtctctgagaaacactgggaccgaagcaaagatccagtccacagttacacagcctggcggaaagtttgcattttttaaagttctgcctggagattatgaaatcctcgcaactcatccaacctgggcgttgaaagaggcaagcaccacagtgcgtgtaaccaactccaatgccaatgcggccagtcccctcatagttgctggctacaatgtgtctggctctgtccgaagtgatggggagcccatgaaaggcgtgaagtttcttctcttttcttctttagtaactaaagaggatgtcctgggctgcaatgtctcaccagtgcctgggttccagccccaagacgagagtctggtgtatttgtgctacacggtctccagagaagatggctcgttctctttctattccttgccaagtgggggctacactgtgattccgttctatcgaggggagaggattacctttgatgtggcgccttccagacttgacttcacagtggagcatgacagcttgaaaatcgagcccgtgttccacgtcatgggattctccgtcaccgggagggtcttgaacggacccgaaggagatggtgttccagaagcagtagtcaccctgaataaccaaatcaaagttaaaacaaaagctgatggctcattccgccttgagaacataaccacagggacatacaccatccatgctcagaaagagcacctctactttgaaacggtcaccatcaaaattgcaccaaacacacctcagctggctgacattgttgcaacagggttcagtgtctgtggtcagatatcaatcattcgcttccccgacaccgtcaagcagatgaataaatacaaagttgtcctgtcatctcaagacaaggacaagtctttggtcaccgtggagacagatgctcatggatcattttgttttaaagcaaacccagggacttacaaagtgcaggtgatggttcctgaggcagaaaccagagcagggctgacgttgaaaccccagacatttcctcttactgtgaccgacaggcctgtgatggatgtggcctttgtacagttcttggcatcagtttctgggaaagtctcttgtttggacacctgtggtgacttgctggtgactctacagtccctgagccgccagggtgagaagcggagcctccagctctccggcaaggtcaacgccatgactttcacctttgacaacgtgctccctggaaaatacaaaataagcatcatgcatgaggattggtgctggaagaacaagagcctggaggtggaagtgctggaggatgacgtgtctgcagttgagttcaggcagacgggctacatgctgagatgttccctgtctcacgccatcactctggaattttatcaggatggaaatgggcgtgagaatgtggggatttataacctctccaaaggagtcaaccgattctgcctgtccaagcctggtgtgtacaaagtgacccctcgctcctgccaccggtttgagcaagcgttctacacctatgacacgtcttcacctagtatcttgacattgacagccattcgccaccatgtccttggaactatcaccaccgacaaaatgatggatgtcactgtgactatcaagtcttccatcgacagtgaacccgccttggtcttaggccctctgaagtctgtgcaggagctgcggagggagcagcagctggctgagatcgaggcccgcaggcaggagagggagaaaaacggcaatgaggaaggtgaagaaagaatgaccaagcctcccgtgcaggagatggtagatgagttacaaggccccttctcgtatgatttctcttactgggcgcggtctggagagaaaatcactgttacaccgtcatctaaagagctgctcttttatcccccttcaatggaagccgttgtcagtggagaaagctgcccagggaagctgatcgagatccacgggaaggcaggcctgtttttagaaggccagatccaccccgagttggaaggagtcgagattgtcatcagtgaaaagggggcaagttcaccgctgatcacagtctttactgatgacaaaggtgcctacagtgttggccccctgcacagtgacctggagtacacggtgacctcacagaaggagggctatgttctgactgcagtggaaggaaccatcggagacttcaaggcctatgccctggcaggcgtaagctttgagataaaagctgaggatgaccagcccctcccgggagtcctcttatccctgagtggtggcctgtttcgttccaacctcttgacccaggacaacggcattctgacattctcaaacctgagccctggccagtattacttcaaacccatgatgaaggagttccggtttgagccatcctcacagatgatcgaggtgcaggaaggccagaacctgaagatcaccatcacggggtaccgaaccgcttacagttgctatggcacagtgtcttccttaaacggagagcccgaacaaggggttgccatggaagcggtgggccagaacgactgcagcatttacggagaagacaccgtgacagacgaagagggcaagttcagattacgtggattgctgccgggatgtgtgtaccacgttcagctcaaggcagaaggcaacgaccacattgagcgggcgctcccccaccatagggtgattgaggttgggaataatgacatcgatgatgtaaacatcatagttttccggcagattaatcaatttgatttaagtggaaatgtgatcacttcctctgaataccttcctacgttatgggtcaagctttacaaaagcgaaaacctcgacaatccaatccagacagtttcccttggccagtccctgttcttccatttccccccactgctcagagatggcgagaactatgttgtgcttctggactccacactccccagatcccagtatgactacatcttgcctcaagtttctttcaccgcagtgggctaccataaacacatcaccttgatttttaatcccacgaggaagctgcctgaacaggacatcgcacaaggatcctacattgccctgccattgacgctgctggttctgctggccggttacaaccatgacaagctcattcctttgctgctgcagttgacaagccggctacagggagtcggcgcgctcggccaggcagcctctgacaatagcggcccagaagatgcaaagagacaagccaagaaacagaagacaaggcggacgtgaggaggaaggggacagttgcagtctcacttgggacaggccacagccaggggtccggccactacccgcccgtgggataaaagccaaaagcatgcgtcagctaacttcagcctgtgctgctgggcccgcaccccatgtcccttgtcactgtggcatcctgcacccatcctcacccctccgtagagcccctcgtgcaatgcaatgaatggaccctcctgtcactctgctgaacagaatttattttctgagtcaaatataatttattattatttttgtcaaagaagtatttaagctgtgctgtggtgtgagaatgtcattcttgatcttcagccttcgtttgcaagaagagttccagttgatgtggtgtttggttccatggcggggtaccctagggattcatctgttttcttcacttccctttgcatctgagatcctgctggaaaccacggcaacctgtatccactattaggagatgggttcttgttctgttccccaggctggagtacaatggcaccatcacagctcactgcagccttgatctcccagggtcaagggatcatcgtgcctcagcctgctgagtagctgggactacaggagtgcaccaccacacctggctaatttttttaaaaaaaat

SEQ ID NO: 314925 - DNA, 3647 bp, Homo sapiens
agccgacgaccgtggagctccatgtggatggagtcagtgacatctgcacaaagggtggggacatcaactttgtcttcactgggttctctgtgaatggcaaggtcctcagcaaagggcagcccctgggtcctgcgggagttcaggtgtctctgagaaacactgggaccgaagcaaagatccagtccacagttacacagcctggcggaaagtttgcattttttaaagttctgcctggagattatgaaatcctcgcaactcatccaacctgggcgttgaaagaggcaagcaccacagtgcgtgtaaccaactccaatgccaatgcggccagtcccctcatagttgctggctacaatgtgtctggctctgtccgaagtgatggggagcccatgaaaggcgtgaagtttcttctcttttcttctttagtaactaaagaggatgtcctgggctgcaatgtctcaccagtgcctgggttccagccccaagacgagagtctggtgtatttgtgctacacggtctccagagaagatggctcgttctctttctattccttgccaagtgggggctacactgtgattccgttctatcgaggggagaggattacctttgatgtggcgccttccagacttgacttcacagtggagcatgacagcttgaaaatcgagcccgtgttccacgtcatgggattctccgtcaccgggagggtcttgaacggacccgaaggagatggtgttccagaagcagtagtcaccctgaataaccaaatcaaagttaaaacaaaagctgatggctcattccgccttgagaacataaccacagggacatacaccatccatgctcagaaagagcacctctactttgaaacggtcaccatcaaaattgcaccaaacacacctcagctggctgacattgttgcaacagggttcagtgtctgtggtcagatatcaatcattcgcttccccgacaccgtcaagcagatgaataaatacaaagttgtcctgtcatctcaagacaaggacaagtctttggtcaccgtggagacagatgctcatggatcattttgttttaaagcaaacccagggacttacaaagtgcaggtgatggttcctgaggcagaaaccagagcagggctgacgttgaaaccccagacatttcctcttactgtgaccgacaggcctgtgatggatgtggcctttgtacagttcttggcatcagtttctgggaaagtctcttgtttggacacctgtggtgacttgctggtgactctacagtccctgagccgccagggtgagaagcggagcctccagctctccggcaaggtcaacgccatgactttcacctttgacaacgtgctccctggaaaatacaaaataagcatcatgcatgaggattggtgctggaagaacaagagcctggaggtggaagtgctggaggatgacgtgtctgcagttgagttcaggcagacgggctacatgctgagatgttccctgtctcacgccatcactctggaattttatcaggatggaaatgggcgtgagaatgtggggatttataacctctccaaaggagtcaaccgattctgcctgtccaagcctggtgtgtacaaagtgacccctcgctcctgccaccggtttgagcaagcgttctacacctatgacacgtcttcacctagtatcttgacattgacagccattcgccaccatgtccttggaactatcaccaccgacaaaatgatggatgtcactgtgactatcaagtcttccatcgacagtgaacccgccttggtcttaggccctctgaagtctgtgcaggagctgcggagggagcagcagctggctgagatcgaggcccgcaggcaggagagggagaaaaacggcaatgaggaaggtgaagaaagaatgaccaagcctcccgtgcaggagatggtagatgagttacaaggccccttctcgtatgatttctcttactgggcgcggtctggagagaaaatcactgttacaccgtcatctaaagagctgctcttttatcccccttcaatggaagccgttgtcagtggagaaagctgcccagggaagctgatcgagatccacgggaaggcaggcctgtttttagaaggccagatccaccccgagttggaaggagtcgagattgtcatcagtgaaaagggggcaagttcaccgctgatcacagtctttactgatgacaaaggtgcctacagtgttggccccctgcacagtgacctggagtacacggtgacctcacagaaggagggctatgttctgactgcagtggaaggaaccatcggagacttcaaggcctatgccctggcaggcgtaagctttgagataaaagctgaggatgaccagcccctcccgggagtcctcttatccctgagtggtggcctgtttcgttccaacctcttgacccaggacaacggcattctgacattctcaaacctgagccctggccagtattacttcaaacccatgatgaaggagttccggtttgagccatcctcacagatgatcgaggtgcaggaaggccagaacctgaagatcaccatcacggggtaccgaaccgcttacagttgctatggcacagtgtcttccttaaacggagagcccgaacaaggggttgccatggaagcggtgggccagaacgactgcagcatttacggagaagacaccgtgacagacgaagagggcaagttcagattacgtggattgctgccgggatgtgtgtaccacgttcagctcaaggcagaaggcaacgaccacattgagcgggcgctcccccaccatagggtgattgaggttgggaataatgacatcgatgatgtaaacatcatagttttccggcagattaatcaatttgatttaagtggaaatgtgatcacttcctctgaataccttcctacgttatgggtcaagctttacaaaagcgaaaacctcgacaatccaatccagacagtttcccttggccagtccctgttcttccatttccccccactgctcagagatggcgagaactatgttgtgcttctggactccacactccccagatcccagtatgactacatcttgcctcaagtttctttcaccgcagtgggctaccataaacacatcaccttgatttttaatcccacgaggaagctgcctgaacaggacatcgcacaaggatcctacattgccctgccattgacgctgctggttctgctggccggttacaaccatgacaagctcattcctttgctgctgcagttgacaagccggctacagggagtcggcgcgctcggccaggcagcctctgacaatagcggcccagaagatgcaaagagacaagccaagaaacagaagacaaggcggacgtgaggaggaaggggacagttgcagtctcacttgggacaggccacagccaggggtccggccactacccgcccgtgggataaaagccaaaagcatgcgtcagctaacttcagcctgtgctgctgggcccgcaccccatgtcccttgtcactgtggcatcctgcacccatcctcacccctccgtagagcccctcgtgcaatgcaatgaatggaccctcctgtcactctgctgaacagaatttattttctgagtcaaatataatttattattatttttgtcaaaga

SEQ ID NO: 314926 - DNA, 5091 bp, Homo sapiens
  misc_feature (4323)..(4323): n is a, c, g, or t
  misc_feature (4336)..(4336): n is a, c, g, or t
  misc_feature (4346)..(4346): n is a, c, g, or t
  misc_feature (4348)..(4348): n is a, c, g, or t
  misc_feature (4359)..(4359): n is a, c, g, or t
agccgacgaccgtggagctccatgtggatggagtcagtgacatctgcacaaagggtggggacatcaactttgtcttcactgggttctctgtgaatggcaaggtcctcagcaaagggcagcccctgggtcctgcgggagttcaggtgtctctgagaaacactgggaccgaagcaaagatccagtccacagttacacagcctggcggaaagtttgcattttttaaagttctgcctggagattatgaaatcctcgcaactcatccaacctgggcgttgaaagaggcaagcaccacagtgcgtgtaaccaactccaatgccaatgcggccagtcccctcatagttgctggctacaatgtgtctggctctgtccgaagtgatggggagcccatgaaaggcgtgaagtttcttctcttttcttctttagtaactaaagaggatgtcctgggctgcaatgtctcaccagtgcctgggttccagccccaagacgagagtctggtgtatttgtgctacacggtctccagagaagatggctcgttctctttctattccttgccaagtgggggctacactgtgattccgttctatcgaggggagaggattacctttgatgtggcgccttccagacttgacttcacagtggagcatgacagcttgaaaatcgagcccgtgttccacgtcatgggattctccgtcaccgggagggtcttgaacggacccgaaggagatggtgttccagaagcagtagtcaccctgaataaccaaatcaaagttaaaacaaaagctgatggctcattccgccttgagaacataaccacagggacatacaccatccatgctcagaaagagcacctctactttgaaacggtcaccatcaaaattgcaccaaacacacctcagctggctgacattgttgcaacagggttcagtgtctgtggtcagatatcaatcattcgcttccccgacaccgtcaagcagatgaataaatacaaagttgtcctgtcatctcaagacaaggacaagtctttggtcaccgtggagacagatgctcatggatcattttgttttaaagcaaacccagggacttacaaagtgcaggtgatggttcctgaggcagaaaccagagcagggctgacgttgaaaccccagacatttcctcttactgtgaccgacaggcctgtgatggatgtggcctttgtacagttcttggcatcagtttctgggaaagtctcttgtttggacacctgtggtgacttgctggtgactctacagtccctgagccgccagggtgagaagcggagcctccagctctccggcaaggtcaacgccatgactttcacctttgacaacgtgctccctggaaaatacaaaataagcatcatgcatgaggattggtgctggaagaacaagagcctggaggtggaagtgctggaggatgacgtgtctgcagttgagttcaggcagacgggctacatgctgagatgttccctgtctcacgccatcactctggaattttatcaggatggaaatgggcgtgagaatgtggggatttataacctctccaaaggagtcaaccgattctgcctgtccaagcctggtgtgtacaaagtgacccctcgctcctgccaccggtttgagcaagcgttctacacctatgacacgtcttcacctagtatcttgacattgacagccattcgccaccatgtccttggaactatcaccaccgacaaaatgatggatgtcactgtgactatcaagtcttccatcgacagtgaacccgccttggtcttaggccctctgaagtctgtgcaggagctgcggagggagcagcagctggctgagatcgaggcccgcaggcaggagagggagaaaaacggcaatgaggaaggtgaagaaagaatgaccaagcctcccgtgcaggagatggtagatgagttacaaggccccttctcgtatgatttctcttactgggcgcggtctggagagaaaatcactgttacaccgtcatctaaagagctgctcttttatcccccttcaatggaagccgttgtcagtggagaaagctgcccagggaagctgatcgagatccacgggaaggcaggcctgtttttagaaggccagatccaccccgagttggaaggagtcgagattgtcatcagtgaaaagggggcaagttcaccgctgatcacagtctttactgatgacaaaggtgcctacagtgttggccccctgcacagtgacctggagtacacggtgacctcacagaaggagggctatgttctgactgcagtggaaggaaccatcggagacttcaaggcctatgccctggcaggcgtaagctttgagataaaagctgaggatgaccagcccctcccgggagtcctcttatccctgagtggtggcctgtttcgttccaacctcttgacccaggacaacggcattctgacattctcaaacctgagccctggccagtattacttcaaacccatgatgaaggagttccggtttgagccatcctcacagatgatcgaggtgcaggaaggccagaacctgaagatcaccatcacggggtaccgaaccgcttacagttgctatggcacagtgtcttccttaaacggagagcccgaacaaggggttgccatggaagcggtgggccagaacgactgcagcatttacggagaagacaccgtgacagacgaagagggcaagttcagattacgtggattgctgccgggatgtgtgtaccacgttcagctcaaggcagaaggcaacgaccacattgagcgggcgctcccccaccatagggtgattgaggttgggaataatgacatcgatgatgtaaacatcatagttttccggcagattaatcaatttgatttaagtggaaatgtgatcacttcctctgaataccttcctacgttatgggtcaagctttacaaaagcgaaaacctcgacaatccaatccagacagtttcccttggccagtccctgttcttccatttccccccactgctcagagatggcgagaactatgttgtgcttctggactccacactccccagatcccagtatgactacatcttgcctcaagtttctttcaccgcagtgggctaccataaacacatcaccttgatttttaatcccacgaggaagctgcctgaacaggacatcgcacaaggatcctacattgccctgccattgacgctgctggttctgctggccggttacaaccatgacaaggtaggaaatccagaggcctcaggagatggcgggcatgtcagggagagcgagtcctcacagctgcaggagtgatagcagagggatgtccagggtcacagaaatcacatttccgggtcgggagggcccgtgaaggcctcaagtccagacttaggtctcctttcaaggctgtaaacttctgtaacatctcctaatccttaacctggaacacctctagggacatattaggcccggagagaggccagcccatccctggggactcattagtaagaggcctgcctcgtttgaactgaaacccacccattagcacgtggcagctgctgatcatgtctgaagaaggtgtgttgagaagtgaggctccgctgttcatctggcaaaagcctcctctttgtacccctctctctcacactttctctcttttctagctcattcctttgctgctgcagttgacaagccggctacagggagtcggcgcgctcggccaggcagcctctgacaatagcggcccagaagatgcaaagagacaagccaagaaacagaagacaaggcggacgtgaggaggaaggggacagttgcagtctcacttgggacaggccacagccaggggtccggccactacccgcccgtgggataaaagccaaaagcatgcgtcagctaacttcagcctgtgctgctgggcccgcaccccatgtcccttgtcactgtggcatcctgcacccatcctcacccctccgtagagcccctcgtgcaatgcaatgaatggaccctcctgtcactctgctgaacagaatttattttctgagtcaaatataatttattattatttttgtcaaagaagtatttaagctgtgctgtggtgtgagaatgtcattcttgatcttcagccttcgtttgcaagaagagttccagttgatgtggtgtttggttccatggcggggtaccctagggattcatctgttttcttcacttccctttgcatctgagatcctgctggaaaccacggcaacctgtatccactattaggaggtaaaaatcaataaaatggcccattcatttgtgttgtagctcaaaaaaaaaaaaaaaaaaaaanaaaaaaaaaaaanaaaaaaaaananaaaaaaaaaanaaaaaaaaagaggggggggggggatgaacgattcacgctcctccaaggggggcagcgtgaaagcaccgacaccgagccattcaagtggtaaagcagggggccaacaaagggcagggtagaattagaccatagaaagcaggacgagggcgcaaattaaacacacgggtaatgagccggcaagaaatagtgaactagcacagcgacagacatcaagaagaagaaacaccacacgatataagccagggaggggaaccagaaacaagaggggaacgcacgcatacagagcaaaaataacacaagccaacagtggggcgacataaaaataacaaagtataaaaccggatgcaatagcgtggcaaaacgaacagacaagagatacacaagggcccaagagcgcacaagagacagaatgatgcgcagacagcctgacgatccagtaagatagttccagacaagacgcatattaacccacagggcgggacacagatgtggaattacattaagcagggaacccaagaaccaagcacaggcaagagcaggagggactggatacaatccaacacaaacacagacgccacaacgacgcacaacaggcgacggacaggacagacatgcggagagaaggccacaccccagacgatcatgcggaccccaaaacaagcctcgacgaaagggccaacacagcgaacatcatcacactgcacggtacatcagcctggaccaacccaccaa

SEQ ID NO: 314927 - DNA, 1139 bp, Homo sapiens
  misc_feature (1)..(1): n is a, c, g, or t
  misc_feature (15)..(15): n is a, c, g, or t
ntgccggctcccagngcatgtgccgctcccaacgcatgtgccggctccccccaccatagggtgattgaggttgggaataatgacatcgatgatgtaaacatcatagttttccggcagattaatcaatttgatttaagtggaaatgtgatcacttcctctgaataccttcctacgttatgggtcaagctttacaaaagcgaaaacctcgacaatccaatccagacagtttcccttggccagtccctgttcttccatttccccccactgctcagagatggcgagaactatgttgtgcttctggactccacactccccagatcccagtatgactacatcttgcctcaagtttctttcaccgcagtgggctaccataaacacatcaccttgatttttaatcccacgaggaagctgcctgaacaggacatcgcacaaggatcctacattgccctgccattgacgctgctggttctgctggccggttacaaccatgacaagctcattcctttgctgctgcagttgacaagccggctacagggagtcggcgcgctcggccaggcagcctctgacaatagcggcccagaagatgcaaagagacaagccaagaaacagaagacaaggcggacgtgaggaggaaggggacagttgcagtctcacttgggacaggccacagccaggggtccggccactacccgcccgtgggataaaagccaaaagcatgcgtcagctaacttcagcctgtgctgctgggcccgcaccccatgtcccttgtcactgtggcatcctgcacccatcctcacccctccgtagagcccctcgtgcaatgcaatgaatggaccctcctgtcactctgctgaacagaatttattttctgagtcaaatataatttattattatttttgtcaaagaagtatttaagctgtgctgtggtgtgagaatgtcattcttgatcttcagccttcgtttgcaagaagagttccagttgatgtggtgtttggttccatggcggggtaccctagggattcatctgttttcttcacttccctttgcatctgagatcctgctggaaaccacggcaacctgtatccactattaggaggtaaaaatcaataaaatggcccattcatttgtgttgtagctca

SEQ ID NO: 314928 - DNA, 1140 bp, Homo sapiens
agtcagacggtcgtggtctaaagggtccccacgtatgttgatgtggctccccatcgatagggtgattgaggttgggaataatgacatcgatgatgtaaacatcatagttttccggcagattaatcaatttgatttaagtggaaatgtgatcacttcctctgaataccttcctacgttatgggtcaagctttacaaaagcgaaaacctcgacaatccaatccagacagtttcccttggccagtccctgttcttccatttccccccactgctcagagatggcgagaactatgttgtgcttctggactccacactccccagatcccagtatgactacatcttgcctcaagtttctttcaccgcagtgggctaccataaacacatcaccttgatttttaatcccacgaggaagctgcctgaacaggacatcgcacaaggatcctacattgccctgccattgacgctgctggttctgctggccggttacaaccatgacaagctcattcctttgctgctgcagttgacaagccggctacagggagtcggcgcgctcggccaggcagcctctgacaatagcggcccagaagatgcaaagagacaagccaagaaacagaagacaaggcggacgtgaggaggaaggggacagttgcagtctcacttgggacaggccacagccaggggtccggccactacccgcccgtgggataaaagccaaaagcatgcgtcagctaacttcagcctgtgctgctgggcccgcaccccatgtcccttgtcactgtggcatcctgcacccatcctcacccctccgtagagcccctcgtgcaatgcaatgaatggaccctcctgtcactctgctgaacagaatttattttctgagtcaaatataatttattattatttttgtcaaagaagtatttaagctgtgctgtggtgtgagaatgtcattcttgatcttcagccttcgtttgcaagaagagttccagttgatgtggtgtttggttccatggcggggtaccctagggattcatctgttttcttcacttccctttgcatctgagatcctgctggaaaccacggcaacctgtatccactattaggaggtaaaaatcaataaaatggcccattcatttgtgttgtagctca

SEQ ID NO: 314929 - DNA, 1679 bp, Homo sapiens
ctagagggtgacgtttcctctcctggctccttaccacctgccgtgaagatgatctactctggcctttctctgtggctccaggggtgttgaaatagtcacttcctacagcgatgcggaaacatcttgggctttggggtcacacttcccctgagttcagagccttcatagatgtgtggcagccttcttagctgagtgaccttgggcaagttactcttagtctcttcgtgcttgactttcctcgtctataagacggggtgatgatcccgaccttgccagtggtagaaagcaaagcagccgcgggcctcatgcaatgtgcatggtgcctggcagctggtcggtgctcagcacacagagctgtggctgcccctggtgccgttccagggatgctgtatttttaggatttgccagcttacgagcctctcaagcatcgtcccttagaagtcagccccgttgtggatcctcagttgtatcacgtacctccctcatcagaattggctcataataattttttgtgtttcataaagtcagatcctcagaggaccgtaattgtcaaggttgggtactcataaaaaggctgcaggctctgacagccttatcagaagccacagtctcagagacactggggacacatgcccgccactgatggaatagcccgctgaggttgatactttgaaggcagcaaccttggtttggatgtgtagtcttggggatttctttaaaaacataaagttctttacatcacagccatacgttaggttttagttttcatttgctttgccagagctgtccttataaaaataacttcttcccatgtgtgcacagaactatgttgtgcttctggactccacactccccagatcccagtatgactacatcttgcctcaagtttctttcaccgcagtgggctaccataaacacatcaccttgatttttaatcccacgaggaagctgcctgaacaggacatcgcacaaggatcctacattgccctgccattgacgctgctggttctgctggccggttacaaccatgacaagctcattcctttgctgctgcagttgacaagccggctacagggagtcggcgcgctcggccaggcagcctctgacaatagcggcccagaagatgcaaagagacaagccaagaaacagaagacaaggcggacgtgaggaggaaggggacagttgcagtctcacttgggacaggccacagccaggggtccggccactacccgcccgtgggataaaagccaaaagcatgcgtcagctaacttcagcctgtgctgctgggcccgcaccccatgtcccttgtcactgtggcatcctgcacccatcctcacccctccgtagagcccctcgtgcaatgcaatgaatggaccctcctgtcactctgctgaacagaatttattttctgagtcaaatataatttattattatttttgtcaaagaagtatttaagctgtgctgtggtgtgagaatgtcattcttgatcttcagccttcgtttgcaagaagagttccagttgatgtggtgtttggttccatggcggggtaccctagggattcatctgttttcttcacttccctttgcatctgagatcctgctggaaaccacggcaacctgtatccactattaggaggtaaaaatcaataaaatggcccattcatttgtgttgtagctca

SEQ ID NO: 314930 - DNA, 3205 bp, Homo sapiens
  misc_feature (3157)..(3157): n is a, c, g, or t
  misc_feature (3159)..(3159): n is a, c, g, or t
  misc_feature (3184)..(3184): n is a, c, g, or t
agccgacgaccgtggagctccatgtggatggagtcagtgacatctgcacaaagggtggggacatcaactttgtcttcactgggttctctgtgaatggcaaggtcctcagcaaagggcagcccctgggtcctgcgggagttcaggtgtctctgagaaacactgggaccgaagcaaagatccagtccacagttacacagcctggcggaaagtttgcattttttaaagttctgcctggagattatgaaatcctcgcaactcatccaacctgggcgttgaaagaggcaagcaccacagtgcgtgtaaccaactccaatgccaatgcggccagtcccctcatagttgctggctacaatgtgtctggctctgtccgaagtgatggggagcccatgaaaggcgtgaagtttcttctcttttcttctttagtaactaaagaggatgtcctgggctgcaatgtctcaccagtgcctgggttccagccccaagacgagagtctggtgtatttgtgctacacggtctccagagaagatggctcgttctctttctattccttgccaagtgggggctacactgtgattccgttctatcgaggggagaggattacctttgatgtggcgccttccagacttgacttcacagtggagcatgacagcttgaaaatcgagcccgtgttccacgtcatgggattctccgtcaccgggagggtcttgaacggacccgaaggagatggtgttccagaagcagtagtcaccctgaataaccaaatcaaagttaaaacaaaagctgatggctcattccgccttgagaacataaccacagggacatacaccatccatgctcagaaagagcacctctactttgaaacggtcaccatcaaaattgcaccaaacacacctcagctggctgacattgttgcaacagggttcagtgtctgtggtcagatatcaatcattcgcttccccgacaccgtcaagcagatgaataaatacaaagttgtcctgtcatctcaagacaaggacaagtctttggtcaccgtggagacagatgctcatggatcattttgttttaaagcaaacccagggacttacaaagtgcaggtgatggttcctgaggcagaaaccagagcagggctgacgttgaaaccccagacatttcctcttactgtgaccgacaggcctgtgatggatgtggcctttgtacagttcttggcatcagtttctgggaaagtctcttgtttggacacctgtggtgacttgctggtgactctacagtccctgagccgccagggtgagaagcggagcctccagctctccggcaaggtcaacgccatgactttcacctttgacaacgtgctccctggaaaatacaaaataagcatcatgcatgaggattggtgctggaagaacaagagcctggaggtggaagtgctggaggatgacgtgtctgcagttgagttcaggcagacgggctacatgctgagatgttccctgtctcacgccatcactctggaattttatcaggatggaaatgggcgtgagaatgtggggatttataacctctccaaaggagtcaaccgattctgcctgtccaagcctggtgtgtacaaagtgacccctcgctcctgccaccggtttgagcaagcgttctacacctatgacacgtcttcacctagtatcttgacattgacagccattcgccaccatgtccttggaactatcaccaccgacaaaatgatggatgtcactgtgactatcaagtcttccatcgacagtgaacccgccttggtcttaggccctctgaagtctgtgcaggagctgcggagggagcagcagctggctgagatcgaggcccgcaggcaggagagggagaaaaacggcaatgaggaaggtgaagaaagaatgaccaagcctcccgtgcaggagatggtagatgagttacaaggccccttctcgtatgatttctcttactgggcgcggtctggagagaaaatcactgttacaccgtcatctaaagagctgctcttttatcccccttcaatggaagccgttgtcagtggagaaagctgcccagggaagctgatcgagatccacgggaaggcaggcctgtttttagaaggccagatccaccccgagttggaaggagtcgagattgtcatcagtgaaaagggggcaagttcaccgctgatcacagtctttactgatgacaaaggtgcctacagtgttggccccctgcacagtgacctggagtacacggtgacctcacagaaggagggctatgttctgactgcagtggaaggaaccatcggagacttcaaggcctatgccctggcaggcgtaagctttgagataaaagctgaggatgaccagcccctcccgggagtcctcttatccctgagtggtggcctgtttcgttccaacctcttgacccaggacaacggcattctgacattctcaaacctgagccctggccagtattacttcaaacccatgatgaaggagttccggtttgagccatcctcacagatgatcgaggtgcaggaaggccagaacctgaagatcaccatcacggggtaccgaaccgcttacagttgctatggcacagtgtcttccttaaacggagagcccgaacaaggggttgccatggaagcggtgggccagaacgactgcagcatttacggagaagacaccgtgacagacgaagagggcaagttcagattacgtggattgctgccgggatgtgtgtaccacgttcagctcaaggcagaaggcaacgaccacattgagcgggcgctcccccaccatagggtgattgaggttgggaataatgacatcgatgatgtaaacatcatagttttccggcagattaatcaatttgatttaagtggaaatgtgatcacttcctctgaataccttcctacgttatgggtcaagctttacaaaagcgaaaacctcgacaatccaatccagacagtttcccttggccagtccctgttcttccatttccccccactgctcagagatggcgagaactatgttgtgcttctggactccacactccccagatcccagtatgactacatcttgcctcaagtttctttcaccgcagtgggctaccataaacacatcaccttgatttttaatcccacgagggaacttgcttnanaggaaattggacaagggacttaaantggtttcggattaacccggcc

SEQ ID NO: 314931 - DNA, 1096 bp, Homo sapiens
catttcctgtgttttcacccagcctcaacacttcctcgttacccctctttatcccttggcttacaacgtcctatgccccaggaattaccccctttttttaaaatataaaaagaatagtagatactttaagcaatatttgggaaatggtggttttaattcacgtcatttatttacttgtaataatggatattgataagtgaataaatagcgtagtaaatagagttaagaggtaatgtgctatgatgtggggatgatgaggctattgttttttgtgatcccagtatgactacatcttgcctcaagtttctttcaccgcagtgggctaccataaacacatcaccttgatttttaatcccacgaggaagctgcctgaacaggacatcgcacaaggatcctacattgccctgccattgacgctgctggttctgctggccggttacaaccatgacaagctcattcctttgctgctgcagttgacaagccggctacagggagtcggcgcgctcggccaggcagcctctgacaatagcggcccagaagatgcaaagagacaagccaagaaacagaagacaaggcggacgtgaggaggaaggggacagttgcagtctcacttgggacaggccacagccaggggtccggccactacccgcccgtgggataaaagccaaaagcatgcgtcagctaacttcagcctgtgctgctgggcccgcaccccatgtcccttgtcactgtggcatcctgcacccatcctcacccctccgtagagcccctcgtgcaatgcaatgaatggaccctcctgtcactctgctgaacagaatttattttctgagtcaaatataatttattattatttttgtcaaagaagtatttaagctgtgctgtggtgtgagaatgtcattcttgatcttcagccttcgtttgcaagaagagttccagttgatgtggtgtttggttccatggcggggtaccctagggattcatctgttttcttcacttccctttgcatctgagatcctgctggaaaccacggcaacctgtatccactattaggaggtaaaaatcaataaaatggcccattcatttgtgttgtagctca

SEQ ID NO: 314932 - DNA, 3153 bp, Homo sapiens
agccgacgaccgtggagctccatgtggatggagtcagtgacatctgcacaaagggtggggacatcaactttgtcttcactgggttctctgtgaatggcaaggtcctcagcaaagggcagcccctgggtcctgcgggagttcaggtgtctctgagaaacactgggaccgaagcaaagatccagtccacagttacacagcctggcggaaagtttgcattttttaaagttctgcctggagattatgaaatcctcgcaactcatccaacctgggcgttgaaagaggcaagcaccacagtgcgtgtaaccaactccaatgccaatgcggccagtcccctcatagttgctggctacaatgtgtctggctctgtccgaagtgatggggagcccatgaaaggcgtgaagtttcttctcttttcttctttagtaactaaagaggatgtcctgggctgcaatgtctcaccagtgcctgggttccagccccaagacgagagtctggtgtatttgtgctacacggtctccagagaagatggctcgttctctttctattccttgccaagtgggggctacactgtgattccgttctatcgaggggagaggattacctttgatgtggcgccttccagacttgacttcacagtggagcatgacagcttgaaaatcgagcccgtgttccacgtcatgggattctccgtcaccgggagggtcttgaacggacccgaaggagatggtgttccagaagcagtagtcaccctgaataaccaaatcaaagttaaaacaaaagctgatggctcattccgccttgagaacataaccacagggacatacaccatccatgctcagaaagagcacctctactttgaaacggtcaccatcaaaattgcaccaaacacacctcagctggctgacattgttgcaacagggttcagtgtctgtggtcagatatcaatcattcgcttccccgacaccgtcaagcagatgaataaatacaaagttgtcctgtcatctcaagacaaggacaagtctttggtcaccgtggagacagatgctcatggatcattttgttttaaagcaaacccagggacttacaaagtgcaggtgatggttcctgaggcagaaaccagagcagggctgacgttgaaaccccagacatttcctcttactgtgaccgacaggcctgtgatggatgtggcctttgtacagttcttggcatcagtttctgggaaagtctcttgtttggacacctgtggtgacttgctggtgactctacagtccctgagccgccagggtgagaagcggagcctccagctctccggcaaggtcaacgccatgactttcacctttgacaacgtgctccctggaaaatacaaaataagcatcatgcatgaggattggtgctggaagaacaagagcctggaggtggaagtgctggaggatgacgtgtctgcagttgagttcaggcagacgggctacatgctgagatgttccctgtctcacgccatcactctggaattttatcaggatggaaatgggcgtgagaatgtggggatttataacctctccaaaggagtcaaccgattctgcctgtccaagcctggtgtgtacaaagtgacccctcgctcctgccaccggtttgagcaagcgttctacacctatgacacgtcttcacctagtatcttgacattgacagccattcgccaccatgtccttggaactatcaccaccgacaaaatgatggatgtcactgtgactatcaagtcttccatcgacagtgaacccgccttggtcttaggccctctgaagtctgtgcaggagctgcggagggagcagcagctggctgagatcgaggcccgcaggcaggagagggagaaaaacggcaatgaggaaggtgaagaaagaatgaccaagcctcccgtgcaggagatggtagatgagttacaaggccccttctcgtatgatttctcttactgggcgcggtctggagagaaaatcactgttacaccgtcatctaaagagctgctcttttatcccccttcaatggaagccgttgtcagtggagaaagctgcccagggaagctgatcgagatccacgggaaggcaggcctgtttttagaaggccagatccaccccgagttggaaggagtcgagattgtcatcagtgaaaagggggcaagttcaccgctgatcacagtctttactgatgacaaaggtgcctacagtgttggccccctgcacagtgacctggagtacacggtgacctcacagaaggagggctatgttctgactgcagtggaaggaaccatcggagacttcaaggcctatgccctggcaggcgtaagctttgagataaaagctgaggatgaccagcccctcccgggagtcctcttatccctgagtggtggcctgtttcgttccaacctcttgacccaggacaacggcattctgacattctcaaacctgagccctggccagtattacttcaaacccatgatgaaggagttccggtttgagccatcctcacagatgatcgaggtgcaggaaggccagaacctgaagatcaccatcacggggtaccgaaccgcttacagttgctatggcacagtgtcttccttaaacggagagcccgaacaaggggttgccatggaagcggtgggccagaacgactgcagcatttacggagaagacaccgtgacagacgaagagggcaagttcagattacgtggattgctgccgggatgtgtgtaccacgttcagctcaaggcagaaggcaacgaccacattgagcgggcgctcccccaccatagggtgattgaggttgggaataatgacatcgatgatgtaaacatcatagttttccggcagattaatcaatttgatttaagtggaaatgtgatcacttcctctgaataccttcctacgttatgggtcaagctttacaaaagcgaaaacctcgacaatccaatccagacagtttcccttggccagtccctgttcttccatttccccccactgctcagagatggcgagaactatgtttcgcttctggacttcacacttcccatatcgcattatgattacatactggtcaagtcttgttcactgataacggattcacttccatcactctttacaaactgtcgtactgggattgctggat

SEQ ID NO: 314933 - DNA, 3333 bp, Homo sapiens
agccgacgaccgtggagctccatgtggatggagtcagtgacatctgcacaaagggtggggacatcaactttgtcttcactgggttctctgtgaatggcaaggtcctcagcaaagggcagcccctgggtcctgcgggagttcaggtgtctctgagaaacactgggaccgaagcaaagatccagtccacagttacacagcctggcggaaagtttgcattttttaaagttctgcctggagattatgaaatcctcgcaactcatccaacctgggcgttgaaagaggcaagcaccacagtgcgtgtaaccaactccaatgccaatgcggccagtcccctcatagttgctggctacaatgtgtctggctctgtccgaagtgatggggagcccatgaaaggcgtgaagtttcttctcttttcttctttagtaactaaagaggatgtcctgggctgcaatgtctcaccagtgcctgggttccagccccaagacgagagtctggtgtatttgtgctacacggtctccagagaagatggctcgttctctttctattccttgccaagtgggggctacactgtgattccgttctatcgaggggagaggattacctttgatgtggcgccttccagacttgacttcacagtggagcatgacagcttgaaaatcgagcccgtgttccacgtcatgggattctccgtcaccgggagggtcttgaacggacccgaaggagatggtgttccagaagcagtagtcaccctgaataaccaaatcaaagttaaaacaaaagctgatggctcattccgccttgagaacataaccacagggacatacaccatccatgctcagaaagagcacctctactttgaaacggtcaccatcaaaattgcaccaaacacacctcagctggctgacattgttgcaacagggttcagtgtctgtggtcagatatcaatcattcgcttccccgacaccgtcaagcagatgaataaatacaaagttgtcctgtcatctcaagacaaggacaagtctttggtcaccgtggagacagatgctcatggatcattttgttttaaagcaaacccagggacttacaaagtgcaggtgatggttcctgaggcagaaaccagagcagggctgacgttgaaaccccagacatttcctcttactgtgaccgacaggcctgtgatggatgtggcctttgtacagttcttggcatcagtttctgggaaagtctcttgtttggacacctgtggtgacttgctggtgactctacagtccctgagccgccagggtgagaagcggagcctccagctctccggcaaggtcaacgccatgactttcacctttgacaacgtgctccctggaaaatacaaaataagcatcatgcatgaggattggtgctggaagaacaagagcctggaggtggaagtgctggaggatgacgtgtctgcagttgagttcaggcagacgggctacatgctgagatgttccctgtctcacgccatcactctggaattttatcaggatggaaatgggcgtgagaatgtggggatttataacctctccaaaggagtcaaccgattctgcctgtccaagcctggtgtgtacaaagtgacccctcgctcctgccaccggtttgagcaagcgttctacacctatgacacgtcttcacctagtatcttgacattgacagccattcgccaccatgtccttggaactatcaccaccgacaaaatgatggatgtcactgtgactatcaagtcttccatcgacagtgaacccgccttggtcttaggccctctgaagtctgtgcaggagctgcggagggagcagcagctggctgagatcgaggcccgcaggcaggagagggagaaaaacggcaatgaggaaggtgaagaaagaatgaccaagcctcccgtgcaggagatggtagatgagttacaaggccccttctcgtatgatttctcttactgggcgcggtctggagagaaaatcactgttacaccgtcatctaaagagctgctcttttatcccccttcaatggaagccgttgtcagtggagaaagctgcccagggaagctgatcgagatccacgggaaggcaggcctgtttttagaaggccagatccaccccgagttggaaggagtcgagattgtcatcagtgaaaagggggcaagttcaccgctgatcacagtctttactgatgacaaaggtgcctacagtgttggccccctgcacagtgacctggagtacacggtgacctcacagaaggagggctatgttctgactgcagtggaaggaaccatcggagacttcaaggcctatgccctggcaggcgtaagctttgagataaaagctgaggatgaccagcccctcccgggagtcctcttatccctgagtggtggcctgtttcgttccaacctcttgacccaggacaacggcattctgacattctcaaacctgagccctggccagtattacttcaaacccatgatgaaggagttccggtttgagccatcctcacagatgatcgaggtgcaggaaggccagaacctgaagatcaccatcacggggtaccgaaccgcttacagttgctatggcacagtgtcttccttaaacggagagcccgaacaaggggttgccatggaagcggtgggccagaacgactgcagcatttacggagaagacaccgtgacagacgaagagggcaagttcagattacgtggattgctgccgggatgtgtgtaccacgttcagctcaaggcagaaggcaacgaccacattgagcgggcgctcccccaccatagggtgattgaggttgggaataatgacatcgatgatgtaaacatcatagttttccggcagattaatcaatttgatttaagtggaaatgtgatcacttcctctgaataccttcctacgttatgggtcaagctttacaaaagcgaaaacctcgacaatccaatccagacagtttcccttggccagtccctgttcttccatttccccccactgctcagagatggcgagaactatgttgtgcttctggactccacactccccagaatccagtatgactacatcttgcctcaagattctttcaccgcagtggggtaccataagacgttcacttgatttttaatcccccgaggaactgcctgacagggaatgccaaggtccaattgccgcaatgaggcgcggatgggcgggtgacccgcaagcaactagggggggtcggaaggagaagaccggccagcctttaataggcgagagaaggccaacagggcacaaacggtgggcgcaccaaatgggcagccaccaacctgtggccgcgcctcgg

SEQ ID NO: 314934 - DNA, 1148 bp, Homo sapiens
  misc_feature (238)..(238): n is a, c, g, or t
agcggaggtcctctctgggaaccttcagaaacctgatttctggtcctccccaaccagctccctgtccctgcttctgggcgctccttccttcctgagctcccagggttcctcaaggtcacttttggcgacaaaacataaaaaacaaatgatggcaggatggcaggaagaatctctttgtccctgagtttcagaagcaaatagtgaagctttgggcagaagaggattcatgggaaaatanatccaaatcactttggttccttcctttggatagaaggaatttggatcatgagggcccctgggtgtcctcaagtggccactttggaaggctgggtgggtggtggctgtggcattgtggatgatggacaagcttgtggccttggtgaggagtgatggggctctcggtgtttgcagaggaagctgcctgaacaggacatcgcacaaggatcctacattgccctgccattgacgctgctggttctgctggccggttacaaccatgacaagctcattcctttgctgctgcagttgacaagccggctacagggagtcggcgcgctcggccaggcagcctctgacaatagcggcccagaagatgcaaagagacaagccaagaaacagaagacaaggcggacgtgaggaggaaggggacagttgcagtctcacttgggacaggccacagccaggggtccggccactacccgcccgtgggataaaagccaaaagcatgcgtcagctaacttcagcctgtgctgctgggcccgcaccccatgtcccttgtcactgtggcatcctgcacccatcctcacccctccgtagagcccctcgtgcaatgcaatgaatggaccctcctgtcactctgctgaacagaatttattttctgagtcaaatataatttattattatttttgtcaaagaagtatttaagctgtgctgtggtgtgagaatgtcattcttgatcttcagccttcgtttgcaagaagagttccagttgatgtggtgtttggttccatggcggggtaccctagggattcatctgttttcttcacttccctttgcatctgagatcctgctggaaaccacggcaacctgtatccactattaggaggtaaaaatcaataaaatggcccattcatttgtgttgtagctca

SEQ ID NO: 314935 - DNA, 1857 bp, Homo sapiens
  misc_feature (29)..(29): n is a, c, g, or t
  misc_feature (115)..(115): n is a, c, g, or t
  misc_feature (146)..(146): n is a, c, g, or t
  misc_feature (419)..(419): n is a, c, g, or t
  misc_feature (502)..(502): n is a, c, g, or t
  misc_feature (947)..(947): n is a, c, g, or t
aaatgggttgggttctaagagatgtccanagatacaggagtaggcagttgttgatggaaatctgttcctgcccttattctttcatttatgaaagggcatcccaggtacagcggcncccacagtcactctctagcccagcagttctnggatgggttggttgcaggacccctttatactgttaaaaattattgaggattttaaagagtttgagtttgcatggattatctctgtgtatatttatcatattagtaattaaaaccgagatgttgaaaacgcaagaactcacaagctacacattccgttagctgtgggcgtgatgacatcagggtgcgtagtctctggaaaagtccactgtgtgcttgcgaatgaaagagggcggaaaaggcacatcacatcttactattggcaaatgctgtctncccagcaaaagggagggcacaccacttccctagggtccagccagggtgtggcacttaccgcttctgttcctgtaccattggcnaaaatttagttccagggctgcgcctgctgcagggaaggctggaaaaggtgatctatattgtcggtggcccagataaaagttgggggttctattgggagaaagggagaatggccacagggatgctagtagcagtgcctgctttgcttcctcactagaccgtactggctgggaatagctgcccatcactgtgtgccctgggtctagaactgtaggttcttgatacatccttgtaggactaagtccctgcatgttgctgggactcaacaaactgagacccagttgcttttcaaccaccaagactctctgatagctgcatctcttcatttcctcagttgggaggagggtccagaggctgaggaatgccttgtcattggaatctctttgtccctgagtttcagaagcaaatagtgaagctttgggcagaagaggattcatgggaaaatanatccaaatcactttggttccttcctttggatagaaggaatttggatcatgagggcccctgggtgtcctcaagtggccactttggaaggctgggtgggtggtggctgtggcattgtggatgatggacaagcttgtggccttggtgaggagtgatggggctctcggtgtttgcagaggaagctgcctgaacaggacatcgcacaaggatcctacattgccctgccattgacgctgctggttctgctggccggttacaaccatgacaagctcattcctttgctgctgcagttgacaagccggctacagggagtcggcgcgctcggccaggcagcctctgacaatagcggcccagaagatgcaaagagacaagccaagaaacagaagacaaggcggacgtgaggaggaaggggacagttgcagtctcacttgggacaggccacagccaggggtccggccactacccgcccgtgggataaaagccaaaagcatgcgtcagctaacttcagcctgtgctgctgggcccgcaccccatgtcccttgtcactgtggcatcctgcacccatcctcacccctccgtagagcccctcgtgcaatgcaatgaatggaccctcctgtcactctgctgaacagaatttattttctgagtcaaatataatttattattatttttgtcaaagaagtatttaagctgtgctgtggtgtgagaatgtcattcttgatcttcagccttcgtttgcaagaagagttccagttgatgtggtgtttggttccatggcggggtaccctagggattcatctgttttcttcacttccctttgcatctgagatcctgctggaaaccacggcaacctgtatccactattaggaggtaaaaatcaataaaatggcccattcatttgtgttgtagctca

SEQ ID NO: 314936 - DNA, 3347 bp, Homo sapiens
agccgacgaccgtggagctccatgtggatggagtcagtgacatctgcacaaagggtggggacatcaactttgtcttcactgggttctctgtgaatggcaaggtcctcagcaaagggcagcccctgggtcctgcgggagttcaggtgtctctgagaaacactgggaccgaagcaaagatccagtccacagttacacagcctggcggaaagtttgcattttttaaagttctgcctggagattatgaaatcctcgcaactcatccaacctgggcgttgaaagaggcaagcaccacagtgcgtgtaaccaactccaatgccaatgcggccagtcccctcatagttgctggctacaatgtgtctggctctgtccgaagtgatggggagcccatgaaaggcgtgaagtttcttctcttttcttctttagtaactaaagaggatgtcctgggctgcaatgtctcaccagtgcctgggttccagccccaagacgagagtctggtgtatttgtgctacacggtctccagagaagatggctcgttctctttctattccttgccaagtgggggctacactgtgattccgttctatcgaggggagaggattacctttgatgtggcgccttccagacttgacttcacagtggagcatgacagcttgaaaatcgagcccgtgttccacgtcatgggattctccgtcaccgggagggtcttgaacggacccgaaggagatggtgttccagaagcagtagtcaccctgaataaccaaatcaaagttaaaacaaaagctgatggctcattccgccttgagaacataaccacagggacatacaccatccatgctcagaaagagcacctctactttgaaacggtcaccatcaaaattgcaccaaacacacctcagctggctgacattgttgcaacagggttcagtgtctgtggtcagatatcaatcattcgcttccccgacaccgtcaagcagatgaataaatacaaagttgtcctgtcatctcaagacaaggacaagtctttggtcaccgtggagacagatgctcatggatcattttgttttaaagcaaacccagggacttacaaagtgcaggtgatggttcctgaggcagaaaccagagcagggctgacgttgaaaccccagacatttcctcttactgtgaccgacaggcctgtgatggatgtggcctttgtacagttcttggcatcagtttctgggaaagtctcttgtttggacacctgtggtgacttgctggtgactctacagtccctgagccgccagggtgagaagcggagcctccagctctccggcaaggtcaacgccatgactttcacctttgacaacgtgctccctggaaaatacaaaataagcatcatgcatgaggattggtgctggaagaacaagagcctggaggtggaagtgctggaggatgacgtgtctgcagttgagttcaggcagacgggctacatgctgagatgttccctgtctcacgccatcactctggaattttatcaggatggaaatgggcgtgagaatgtggggatttataacctctccaaaggagtcaaccgattctgcctgtccaagcctggtgtgtacaaagtgacccctcgctcctgccaccggtttgagcaagcgttctacacctatgacacgtcttcacctagtatcttgacattgacagccattcgccaccatgtccttggaactatcaccaccgacaaaatgatggatgtcactgtgactatcaagtcttccatcgacagtgaacccgccttggtcttaggccctctgaagtctgtgcaggagctgcggagggagcagcagctggctgagatcgaggcccgcaggcaggagagggagaaaaacggcaatgaggaaggtgaagaaagaatgaccaagcctcccgtgcaggagatggtagatgagttacaaggccccttctcgtatgatttctcttactgggcgcggtctggagagaaaatcactgttacaccgtcatctaaagagctgctcttttatcccccttcaatggaagccgttgtcagtggagaaagctgcccagggaagctgatcgagatccacgggaaggcaggcctgtttttagaaggccagatccaccccgagttggaaggagtcgagattgtcatcagtgaaaagggggcaagttcaccgctgatcacagtctttactgatgacaaaggtgcctacagtgttggccccctgcacagtgacctggagtacacggtgacctcacagaaggagggctatgttctgactgcagtggaaggaaccatcggagacttcaaggcctatgccctggcaggcgtaagctttgagataaaagctgaggatgaccagcccctcccgggagtcctcttatccctgagtggtggcctgtttcgttccaacctcttgacccaggacaacggcattctgacattctcaaacctgagccctggccagtattacttcaaacccatgatgaaggagttccggtttgagccatcctcacagatgatcgaggtgcaggaaggccagaacctgaagatcaccatcacggggtaccgaaccgcttacagttgctatggcacagtgtcttccttaaacggagagcccgaacaaggggttgccatggaagcggtgggccagaacgactgcagcatttacggagaagacaccgtgacagacgaagagggcaagttcagattacgtggattgctgccgggatgtgtgtaccacgttcagctcaaggcagaaggcaacgaccacattgagcgggcgctcccccaccatagggtgattgaggttgggaataatgacatcgatgatgtaaacatcatagttttccggcagattaatcaatttgatttaagtggaaatgtgatcacttcctctgaataccttcctacgttatgggtcaagctttacaaaagcgaaaacctcgacaagccaagaaacagaagacaaggcggacgtgaggaggaaggggacagttgcagtctcacttgggacaggccacagccaggggtccgaactatgttgtgcttctggactccacactccccagaatccagtatgactacatcttgcctcaagattctttcaccgcagtggggtaccataagacgttcacttgatttttaatcccccgaggaactgcctgacagggaatgccaaggtccaattgccgcaatgaggcgcggatgggcgggtgacccgcaagcaactagggggggtcggaaggagaagaccggccagcctttaataggcgagagaaggccaacagggcacaaacggtgggcgcaccaaatgggcagccaccaacctgtggccgcgcctcgg

SEQ ID NO: 314937 - DNA, 3368 bp, Homo sapiens
agccgacgaccgtggagctccatgtggatggagtcagtgacatctgcacaaagggtggggacatcaactttgtcttcactgggttctctgtgaatggcaaggtcctcagcaaagggcagcccctgggtcctgcgggagttcaggtgtctctgagaaacactgggaccgaagcaaagatccagtccacagttacacagcctggcggaaagtttgcattttttaaagttctgcctggagattatgaaatcctcgcaactcatccaacctgggcgttgaaagaggcaagcaccacagtgcgtgtaaccaactccaatgccaatgcggccagtcccctcatagttgctggctacaatgtgtctggctctgtccgaagtgatggggagcccatgaaaggcgtgaagtttcttctcttttcttctttagtaactaaagaggatgtcctgggctgcaatgtctcaccagtgcctgggttccagccccaagacgagagtctggtgtatttgtgctacacggtctccagagaagatggctcgttctctttctattccttgccaagtgggggctacactgtgattccgttctatcgaggggagaggattacctttgatgtggcgccttccagacttgacttcacagtggagcatgacagcttgaaaatcgagcccgtgttccacgtcatgggattctccgtcaccgggagggtcttgaacggacccgaaggagatggtgttccagaagcagtagtcaccctgaataaccaaatcaaagttaaaacaaaagctgatggctcattccgccttgagaacataaccacagggacatacaccatccatgctcagaaagagcacctctactttgaaacggtcaccatcaaaattgcaccaaacacacctcagctggctgacattgttgcaacagggttcagtgtctgtggtcagatatcaatcattcgcttccccgacaccgtcaagcagatgaataaatacaaagttgtcctgtcatctcaagacaaggacaagtctttggtcaccgtggagacagatgctcatggatcattttgttttaaagcaaacccagggacttacaaagtgcaggtgatggttcctgaggcagaaaccagagcagggctgacgttgaaaccccagacatttcctcttactgtgaccgacaggcctgtgatggatgtggcctttgtacagttcttggcatcagtttctgggaaagtctcttgtttggacacctgtggtgacttgctggtgactctacagtccctgagccgccagggtgagaagcggagcctccagctctccggcaaggtcaacgccatgactttcacctttgacaacgtgctccctggaaaatacaaaataagcatcatgcatgaggattggtgctggaagaacaagagcctggaggtggaagtgctggaggatgacgtgtctgcagttgagttcaggcagacgggctacatgctgagatgttccctgtctcacgccatcactctggaattttatcaggatggaaatgggcgtgagaatgtggggatttataacctctccaaaggagtcaaccgattctgcctgtccaagcctggtgtgtacaaagtgacccctcgctcctgccaccggtttgagcaagcgttctacacctatgacacgtcttcacctagtatcttgacattgacagccattcgccaccatgtccttggaactatcaccaccgacaaaatgatggatgtcactgtgactatcaagtcttccatcgacagtgaacccgccttggtcttaggccctctgaagtctgtgcaggagctgcggagggagcagcagctggctgagatcgaggcccgcaggcaggagagggagaaaaacggcaatgaggaaggtgaagaaagaatgaccaagcctcccgtgcaggagatggtagatgagttacaaggccccttctcgtatgatttctcttactgggcgcggtctggagagaaaatcactgttacaccgtcatctaaagagctgctcttttatcccccttcaatggaagccgttgtcagtggagaaagctgcccagggaagctgatcgagatccacgggaaggcaggcctgtttttagaaggccagatccaccccgagttggaaggagtcgagattgtcatcagtgaaaagggggcaagttcaccgctgatcacagtctttactgatgacaaaggtgcctacagtgttggccccctgcacagtgacctggagtacacggtgacctcacagaaggagggctatgttctgactgcagtggaaggaaccatcggagacttcaaggcctatgccctggcaggcgtaagctttgagataaaagctgaggatgaccagcccctcccgggagtcctcttatccctgagtggtggcctgtttcgttccaacctcttgacccaggacaacggcattctgacattctcaaacctggtaacgtgttctgcaatttaccacctgcctgtcttccctgagagagagccaggatgcagcatgcgaggacttatgtgttgcttgacaacgtgagaagagaaggccaatgtggagtggtttcagtttcttgggggcccacggtcattagagtattgctcttactcgaacttaatgctgctgattcatgttcccttccacacgcgcttcttgttttctgatcacccgcttgtcactaagacagtgtaattaatttccctggccacaacggctgctctcttaggcgtcttctcgttttgccacggaatcatgcttatgatgctgagtcttgtttggtggttagcttgcgtttcttctgaaaagacattccacttggtgggaagagagcagcagtttttctttcaagatgcagtcggaggccctgactggtggggattcaggaagtgtgtgttagttggtcatcttgtcagtcatggtgacaaagtggctgtggtggggctactggagaccgggcagcgggggcatctgaagacaccactttgcagtgatgcagactgctccttacttgctgtgtcctatcaggcaagttactttgcctctctgagcctcagtttctttattcattaaattcaaatatgagccaggtatggtggcccacgcctgtaatcccaccgctttgggagggtgaggcagtaggatcgcttgagcttgggagtttgagaccagcaacataggaagaccccatctctacaaaaaataaaaaaattagctgggcatggtggtgcatgcctgtggtcccaggtactcaggaggccgaggtgggagatttgcttgagcccagaaggttgagactacggtgtgctgtgatcgtgcactccatcctgggggacagagtcaggccctgtctcagaaaaa

SEQ ID NO: 314938 - DNA, 2469 bp, Homo sapiens
agccgacgaccgtggagctccatgtggatggagtcagtgacatctgcacaaagggtggggacatcaactttgtcttcactgggttctctgtgaatggcaaggtcctcagcaaagggcagcccctgggtcctgcgggagttcaggtgtctctgagaaacactgggaccgaagcaaagatccagtccacagttacacagcctggcggaaagtttgcattttttaaagttctgcctggagattatgaaatcctcgcaactcatccaacctgggcgttgaaagaggcaagcaccacagtgcgtgtaaccaactccaatgccaatgcggccagtcccctcatagttgctggctacaatgtgtctggctctgtccgaagtgatggggagcccatgaaaggcgtgaagtttcttctcttttcttctttagtaactaaagaggatgtcctgggctgcaatgtctcaccagtgcctgggttccagccccaagacgagagtctggtgtatttgtgctacacggtctccagagaagatggctcgttctctttctattccttgccaagtgggggctacactgtgattccgttctatcgaggggagaggattacctttgatgtggcgccttccagacttgacttcacagtggagcatgacagcttgaaaatcgagcccgtgttccacgtcatgggattctccgtcaccgggagggtcttgaacggacccgaaggagatggtgttccagaagcagtagtcaccctgaataaccaaatcaaagttaaaacaaaagctgatggctcattccgccttgagaacataaccacagggacatacaccatccatgctcagaaagagcacctctactttgaaacggtcaccatcaaaattgcaccaaacacacctcagctggctgacattgttgcaacagggttcagtgtctgtggtcagatatcaatcattcgcttccccgacaccgtcaagcagatgaataaatacaaagttgtcctgtcatctcaagacaaggacaagtctttggtcaccgtggagacagatgctcatggatcattttgttttaaagcaaacccagggacttacaaagtgcaggtgatggttcctgaggcagaaaccagagcagggctgacgttgaaaccccagacatttcctcttactgtgaccgacaggcctgtgatggatgtggcctttgtacagttcttggcatcagtttctgggaaagtctcttgtttggacacctgtggtgacttgctggtgactctacagtccctgagccgccagggtgagaagcggagcctccagctctccggcaaggtcaacgccatgactttcacctttgacaacgtgctccctggaaaatacaaaataagcatcatgcatgaggattggtgctggaagaacaagagcctggaggtggaagtgctggaggatgacgtgtctgcagttgagttcaggcagacgggctacatgctgagatgttccctgtctcacgccatcactctggaattttatcaggatggaaatgggcgtgagaatgtggggatttataacctctccaaaggagtcaaccgattctgcctgtccaagcctggtgtgtacaaagtgacccctcgctcctgccaccggtttgagcaagcgttctacacctatgacacgtcttcacctagtatcttgacattgacagccattcgccaccatgtccttggaactatcaccaccgacaaaatgatggatgtcactgtgactatcaagtcttccatcgacagtgaacccgccttggtcttaggccctctgaagtctgtgcaggagctgcggagggagcagcagctggctgagatcgaggcccgcaggcaggagagggagaaaaacggcaatgaggaaggtgaagaaagaatgaccaagcctcccgtgcaggagatggtagatgagttacaaggccccttctcgtatgatttctcttactgggcgcggtctggagagaaaatcactgttacaccgtcatctaaagagctgctcttttatcccccttcaatggaagccgttgtcagtggagaaagctgcccagggaagctgatcgagatccacgggaaggcaggcctgtttttagaaggccagatccaccccgagttggaaggagtcgagattgtcatcagtgaaaagggggcaagttcaccgctgatcacagtctttactgatgacaaaggtgcctacagtgttggccccctgcacagtgacctggagtacacggtgacctcacagaaggagggctatgttctgactgcagtggaaggaaccatcggagacttcaaggcctatgccctggcaggcgtaagctttgagataaaagctgaacgtggtgaagacaggccgagtgatgcttgggggagaccaatccagcagattcaaagccaggcaccattcgtggggacttctgcattcaggttggcaggaacatcattcatggcat

SEQ ID NO: 314939 - DNA, 1905 bp, Homo sapiens
agccgacgaccgtggagctccatgtggatggagtcagtgacatctgcacaaagggtggggacatcaactttgtcttcactgggttctctgtgaatggcaaggtcctcagcaaagggcagcccctgggtcctgcgggagttcaggtgtctctgagaaacactgggaccgaagcaaagatccagtccacagttacacagcctggcggaaagtttgcattttttaaagttctgcctggagattatgaaatcctcgcaactcatccaacctgggcgttgaaagaggcaagcaccacagtgcgtgtaaccaactccaatgccaatgcggccagtcccctcatagttgctggctacaatgtgtctggctctgtccgaagtgatggggagcccatgaaaggcgtgaagtttcttctcttttcttctttagtaactaaagaggatgtcctgggctgcaatgtctcaccagtgcctgggttccagccccaagacgagagtctggtgtatttgtgctacacggtctccagagaagatggctcgttctctttctattccttgccaagtgggggctacactgtgattccgttctatcgaggggagaggattacctttgatgtggcgccttccagacttgacttcacagtggagcatgacagcttgaaaatcgagcccgtgttccacgtcatgggattctccgtcaccgggagggtcttgaacggacccgaaggagatggtgttccagaagcagtagtcaccctgaataaccaaatcaaagttaaaacaaaagctgatggctcattccgccttgagaacataaccacagggacatacaccatccatgctcagaaagagcacctctactttgaaacggtcaccatcaaaattgcaccaaacacacctcagctggctgacattgttgcaacagggttcagtgtctgtggtcagatatcaatcattcgcttccccgacaccgtcaagcagatgaataaatacaaagttgtcctgtcatctcaagacaaggacaagtctttggtcaccgtggagacagatgctcatggatcattttgttttaaagcaaacccagggacttacaaagtgcaggtgatggttcctgaggcagaaaccagagcagggctgacgttgaaaccccagacatttcctcttactgtgaccgacaggcctgtgatggatgtggcctttgtacagttcttggcatcagtttctgggaaagtctcttgtttggacacctgtggtgacttgctggtgactctacagtccctgagccgccagggtgagaagcggagcctccagctctccggcaaggtcaacgccatgactttcacctttgacaacgtgctccctggaaaatacaaaataagcatcatgcatgaggattggtgctggaagaacaagagcctggaggtggaagtgctggaggatgacgtgtctgcagttgagttcaggcagacgggctacatgctgagatgttccctgtctcacgccatcactctggaattttatcaggatggaaatgggcgtgagaatgtggggatttataacctctccaaaggagtcaaccgattctgcctgtccaagcctggtgtgtacaaagtgacccctcgctcctgccaccggtttgagcaagcgttctacacctatgacacgtttcacctagtatctgtgaattgagagcagttcgccacatgtcccttggagtatacacaggagaaatgatggctgtccatggtgacatatcaaggtttccatggacagggaacccgcttgggcttaagcttcggagttgggcggattggatggaaagagatggtggaatgagacgaaggaggaggagacaggtatatgatgtggaaatgcaccggggtataaggtaagagaagtaaaaaagggaaga

SEQ ID NO: 314940 - DNA, 1259 bp, Homo sapiens
ctagagggtgacgtttcctctcctggctccttaccacctgccgtgaagatgatctactctggcctttctctgtggctccaggggtgttgaaatagtcacttcctacagcgatgcggaaacatcttgggctttggggtcacacttcccctgagttcagagccttcatagatgtgtggcagccttcttagctgagtgaccttgggcaagttactcttagtctcttcgtgcttgactttcctcgtctataagacggggtgatgatcccgaccttgccagtggtagaaagcaaagcagccgcgggcctcatgcaatgtgcatggtgcctggcagctggtcggtgctcagcacacagagctgtggctgcccctggtgccgttccagggatgctgtatttttaggatttgccagcttacgagcctctcaagcatcgtcccttagaagtcagccccgttgtggatcctcagttgtatcacgtacctccctcatcagaattggctcataataattttttgtgtttcataaagtcagatcctcagaggaccgtaattgtcaaggttgggtactcataaaaaggctgcaggctctgacagccttatcagaagccacagtctcagagacactggggacacatgcccgccactgatggaatagcccgctgaggttgatactttgaaggcagcaaccttggtttggatgtgtagtcttggggatttctttaaaaacataaagttctttacatcacagccatacgttaggttttagttttcatttgctttgccagagctgtccttataaaaataacttcttcccatgtgtgcacagaactatgttgtgcttctggactccacactccccagatcccagtatgactacatcttgcctcaagtttctttcaccgcagtgggctaccataaacacatcaccttgatttttaatcccacggtaagtaaaagagggagttaaaaaaaaatccatgggctgggtttggtggctcacgcctgtaatcccagcactttgggaggccaaggctggtggatctcttgagcccgggagtttcagaccagcctaggcaatacggtaaaaccccaactctacaaaaaatacaaaaattaaccgggcgtggtggaacgcacctatagtcccggctactcgggaggctgaggtgggaggatcacttgagcctgggaggttgaggcctcgatgagccatgatcatgcccctgcactccagcttgggtaacagagtgagaccctttctcc

SEQ ID NO: 314941 - DNA, 875 bp, Homo sapiens
  misc_feature (238)..(238): n is a, c, g, or t
agcggaggtcctctctgggaaccttcagaaacctgatttctggtcctccccaaccagctccctgtccctgcttctgggcgctccttccttcctgagctcccagggttcctcaaggtcacttttggcgacaaaacataaaaaacaaatgatggcaggatggcaggaagaatctctttgtccctgagtttcagaagcaaatagtgaagctttgggcagaagaggattcatgggaaaatanatccaaatcactttggttccttcctttggatagaaggaatttggatcatgagggcccctgggtgtcctcaagtggccactttggaaggctgggtgggtggtggctgtggcattgtggatgatggacaagcttgtggccttggtgaggagtgatggggctctcggtgtttgcagaggaagctgcctgaacaggacatcgcacaaggatcctacattgccctgccattgacgctgctggttctgctggccggttacaaccatgacaagctcattcctttgctgctgcagttgacaagccggctacagggagtcggcgcgctcggccaggcagcctctgacaatagcggcccagaagatgcaaagagacaagccaagaaacagaagacaaggcggacgtgaggaggaaggggacagttgcagtctcacttgggacaggccacagccaggggtccgccttcgtttgcaagaagagttccagttgatgtggtgtttggttccatggcggggtaccctagggattcatctgttttcttcacttccctttgcatctgagatcctgctggaaaccacggcaacctgtatccactattaggaggtaaaaatcaataaaatggcccattcatttgtgttgtagctca

SEQ ID NO: 314942 - DNA, 348 bp, Homo sapiens
cctccttggaactgggaagttttcagccattattctggccgtcatttactgattataaagtgcttattatcaattctatttggacagagctaacttgtagttggtgtggggagtgcaaactttgcaaagaatttggttcttttctggtggtcttagcctgaggatgtcaagtgtgagcctagagggtgacgtttcctctcctggctccttaccacctgccgtgaagatgatctactctggcctttctctgtggaaaatggctgcgaaataatgaaacaggctgtcacggaattttctcctcctctttctccaggggtgttgaaatagtcacttcctacagcgatgcgg

SEQ ID NO: 314943 - DNA, 632 bp, Homo sapiens
gtttcaaagaagtcagccggtaggagtgggatttgggaaactttttgttttgcctttgttgtttgctactgatcacctgcgtgcgagggaggcttcttggagtcaggtgggtacatcttaacttgaaagaagcgctccgtctgcctccggccactgcctcttaggagctcagcagtagcaagaagctattacatagggttaggattcgaacctgtgctgaagccttataaggggtcacatggagccctcccttcttttccctgcagacacctgtggtgacttgctggtgactctacagtccctgagccgccagggtgagaagcggagcctccagctctccggcaaggtcaacgccatgactttcacctttgacaacgtgctccctggaaaatacaaaagtaagaattggaatgcaacatcctgtggccctcacacacttcttgtctttgtaaactttctaaaactcaggtctcaaattgtatcacgaccatgtacctttccttgttttaagtcgtctttgcctcgtgaccttgactgcattatttagcgttggacaagcatggaggagtccaggccctgagctgaccaccaccttgtctgcacagcccactggcggcttctgttaagggagg

SEQ ID NO: 314944 - DNA, 353 bp, Homo sapiens
ctcgtatgatttctcttactgggcgcggtaagctctcttgtgcgtttccctacagtgtcctctgttttgtggggacaggacccgccaaactgaagtatattaattattttaggtctggagagaaaatcactgttacaccgtcatctaaagagctgctcttttatcccccttcaatggaagccgttgtcagtggaggtaaatgtcaactcagcgagtgaatgtcacacacacctttgcagttgttcccttgcctgcatttacaagtagatttgtgatgttatagtgaagccatctttgtaagccaccttacatcctctctggcacacagatgttactgttggttggatggatgg

SEQ ID NO: 314945 - DNA, 1456 bp, Homo sapiens
cctcgatcatctgtgaggatggctcaaaccggaactccttcatcatgggtttgaagtaatactggccagggttccggtttgagccatcctcacagatgatcgaggtgcaggaaggccagaacctgaagatcaccatcacggggtaccgaaccgcttacagttgctatggcacagtgtcttccttaaacggagagcccgaacaaggggttgccatggaagcggtgggccagaacgactgcagcatttacggagaagacaccgtgacagacgaagagggcaagttcagattacgtggattgctgccgggatgtgtgtaccacgttcagctcaaggcagaaggcaacgaccacattgagcgggcgctcccccaccatagggtgattgaggttgggaataatgacatcgatgatgtaaacatcatagttttccggcagattaatcaatttgatttaagtggaaatgtgatcacttcctctgaataccttcctacgttatgggtcaagctttacaaaagcgaaaacctcgacaatccaatccagacagtttcccttggccagtccctgttcttccatttccccccactgctcagagatggcgagaactatgttgtgcttctggactccacactccccagatcccagtatgactacatcttgcctcaagtttctttcaccgcagtgggctaccataaacacatcaccttgatttttaatcccacgaggaagctgcctgaacaggacatcgcacaaggatcctacattgccctgccattgacgctgctggttctgctggccggttacaaccatgacaagctcattcctttgctgctgcagttgacaagccggctacagggagtcggcgcgctcggccaggcagcctctgacaatagcggcccagaagatgcaaagagacaagccaagaaacagaagacaaggcggacgtgaggaggaaggggacagttgcagtctcacttgggacaggccacagccaggggtccggccactacccgcccgtgggataaaagccaaaagcatgcgtcagctaacttcagcctgtgctgctgggcccgcaccccatgtcccttgtcactgtggcatcctgcacccatcctcacccctccgtagagcccctcgtgcaatgcaatgaatggaccctcctgtcactctgctgaacagaatttattttctgagtcaaatataatttattattatttttgtcaaagaagtatttaagctgtgctgtggtgtgagaatgtcattcttgatcttcagccttcgtttgcaagaagagttccagttgatgtggtgtttggttccatggcggggtaccctagggattcatctgttttcttcacttccctttgcatctgagatcctgctggaaaccacggcaacctgtatccactattaggaggtaaaaatcaataaaatggcccattcatttgtgttgtagctca

SEQ ID NO: 314946 - DNA, 2670 bp, Homo sapiens
tcaggactgtagagtcaccagcaagtcaccacaggtgtccaaacaagagactttccagtccctgagccgccagggtgagaagcggagcctccagctctccggcaaggtcaacgccatgactttcacctttgacaacgtgctccctggaaaatacaaaataagcatcatgcatgaggattggtgctggaagaacaagagcctggaggtggaagtgctggaggatgacgtgtctgcagttgagttcaggcagacgggctacatgctgagatgttccctgtctcacgccatcactctggaattttatcaggatggaaatgggcgtgagaatgtggggatttataacctctccaaaggagtcaaccgattctgcctgtccaagcctggtgtgtacaaagtgacccctcgctcctgccaccggtttgagcaagcgttctacacctatgacacgtcttcacctagtatcttgacattgacagccattcgccaccatgtccttggaactatcaccaccgacaaaatgatggatgtcactgtgactatcaagtcttccatcgacagtgaacccgccttggtcttaggccctctgaagtctgtgcaggagctgcggagggagcagcagctggctgagatcgaggcccgcaggcaggagagggagaaaaacggcaatgaggaaggtgaagaaagaatgaccaagcctcccgtgcaggagatggtagatgagttacaaggccccttctcgtatgatttctcttactgggcgcggtctggagagaaaatcactgttacaccgtcatctaaagagctgctcttttatcccccttcaatggaagccgttgtcagtggagaaagctgcccagggaagctgatcgagatccacgggaaggcaggcctgtttttagaaggccagatccaccccgagttggaaggagtcgagattgtcatcagtgaaaagggggcaagttcaccgctgatcacagtctttactgatgacaaaggtgcctacagtgttggccccctgcacagtgacctggagtacacggtgacctcacagaaggagggctatgttctgactgcagtggaaggaaccatcggagacttcaaggcctatgccctggcaggcgtaagctttgagataaaagctgaggatgaccagcccctcccgggagtcctcttatccctgagtggtggcctgtttcgttccaacctcttgacccaggacaacggcattctgacattctcaaacctgagccctggccagtattacttcaaacccatgatgaaggagttccggtttgagccatcctcacagatgatcgaggtgcaggaaggccagaacctgaagatcaccatcacggggtaccgaaccgcttacagttgctatggcacagtgtcttccttaaacggagagcccgaacaaggggttgccatggaagcggtgggccagaacgactgcagcatttacggagaagacaccgtgacagacgaagagggcaagttcagattacgtggattgctgccgggatgtgtgtaccacgttcagctcaaggcagaaggcaacgaccacattgagcgggcgctcccccaccatagggtgattgaggttgggaataatgacatcgatgatgtaaacatcatagttttccggcagattaatcaatttgatttaagtggaaatgtgatcacttcctctgaataccttcctacgttatgggtcaagctttacaaaagcgaaaacctcgacaatccaatccagacagtttcccttggccagtccctgttcttccatttccccccactgctcagagatggcgagaactatgttgtgcttctggactccacactccccagatcccagtatgactacatcttgcctcaagtttctttcaccgcagtgggctaccataaacacatcaccttgatttttaatcccacgaggaagctgcctgaacaggacatcgcacaaggatcctacattgccctgccattgacgctgctggttctgctggccggttacaaccatgacaagctcattcctttgctgctgcagttgacaagccggctacagggagtcggcgcgctcggccaggcagcctctgacaatagcggcccagaagatgcaaagagacaagccaagaaacagaagacaaggcggacgtgaggaggaaggggacagttgcagtctcacttgggacaggccacagccaggggtccggccactacccgcccgtgggataaaagccaaaagcatgcgtcagctaacttcagcctgtgctgctgggcccgcaccccatgtcccttgtcactgtggcatcctgcacccatcctcacccctccgtagagcccctcgtgcaatgcaatgaatggaccctcctgtcactctgctgaacagaatttattttctgagtcaaatataatttattattatttttgtcaaagaagtatttaagctgtgctgtggtgtgagaatgtcattcttgatcttcagccttcgtttgcaagaagagttccagttgatgtggtgtttggttccatggcggggtaccctagggattcatctgttttcttcacttccctttgcatctgagatcctgctggaaaccacggcaacctgtatccactattaggaggtaaaaatcaataaaatggcccattcatttgtgttgtagctca

SEQ ID NO: 314947 - DNA, 2379 bp, Homo sapiens
acgtcttcacctagtatcttgacataggtgtagaacgcttgctcaaaccggtggcaggagcgaggggtcactttgtacacaccaggcttggacaggcagaatcggttgactcctttggagaggttataaatccccacattctcacgcccatgacacgtcttcacctagtatcttgacattgacagccattcgccaccatgtccttggaactatcaccaccgacaaaatgatggatgtcactgtgactatcaagtcttccatcgacagtgaacccgccttggtcttaggccctctgaagtctgtgcaggagctgcggagggagcagcagctggctgagatcgaggcccgcaggcaggagagggagaaaaacggcaatgaggaaggtgaagaaagaatgaccaagcctcccgtgcaggagatggtagatgagttacaaggccccttctcgtatgatttctcttactgggcgcggtctggagagaaaatcactgttacaccgtcatctaaagagctgctcttttatcccccttcaatggaagccgttgtcagtggagaaagctgcccagggaagctgatcgagatccacgggaaggcaggcctgtttttagaaggccagatccaccccgagttggaaggagtcgagattgtcatcagtgaaaagggggcaagttcaccgctgatcacagtctttactgatgacaaaggtgcctacagtgttggccccctgcacagtgacctggagtacacggtgacctcacagaaggagggctatgttctgactgcagtggaaggaaccatcggagacttcaaggcctatgccctggcaggcgtaagctttgagataaaagctgaggatgaccagcccctcccgggagtcctcttatccctgagtggtggcctgtttcgttccaacctcttgacccaggacaacggcattctgacattctcaaacctgagccctggccagtattacttcaaacccatgatgaaggagttccggtttgagccatcctcacagatgatcgaggtgcaggaaggccagaacctgaagatcaccatcacggggtaccgaaccgcttacagttgctatggcacagtgtcttccttaaacggagagcccgaacaaggggttgccatggaagcggtgggccagaacgactgcagcatttacggagaagacaccgtgacagacgaagagggcaagttcagattacgtggattgctgccgggatgtgtgtaccacgttcagctcaaggcagaaggcaacgaccacattgagcgggcgctcccccaccatagggtgattgaggttgggaataatgacatcgatgatgtaaacatcatagttttccggcagattaatcaatttgatttaagtggaaatgtgatcacttcctctgaataccttcctacgttatgggtcaagctttacaaaagcgaaaacctcgacaatccaatccagacagtttcccttggccagtccctgttcttccatttccccccactgctcagagatggcgagaactatgttgtgcttctggactccacactccccagatcccagtatgactacatcttgcctcaagtttctttcaccgcagtgggctaccataaacacatcaccttgatttttaatcccacgaggaagctgcctgaacaggacatcgcacaaggatcctacattgccctgccattgacgctgctggttctgctggccggttacaaccatgacaagctcattcctttgctgctgcagttgacaagccggctacagggagtcggcgcgctcggccaggcagcctctgacaatagcggcccagaagatgcaaagagacaagccaagaaacagaagacaaggcggacgtgaggaggaaggggacagttgcagtctcacttgggacaggccacagccaggggtccggccactacccgcccgtgggataaaagccaaaagcatgcgtcagctaacttcagcctgtgctgctgggcccgcaccccatgtcccttgtcactgtggcatcctgcacccatcctcacccctccgtagagcccctcgtgcaatgcaatgaatggaccctcctgtcactctgctgaacagaatttattttctgagtcaaatataatttattattatttttgtcaaagaagtatttaagctgtgctgtggtgtgagaatgtcattcttgatcttcagccttcgtttgcaagaagagttccagttgatgtggtgtttggttccatggcggggtaccctagggattcatctgttttcttcacttccctttgcatctgagatcctgctggaaaccacggcaacctgtatccactattaggaggtaaaaatcaataaaatggcccattcatttgtgttgtagctca

SEQ ID NO: 314948 - DNA, 4377 bp, Homo sapiens
  misc_feature (3901)..(3901): n is a, c, g, or t
  misc_feature (3914)..(3914): n is a, c, g, or t
  misc_feature (3924)..(3924): n is a, c, g, or t
  misc_feature (3926)..(3926): n is a, c, g, or t
  misc_feature (3937)..(3937): n is a, c, g, or t
  misc_feature (3951)..(3951): n is a, c, g, or t
  misc_feature (3955)..(3955): n is a, c, g, or t
  misc_feature (3959)..(3959): n is a, c, g, or t
agccgacgaccgtggagctccatgtggatggagtcagtgacatctgcacaaagggtggggacatcaactttgtcttcactgggttctctgtgaatggcaaggtcctcagcaaagggcagcccctgggtcctgcgggagttcaggtgtctctgagaaacactgggaccgaagcaaagatccagtccacagttacacagcctggcggaaagtttgcattttttaaagttctgcctggagattatgaaatcctcgcaactcatccaacctgggcgttgaaagaggcaagcaccacagtgcgtgtaaccaactccaatgccaatgcggccagtcccctcatagttgctggctacaatgtgtctggctctgtccgaagtgatggggagcccatgaaaggcgtgaagtttcttctcttttcttctttagtaactaaagaggatgtcctgggctgcaatgtctcaccagtgcctgggttccagccccaagacgagagtctggtgtatttgtgctacacggtctccagagaagatggctcgttctctttctattccttgccaagtgggggctacactgtgattccgttctatcgaggggagaggattacctttgatgtggcgccttccagacttgacttcacagtggagcatgacagcttgaaaatcgagcccgtgttccacgtcatgggattctccgtcaccgggagggtcttgaacggacccgaaggagatggtgttccagaagcagtagtcaccctgaataaccaaatcaaagttaaaacaaaagctgatggctcattccgccttgagaacataaccacagggacatacaccatccatgctcagaaagagcacctctactttgaaacggtcaccatcaaaattgcaccaaacacacctcagctggctgacattgttgcaacagggttcagtgtctgtggtcagatatcaatcattcgcttccccgacaccgtcaagcagatgaataaatacaaagttgtcctgtcatctcaagacaaggacaagtctttggtcaccgtggagacagatgctcatggatcattttgttttaaagcaaacccagggacttacaaagtgcaggtgatggttcctgaggcagaaaccagagcagggctgacgttgaaaccccagacatttcctcttactgtgaccgacaggcctgtgatggatgtggcctttgtacagttcttggcatcagtttctgggaaagtctcttgtttggacacctgtggtgacttgctggtgactctacagtccctgagccgccagggtgagaagcggagcctccagctctccggcaaggtcaacgccatgactttcacctttgacaacgtgctccctggaaaatacaaaataagcatcatgcatgaggattggtgctggaagaacaagagcctggaggtggaagtgctggaggatgacgtgtctgcagttgagttcaggcagacgggctacatgctgagatgttccctgtctcacgccatcactctggaattttatcaggatggaaatgggcgtgagaatgtggggatttataacctctccaaaggagtcaaccgattctgcctgtccaagcctggtgtgtacaaagtgacccctcgctcctgccaccggtttgagcaagcgttctacacctatgacacgtcttcacctagtatcttgacattgacagccattcgccaccatgtccttggaactatcaccaccgacaaaatgatggatgtcactgtgactatcaagtcttccatcgacagtgaacccgccttggtcttaggccctctgaagtctgtgcaggagctgcggagggagcagcagctggctgagatcgaggcccgcaggcaggagagggagaaaaacggcaatgaggaaggtgaagaaagaatgaccaagcctcccgtgcaggagatggtagatgagttacaaggccccttctcgtatgatttctcttactgggcgcggtctggagagaaaatcactgttacaccgtcatctaaagagctgctcttttatcccccttcaatggaagccgttgtcagtggagaaagctgcccagggaagctgatcgagatccacgggaaggcaggcctgtttttagaaggccagatccaccccgagttggaaggagtcgagattgtcatcagtgaaaagggggcaagttcaccgctgatcacagtctttactgatgacaaaggtgcctacagtgttggccccctgcacagtgacctggagtacacggtgacctcacagaaggagggctatgttctgactgcagtggaaggaaccatcggagacttcaaggcctatgccctggcaggcgtaagctttgagataaaagctgaggatgaccagcccctcccgggagtcctcttatccctgagtggtggcctgtttcgttccaacctcttgacccaggacaacggcattctgacattctcaaacctgagccctggccagtattacttcaaacccatgatgaaggagttccggtttgagccatcctcacagatgatcgaggtgcaggaaggccagaacctgaagatcaccatcacggggtaccgaaccgcttacagttgctatggcacagtgtcttccttaaacggagagcccgaacaaggggttgccatggaagcggtgggccagaacgactgcagcatttacggagaagacaccgtgacagacgaagagggcaagttcagattacgtggattgctgccgggatgtgtgtaccacgttcagctcaaggcagaaggcaacgaccacattgagcgggcgctcccccaccatagggtgattgaggttgggaataatgacatcgatgatgtaaacatcatagttttccggcagattaatcaatttgatttaagtggaaatgtgatcacttcctctgaataccttcctacgttatgggtcaagctttacaaaagcgaaaacctcgacaatccaatccagacagtttcccttggccagtccctgttcttccatttccccccactgctcagagatggcgagaactatgttgtgcttctggactccacactccccagatcccagtatgactacatcttgcctcaagtttctttcaccgcagtgggctaccataaacacatcaccttgatttttaatcccacgaggaagctgcctgaacaggacatcgcacaaggatcctacattgccctgccattgacgctgctggttctgctggccggttacaaccatgacaagctcattcctttgctgctgcagttgacaagccggctacagggagtcggcgcgctcggccaggcagcctctgacaatagcggcccagaagatgcaaagagacaagccaagaaacagaagacaaggcggacgtgaggaggaaggggacagttgcagtctcacttgggacaggccacagccaggggtccggccactacccgcccgtgggataaaagccaaaagcatgcgtcagctaacttcagcctgtgctgctgggcccgcaccccatgtcccttgtcactgtggcatcctgcacccatcctcacccctccgtagagcccctcgtgcaatgcaatgaatggaccctcctgtcactctgctgaacagaatttattttctgagtcaaatataatttattattatttttgtcaaagaagtatttaagctgtgctgtggtgtgagaatgtcattcttgatcttcagccttcgtttgcaagaagagttccagttgatgtggtgtttggttccatggcggggtaccctagggattcatctgttttcttcacttccctttgcatctgagatcctgctggaaaccacggcaacctgtatccactattaggaggtaaaaatcaataaaatggcccattcatttgtgttgtagctcaaaaaaaaaaaaaaaaaaaaanaaaaaaaaaaaanaaaaaaaaananaaaaaaaaaanaaaaaaaaaaaaanaaanaaanaaaaaaaaaaaaaaaaaaaaaaaaaaaccgggggcccaaattgggggggggggaacaaaaggggtcagaaagggcgcggggcaaaaggggttccggtcaccccagcattttgttgccccacagggggtacaatagcggcgggggaccccccatataggtggagggcgacaataaaatcacgaaaacagcccgggttagccctggctttcggatcttcttccgctactacgcagagacagcacacaagagcacgaaatgacgagccagccagacagagcagccgcgcagacaataccaatagccgacgtcagcaagagcggagagacagcaacaaaggacacaacaccagacacaagcgaagctgtagacgaacaccaagacatgaaccaacgcgactacgtacaacacgcaccagagg

SEQ ID NO: 314949 - DNA, 4002 bp, Homo sapiens
agccgacgaccgtggagctccatgtggatggagtcagtgacatctgcacaaagggtggggacatcaactttgtcttcactgggttctctgtgaatggcaaggtcctcagcaaagggcagcccctgggtcctgcgggagttcaggtgtctctgagaaacactgggaccgaagcaaagatccagtccacagttacacagcctggcggaaagtttgcattttttaaagttctgcctggagattatgaaatcctcgcaactcatccaacctgggcgttgaaagaggcaagcaccacagtgcgtgtaaccaactccaatgccaatgcggccagtcccctcatagttgctggctacaatgtgtctggctctgtccgaagtgatggggagcccatgaaaggcgtgaagtttcttctcttttcttctttagtaactaaagaggatgtcctgggctgcaatgtctcaccagtgcctgggttccagccccaagacgagagtctggtgtatttgtgctacacggtctccagagaagatggctcgttctctttctattccttgccaagtgggggctacactgtgattccgttctatcgaggggagaggattacctttgatgtggcgccttccagacttgacttcacagtggagcatgacagcttgaaaatcgagcccgtgttccacgtcatgggattctccgtcaccgggagggtcttgaacggacccgaaggagatggtgttccagaagcagtagtcaccctgaataaccaaatcaaagttaaaacaaaagctgatggctcattccgccttgagaacataaccacagggacatacaccatccatgctcagaaagagcacctctactttgaaacggtcaccatcaaaattgcaccaaacacacctcagctggctgacattgttgcaacagggttcagtgtctgtggtcagatatcaatcattcgcttccccgacaccgtcaagcagatgaataaatacaaagttgtcctgtcatctcaagacaaggacaagtctttggtcaccgtggagacagatgctcatggatcattttgttttaaagcaaacccagggacttacaaagtgcaggtgatggttcctgaggcagaaaccagagcagggctgacgttgaaaccccagacatttcctcttactgtgaccgacaggcctgtgatggatgtggcctttgtacagttcttggcatcagtttctgggaaagtctcttgtttggacacctgtggtgacttgctggtgactctacagtccctgagccgccagggtgagaagcggagcctccagctctccggcaaggtcaacgccatgactttcacctttgacaacgtgctccctggaaaatacaaaataagcatcatgcatgaggattggtgctggaagaacaagagcctggaggtggaagtgctggaggatgacgtgtctgcagttgagttcaggcagacgggctacatgctgagatgttccctgtctcacgccatcactctggaattttatcaggatggaaatgggcgtgagaatgtggggatttataacctctccaaaggagtcaaccgattctgcctgtccaagcctggtgtgtacaaagtgacccctcgctcctgccaccggtttgagcaagcgttctacacctatgacacgtcttcacctagtatcttgacattgacagccattcgccaccatgtccttggaactatcaccaccgacaaaatgatggatgtcactgtgactatcaagtcttccatcgacagtgaacccgccttggtcttaggccctctgaagtctgtgcaggagctgcggagggagcagcagctggctgagatcgaggcccgcaggcaggagagggagaaaaacggcaatgaggaaggtgaagaaagaatgaccaagcctcccgtgcaggagatggtagatgagttacaaggccccttctcgtatgatttctcttactgggcgcggtctggagagaaaatcactgttacaccgtcatctaaagagctgctcttttatcccccttcaatggaagccgttgtcagtggagaaagctgcccagggaagctgatcgagatccacgggaaggcaggcctgtttttagaaggccagatccaccccgagttggaaggagtcgagattgtcatcagtgaaaagggggcaagttcaccgctgatcacagtctttactgatgacaaaggtgcctacagtgttggccccctgcacagtgacctggagtacacggtgacctcacagaaggagggctatgttctgactgcagtggaaggaaccatcggagacttcaaggcctatgccctggcaggcgtaagctttgagataaaagctgaggatgaccagcccctcccgggagtcctcttatccctgagtggtggcctgtttcgttccaacctcttgacccaggacaacggcattctgacattctcaaacctgagccctggccagtattacttcaaacccatgatgaaggagttccggtttgagccatcctcacagatgatcgaggtgcaggaaggccagaacctgaagatcaccatcacggggtaccgaaccgcttacagttgctatggcacagtgtcttccttaaacggagagcccgaacaaggggttgccatggaagcggtgggccagaacgactgcagcatttacggagaagacaccgtgacagacgaagagggcaagttcagattacgtggattgctgccgggatgtgtgtaccacgttcagctcaaggcagaaggcaacgaccacattgagcgggcgctcccccaccatagggtgattgaggttgggaataatgacatcgatgatgtaaacatcatagttttccggcagattaatcaatttgatttaagtggaaatgtgatcacttcctctgaataccttcctacgttatgggtcaagctttacaaaagcgaaaacctcgacaatccaatccagacagtttcccttggccagtccctgttcttccatttccccccactgctcagagatggcgagaactatgttgtgcttctggactccacactccccagatcccagtatgactacatcttgcctcaagtttctttcaccgcagtgggctaccataaacacatcaccttgatttttaatcccacgaggaagctgcctgaacaggacatcgcacaaggatcctacattgccctgccattgacgctgctggttctgctggccggttacaaccatgacaagggacatattaggcccggagagaggccagcccatccctggggactcattagtaagaggcctgcctcgtttgaactgaaacccacccattagcacgtggcagctgctgatcatgtctgaagaagctcattcctttgctgctgcagttgacaagccggctacagggagtcggcgcgctcggccaggcagcctctgacaatagcggcccagaagatgcaaagagacaagccaagaaacagaagacaaggcggacgtgaggaggaaggggacagttgcagtctcacttgggacaggccacagccaggggtccggccactacccgcccgtgggataaaagccaaaagcatgcgtcagctaacttcagcctgtgctgctgggcccgcaccccatgtcccttgtcactgtggcatcctgcacccatcctcacccctccgtagagcccctcgtgcaatgcaatgaatggaccctcctgtcactctgctgaacagaatttattttctgagtcaaatataatttattattatttttgtcaaagaagtatttaagctgtgctgtggtgtgagaatgtcattcttgatcttcagccttcgtttgcaagaagagttccagttgatgtggtgtttggttccatggcggggtaccctagggattcatctgttttcttcacttccctttgcatctgagatcctgctggaaaccacggcaacctgtatccactattaggaggtaaaaatcaataaaatggcccattcatttgtgttgtagctca

SEQ ID NO: 314950 - DNA, 4311 bp, Homo sapiens
  misc_feature (3885)..(3885): n is a, c, g, or t
  misc_feature (3889)..(3889): n is a, c, g, or t
  misc_feature (3893)..(3893): n is a, c, g, or t
agccgacgaccgtggagctccatgtggatggagtcagtgacatctgcacaaagggtggggacatcaactttgtcttcactgggttctctgtgaatggcaaggtcctcagcaaagggcagcccctgggtcctgcgggagttcaggtgtctctgagaaacactgggaccgaagcaaagatccagtccacagttacacagcctggcggaaagtttgcattttttaaagttctgcctggagattatgaaatcctcgcaactcatccaacctgggcgttgaaagaggcaagcaccacagtgcgtgtaaccaactccaatgccaatgcggccagtcccctcatagttgctggctacaatgtgtctggctctgtccgaagtgatggggagcccatgaaaggcgtgaagtttcttctcttttcttctttagtaactaaagaggatgtcctgggctgcaatgtctcaccagtgcctgggttccagccccaagacgagagtctggtgtatttgtgctacacggtctccagagaagatggctcgttctctttctattccttgccaagtgggggctacactgtgattccgttctatcgaggggagaggattacctttgatgtggcgccttccagacttgacttcacagtggagcatgacagcttgaaaatcgagcccgtgttccacgtcatgggattctccgtcaccgggagggtcttgaacggacccgaaggagatggtgttccagaagcagtagtcaccctgaataaccaaatcaaagttaaaacaaaagctgatggctcattccgccttgagaacataaccacagggacatacaccatccatgctcagaaagagcacctctactttgaaacggtcaccatcaaaattgcaccaaacacacctcagctggctgacattgttgcaacagggttcagtgtctgtggtcagatatcaatcattcgcttccccgacaccgtcaagcagatgaataaatacaaagttgtcctgtcatctcaagacaaggacaagtctttggtcaccgtggagacagatgctcatggatcattttgttttaaagcaaacccagggacttacaaagtgcaggtgatggttcctgaggcagaaaccagagcagggctgacgttgaaaccccagacatttcctcttactgtgaccgacaggcctgtgatggatgtggcctttgtacagttcttggcatcagtttctgggaaagtctcttgtttggacacctgtggtgacttgctggtgactctacagtccctgagccgccagggtgagaagcggagcctccagctctccggcaaggtcaacgccatgactttcacctttgacaacgtgctccctggaaaatacaaaataagcatcatgcatgaggattggtgctggaagaacaagagcctggaggtggaagtgctggaggatgacgtgtctgcagttgagttcaggcagacgggctacatgctgagatgttccctgtctcacgccatcactctggaattttatcaggatggaaatgggcgtgagaatgtggggatttataacctctccaaaggagtcaaccgattctgcctgtccaagcctggtgtgtacaaagtgacccctcgctcctgccaccggtttgagcaagcgttctacacctatgacacgtcttcacctagtatcttgacattgacagccattcgccaccatgtccttggaactatcaccaccgacaaaatgatggatgtcactgtgactatcaagtcttccatcgacagtgaacccgccttggtcttaggccctctgaagtctgtgcaggagctgcggagggagcagcagctggctgagatcgaggcccgcaggcaggagagggagaaaaacggcaatgaggaaggtgaagaaagaatgaccaagcctcccgtgcaggagatggtagatgagttacaaggccccttctcgtatgatttctcttactgggcgcggtctggagagaaaatcactgttacaccgtcatctaaagagctgctcttttatcccccttcaatggaagccgttgtcagtggagaaagctgcccagggaagctgatcgagatccacgggaaggcaggcctgtttttagaaggccagatccaccccgagttggaaggagtcgagattgtcatcagtgaaaagggggcaagttcaccgctgatcacagtctttactgatgacaaaggtgcctacagtgttggccccctgcacagtgacctggagtacacggtgacctcacagaaggagggctatgttctgactgcagtggaaggaaccatcggagacttcaaggcctatgccctggcaggcgtaagctttgagataaaagctgaggatgaccagcccctcccgggagtcctcttatccctgagtggtggcctgtttcgttccaacctcttgacccaggacaacggcattctgacattctcaaacctgagccctggccagtattacttcaaacccatgatgaaggagttccggtttgagccatcctcacagatgatcgaggtgcaggaaggccagaacctgaagatcaccatcacggggtaccgaaccgcttacagttgctatggcacagtgtcttccttaaacggagagcccgaacaaggggttgccatggaagcggtgggccagaacgactgcagcatttacggagaagacaccgtgacagacgaagagggcaagttcagattacgtggattgctgccgggatgtgtgtaccacgttcagctcaaggcagaaggcaacgaccacattgagcgggcgctcccccaccatagggtgattgaggttgggaataatgacatcgatgatgtaaacatcatagttttccggcagattaatcaatttgatttaagtggaaatgtgatcacttcctctgaataccttcctacgttatgggtcaagctttacaaaagcgaaaacctcgacaatccaatccagacagtttcccttggccagtccctgttcttccatttccccccactgctcagagatggcgagaactatgttgtgcttctggactccacactccccagatcccagtatgactacatcttgcctcaagtttctttcaccgcagtgggctaccataaacacatcaccttgatttttaatcccacgaggaagctgcctgaacaggacatcgcacaaggatcctacattgccctgccattgacgctgctggttctgctggccggttacaaccatgacaagctcattcctttgctgctgcagttgacaagccggctacagggagtcggcgcgctcggccaggcagcctctgacaatagcggcccagaagatgcaaagagacaagccaagaaacagaagacaaggcggacgtgaggaggaaggggacagttgcagtctcacttgggacaggccacagccaggggtccggccactacccgcccgtgggataaaagccaaaagcatgcgtcagctaacttcagcctgtgctgctgggcccgcaccccatgtcccttgtcactgtggcatcctgcacccatcctcacccctccgtagagcccctcgtgcaatgcaatgaatggaccctcctgtcactctgctgaacagaatttattttctgagtcaaatataatttattattatttttgtcaaagaagtatttaagctgtgctgtggtgtgagaatgtcattcttgatcttcagccttcgtttgcaagaagagttccagttgatgtggtgtttggttccatggcggggtaccctagggattcatctgttttcttcacttccctttgcatctgagatcctgctggaaaccacggcaacctgtatccactattaggaggtaaaaatcaataaaatggcccattcatttgtgttgtagctcaaaaanaaanaaanaaaaaaaaaaaaaaaaaaaaaaaaaaaccgggggcccaaattgggggggggggaacaaaaggggtcagaaagggcgcggggcaaaaggggttccggtcaccccagcattttgttgccccacagggggtacaatagcggcgggggaccccccatataggtggagggcgacaataaaatcacgaaaacagcccgggttagccctggctttcggatcttcttccgctactacgcagagacagcacacaagagcacgaaatgacgagccagccagacagagcagccgcgcagacaataccaatagccgacgtcagcaagagcggagagacagcaacaaaggacacaacaccagacacaagcgaagctgtagacgaacaccaagacatgaaccaacgcgactacgtacaacacgcaccagagg

SEQ ID NO: 314951 - DNA, 3891 bp, Homo sapiens
agccgacgaccgtggagctccatgtggatggagtcagtgacatctgcacaaagggtggggacatcaactttgtcttcactgggttctctgtgaatggcaaggtcctcagcaaagggcagcccctgggtcctgcgggagttcaggtgtctctgagaaacactgggaccgaagcaaagatccagtccacagttacacagcctggcggaaagtttgcattttttaaagttctgcctggagattatgaaatcctcgcaactcatccaacctgggcgttgaaagaggcaagcaccacagtgcgtgtaaccaactccaatgccaatgcggccagtcccctcatagttgctggctacaatgtgtctggctctgtccgaagtgatggggagcccatgaaaggcgtgaagtttcttctcttttcttctttagtaactaaagaggatgtcctgggctgcaatgtctcaccagtgcctgggttccagccccaagacgagagtctggtgtatttgtgctacacggtctccagagaagatggctcgttctctttctattccttgccaagtgggggctacactgtgattccgttctatcgaggggagaggattacctttgatgtggcgccttccagacttgacttcacagtggagcatgacagcttgaaaatcgagcccgtgttccacgtcatgggattctccgtcaccgggagggtcttgaacggacccgaaggagatggtgttccagaagcagtagtcaccctgaataaccaaatcaaagttaaaacaaaagctgatggctcattccgccttgagaacataaccacagggacatacaccatccatgctcagaaagagcacctctactttgaaacggtcaccatcaaaattgcaccaaacacacctcagctggctgacattgttgcaacagggttcagtgtctgtggtcagatatcaatcattcgcttccccgacaccgtcaagcagatgaataaatacaaagttgtcctgtcatctcaagacaaggacaagtctttggtcaccgtggagacagatgctcatggatcattttgttttaaagcaaacccagggacttacaaagtgcaggtgatggttcctgaggcagaaaccagagcagggctgacgttgaaaccccagacatttcctcttactgtgaccgacaggcctgtgatggatgtggcctttgtacagttcttggcatcagtttctgggaaagtctcttgtttggacacctgtggtgacttgctggtgactctacagtccctgagccgccagggtgagaagcggagcctccagctctccggcaaggtcaacgccatgactttcacctttgacaacgtgctccctggaaaatacaaaataagcatcatgcatgaggattggtgctggaagaacaagagcctggaggtggaagtgctggaggatgacgtgtctgcagttgagttcaggcagacgggctacatgctgagatgttccctgtctcacgccatcactctggaattttatcaggatggaaatgggcgtgagaatgtggggatttataacctctccaaaggagtcaaccgattctgcctgtccaagcctggtgtgtacaaagtgacccctcgctcctgccaccggtttgagcaagcgttctacacctatgacacgtcttcacctagtatcttgacattgacagccattcgccaccatgtccttggaactatcaccaccgacaaaatgatggatgtcactgtgactatcaagtcttccatcgacagtgaacccgccttggtcttaggccctctgaagtctgtgcaggagctgcggagggagcagcagctggctgagatcgaggcccgcaggcaggagagggagaaaaacggcaatgaggaaggtgaagaaagaatgaccaagcctcccgtgcaggagatggtagatgagttacaaggccccttctcgtatgatttctcttactgggcgcggtctggagagaaaatcactgttacaccgtcatctaaagagctgctcttttatcccccttcaatggaagccgttgtcagtggagaaagctgcccagggaagctgatcgagatccacgggaaggcaggcctgtttttagaaggccagatccaccccgagttggaaggagtcgagattgtcatcagtgaaaagggggcaagttcaccgctgatcacagtctttactgatgacaaaggtgcctacagtgttggccccctgcacagtgacctggagtacacggtgacctcacagaaggagggctatgttctgactgcagtggaaggaaccatcggagacttcaaggcctatgccctggcaggcgtaagctttgagataaaagctgaggatgaccagcccctcccgggagtcctcttatccctgagtggtggcctgtttcgttccaacctcttgacccaggacaacggcattctgacattctcaaacctgagccctggccagtattacttcaaacccatgatgaaggagttccggtttgagccatcctcacagatgatcgaggtgcaggaaggccagaacctgaagatcaccatcacggggtaccgaaccgcttacagttgctatggcacagtgtcttccttaaacggagagcccgaacaaggggttgccatggaagcggtgggccagaacgactgcagcatttacggagaagacaccgtgacagacgaagagggcaagttcagattacgtggattgctgccgggatgtgtgtaccacgttcagctcaaggcagaaggcaacgaccacattgagcgggcgctcccccaccatagggtgattgaggttgggaataatgacatcgatgatgtaaacatcatagttttccggcagattaatcaatttgatttaagtggaaatgtgatcacttcctctgaataccttcctacgttatgggtcaagctttacaaaagcgaaaacctcgacaatccaatccagacagtttcccttggccagtccctgttcttccatttccccccactgctcagagatggcgagaactatgttgtgcttctggactccacactccccagatcccagtatgactacatcttgcctcaagtttctttcaccgcagtgggctaccataaacacatcaccttgatttttaatcccacgaggaagctgcctgaacaggacatcgcacaaggatcctacattgccctgccattgacgctgctggttctgctggccggttacaaccatgacaagctcattcctttgctgctgcagttgacaagccggctacagggagtcggcgcgctcggccaggcagcctctgacaatagcggcccagaagatgcaaagagacaagccaagaaacagaagacaaggcggacgtgaggaggaaggggacagttgcagtctcacttgggacaggccacagccaggggtccggccactacccgcccgtgggataaaagccaaaagcatgcgtcagctaacttcagcctgtgctgctgggcccgcaccccatgtcccttgtcactgtggcatcctgcacccatcctcacccctccgtagagcccctcgtgcaatgcaatgaatggaccctcctgtcactctgctgaacagaatttattttctgagtcaaatataatttattattatttttgtcaaagaagtatttaagctgtgctgtggtgtgagaatgtcattcttgatcttcagccttcgtttgcaagaagagttccagttgatgtggtgtttggttccatggcggggtaccctagggattcatctgttttcttcacttccctctccctacacccctcccacccccctccctttcttaagcaagtattttaactttctttctggcacaggtacaaagaagacttcctgttaccagatcaacgctgtagag

SEQ ID NO: 314952 - DNA, 1180 bp, Homo sapiens
gaactgactcctgagtttttttgcagccgggatgtgtgtaccacgttcagctcaaggcagaaggcaacgaccacattgagcgggcgctcccccaccatagggtgattgaggttgggaataatgacatcgatgatgtaaacatcatagttttccggcagattaatcaatttgatttaagtggaaatgtgatcacttcctctgaataccttcctacgttatgggtcaagctttacaaaagcgaaaacctcgacaatccaatccagacagtttcccttggccagtccctgttcttccatttccccccactgctcagagatggcgagaactatgttgtgcttctggactccacactccccagatcccagtatgactacatcttgcctcaagtttctttcaccgcagtgggctaccataaacacatcaccttgatttttaatcccacgaggaagctgcctgaacaggacatcgcacaaggatcctacattgccctgccattgacgctgctggttctgctggccggttacaaccatgacaagctcattcctttgctgctgcagttgacaagccggctacagggagtcggcgcgctcggccaggcagcctctgacaatagcggcccagaagatgcaaagagacaagccaagaaacagaagacaaggcggacgtgaggaggaaggggacagttgcagtctcacttgggacaggccacagccaggggtccggccactacccgcccgtgggataaaagccaaaagcatgcgtcagctaacttcagcctgtgctgctgggcccgcaccccatgtcccttgtcactgtggcatcctgcacccatcctcacccctccgtagagcccctcgtgcaatgcaatgaatggaccctcctgtcactctgctgaacagaatttattttctgagtcaaatataatttattattatttttgtcaaagaagtatttaagctgtgctgtggtgtgagaatgtcattcttgatcttcagccttcgtttgcaagaagagttccagttgatgtggtgtttggttccatggcggggtaccctagggattcatctgttttcttcacttccctttgcatctgagatcctgctggaaaccacggcaacctgtatccactattaggaggtaaaaatcaataaaatggcccattcatttgtgttgtagctca

SEQ ID NO: 314953 - DNA, 3549 bp, Homo sapiens
agccgacgaccgtggagctccatgtggatggagtcagtgacatctgcacaaagggtggggacatcaactttgtcttcactgggttctctgtgaatggcaaggtcctcagcaaagggcagcccctgggtcctgcgggagttcaggtgtctctgagaaacactgggaccgaagcaaagatccagtccacagttacacagcctggcggaaagtttgcattttttaaagttctgcctggagattatgaaatcctcgcaactcatccaacctgggcgttgaaagaggcaagcaccacagtgcgtgtaaccaactccaatgccaatgcggccagtcccctcatagttgctggctacaatgtgtctggctctgtccgaagtgatggggagcccatgaaaggcgtgaagtttcttctcttttcttctttagtaactaaagaggatgtcctgggctgcaatgtctcaccagtgcctgggttccagccccaagacgagagtctggtgtatttgtgctacacggtctccagagaagatggctcgttctctttctattccttgccaagtgggggctacactgtgattccgttctatcgaggggagaggattacctttgatgtggcgccttccagacttgacttcacagtggagcatgacagcttgaaaatcgagcccgtgttccacgtcatgggattctccgtcaccgggagggtcttgaacggacccgaaggagatggtgttccagaagcagtagtcaccctgaataaccaaatcaaagttaaaacaaaagctgatggctcattccgccttgagaacataaccacagggacatacaccatccatgctcagaaagagcacctctactttgaaacggtcaccatcaaaattgcaccaaacacacctcagctggctgacattgttgcaacagggttcagtgtctgtggtcagatatcaatcattcgcttccccgacaccgtcaagcagatgaataaatacaaagttgtcctgtcatctcaagacaaggacaagtctttggtcaccgtggagacagatgctcatggatcattttgttttaaagcaaacccagggacttacaaagtgcaggtgatggttcctgaggcagaaaccagagcagggctgacgttgaaaccccagacatttcctcttactgtgaccgacaggcctgtgatggatgtggcctttgtacagttcttggcatcagtttctgggaaagtctcttgtttggacacctgtggtgacttgctggtgactctacagtccctgagccgccagggtgagaagcggagcctccagctctccggcaaggtcaacgccatgactttcacctttgacaacgtgctccctggaaaatacaaaataagcatcatgcatgaggattggtgctggaagaacaagagcctggaggtggaagtgctggaggatgacgtgtctgcagttgagttcaggcagacgggctacatgctgagatgttccctgtctcacgccatcactctggaattttatcaggatggaaatgggcgtgagaatgtggggatttataacctctccaaaggagtcaaccgattctgcctgtccaagcctggtgtgtacaaagtgacccctcgctcctgccaccggtttgagcaagcgttctacacctatgacacgtcttcacctagtatcttgacattgacagccattcgccaccatgtccttggaactatcaccaccgacaaaatgatggatgtcactgtgactatcaagtcttccatcgacagtgaacccgccttggtcttaggccctctgaagtctgtgcaggagctgcggagggagcagcagctggctgagatcgaggcccgcaggcaggagagggagaaaaacggcaatgaggaaggtgaagaaagaatgaccaagcctcccgtgcaggagatggtagatgagttacaaggccccttctcgtatgatttctcttactgggcgcggtctggagagaaaatcactgttacaccgtcatctaaagagctgctcttttatcccccttcaatggaagccgttgtcagtggagaaagctgcccagggaagctgatcgagatccacgggaaggcaggcctgtttttagaaggccagatccaccccgagttggaaggagtcgagattgtcatcagtgaaaagggggcaagttcaccgctgatcacagtctttactgatgacaaaggtgcctacagtgttggccccctgcacagtgacctggagtacacggtgacctcacagaaggagggctatgttctgactgcagtggaaggaaccatcggagacttcaaggcctatgccctggcaggcgtaagctttgagataaaagctgaggatgaccagcccctcccgggagtcctcttatccctgagtggtggcctgtttcgttccaacctcttgacccaggacaacggcattctgacattctcaaacctgagccctggccagtattacttcaaacccatgatgaaggagttccggtttgagccatcctcacagatgatcgaggtgcaggaaggccagaacctgaagatcaccatcacggggtaccgaaccgcttacagttgctatggcacagtgtcttccttaaacggagagcccgaacaaggggttgccatggaagcggtgggccagaacgactgcagcatttacggagaagacaccgtgacagacgaagagggcaagttcagattacgtggattgctgccgggatgtgtgtaccacgttcagctcaaggcagaaggcaacgaccacattgagcgggcgctcccccaccatagggtgattgaggttgggaataatgacatcgatgatgtaaacatcatagttttccggcagattaatcaatttgatttaagtggaaatgtgatcacttcctctgaataccttcctacgttatgggtcaagctttacaaaagcgaaaacctcgacaatccaatccagacagtttcccttggccagtccctgttcttccatttccccccactgctcagagatggcgagaactatgttgtgcttctggactccacactccccagatcccagtatgactacatcttgcctcaagtttctttcaccgcagtgggctaccataaacacatcaccttgatttttaatcccacgaggaagctgcctgaacaggacatcgcacaaggatcctacattgccctgccattgacgctgctggttctgctggccggttacaaccatgacaagctcattcctttgctgctgcagttgacaagccggctacagggagtcggcgcgctcggccaggcagcctctgacaatagcggcccagaagatgcaaagagacaagccaagaaacagaagacaaggcggacccttcgtttgcaagaagagttccagttgatgtggtgtttggttccatggcggggtaccctagggattcatctgttttcttcacttccctttgcatctgagatcctgctggaaaccacggcaacctgtatccactattaggaggtaaaaatcaataaaatggcccattcatttgtgttgtagctca

SEQ ID NO: 314954 - DNA, 3319 bp, Homo sapiens
agccgacgaccgtggagctccatgtggatggagtcagtgacatctgcacaaagggtggggacatcaactttgtcttcactgggttctctgtgaatggcaaggtcctcagcaaagggcagcccctgggtcctgcgggagttcaggtgtctctgagaaacactgggaccgaagcaaagatccagtccacagttacacagcctggcggaaagtttgcattttttaaagttctgcctggagattatgaaatcctcgcaactcatccaacctgggcgttgaaagaggcaagcaccacagtgcgtgtaaccaactccaatgccaatgcggccagtcccctcatagttgctggctacaatgtgtctggctctgtccgaagtgatggggagcccatgaaaggcgtgaagtttcttctcttttcttctttagtaactaaagaggatgtcctgggctgcaatgtctcaccagtgcctgggttccagccccaagacgagagtctggtgtatttgtgctacacggtctccagagaagatggctcgttctctttctattccttgccaagtgggggctacactgtgattccgttctatcgaggggagaggattacctttgatgtggcgccttccagacttgacttcacagtggagcatgacagcttgaaaatcgagcccgtgttccacgtcatgggattctccgtcaccgggagggtcttgaacggacccgaaggagatggtgttccagaagcagtagtcaccctgaataaccaaatcaaagttaaaacaaaagctgatggctcattccgccttgagaacataaccacagggacatacaccatccatgctcagaaagagcacctctactttgaaacggtcaccatcaaaattgcaccaaacacacctcagctggctgacattgttgcaacagggttcagtgtctgtggtcagatatcaatcattcgcttccccgacaccgtcaagcagatgaataaatacaaagttgtcctgtcatctcaagacaaggacaagtctttggtcaccgtggagacagatgctcatggatcattttgttttaaagcaaacccagggacttacaaagtgcaggtgatggttcctgaggcagaaaccagagcagggctgacgttgaaaccccagacatttcctcttactgtgaccgacaggcctgtgatggatgtggcctttgtacagttcttggcatcagtttctgggaaagtctcttgtttggacacctgtggtgacttgctggtgactctacagtccctgagccgccagggtgagaagcggagcctccagctctccggcaaggtcaacgccatgactttcacctttgacaacgtgctccctggaaaatacaaaataagcatcatgcatgaggattggtgctggaagaacaagagcctggaggtggaagtgctggaggatgacgtgtctgcagttgagttcaggcagacgggctacatgctgagatgttccctgtctcacgccatcactctggaattttatcaggatggaaatgggcgtgagaatgtggggatttataacctctccaaaggagtcaaccgattctgcctgtccaagcctggtgtgtacaaagtgacccctcgctcctgccaccggtttgagcaagcgttctacacctatgacacgtcttcacctagtatcttgacattgacagccattcgccaccatgtccttggaactatcaccaccgacaaaatgatggatgtcactgtgactatcaagtcttccatcgacagtgaacccgccttggtcttaggccctctgaagtctgtgcaggagctgcggagggagcagcagctggctgagatcgaggcccgcaggcaggagagggagaaaaacggcaatgaggaaggtgaagaaagaatgaccaagcctcccgtgcaggagatggtagatgagttacaaggccccttctcgtatgatttctcttactgggcgcggtctggagagaaaatcactgttacaccgtcatctaaagagctgctcttttatcccccttcaatggaagccgttgtcagtggagaaagctgcccagggaagctgatcgagatccacgggaaggcaggcctgtttttagaaggccagatccaccccgagttggaaggagtcgagattgtcatcagtgaaaagggggcaagttcaccgctgatcacagtctttactgatgacaaaggtgcctacagtgttggccccctgcacagtgacctggagtacacggtgacctcacagaaggagggctatgttctgactgcagtggaaggaaccatcggagacttcaaggcctatgccctggcaggcgtaagctttgagataaaagctgaggatgaccagcccctcccgggagtcctcttatccctgagtggtggcctgtttcgttccaacctcttgacccaggacaacggcattctgacattctcaaacctgagccctggccagtattacttcaaacccatgatgaaggagttccggtttgagccatcctcacagatgatcgaggtgcaggaaggccagaacctgaagatcaccatcacggggtaccgaaccgcttacagttgctatggcacagtgtcttccttaaacggagagcccgaacaaggggttgccatggaagcggtgggccagaacgactgcagcatttacggagaagacaccgtgacagacgaagagggcaagttcagattacgtggattgctgccgggatgtgtgtaccacgttcagctcaaggcagaaggcaacgaccacattgagcgggcgctcccccaccatagggtgattgaggttgggaataatgacatcgatgatgtaaacatcatagttttccggcagattaatcaatttgatttaagtggaaatgtgatcacttcctctgaataccttcctacgttatgggtcaagctttacaaaagcgaaaacctcgacaatccaatccagacagtttcccttggccagtccctgttcttccatttccccccactgctcagagatggcgagaactatgttgtgcttctggactccacactccccagatcccagtatgactacatcttgcctcaagtttctttcaccgcagtgggctaccataaacacatcaccttgatttttaatcccacgaggaagctgcctgaacaggacatcgcacaaggatcctacattgccctgccattgacgctgctggttctgctggccggttacaaccatgacaagctattgtcagaggctgcctggccgagcgcgcggactccctgtagccggcttgtcaactgcagcagcaaaggatgggccggtca

SEQ ID NO: 314955 - DNA, 1742 bp, Homo sapiens
ctagagggtgacgtttcctctcctggctccttaccacctgccgtgaagatgatctactctggcctttctctgtggctccaggggtgttgaaatagtcacttcctacagcgatgcggaaacatcttgggctttggggtcacacttcccctgagttcagagccttcatagatgtgtggcagccttcttagctgagtgaccttgggcaagttactcttagtctcttcgtgcttgactttcctcgtctataagacggggtgatgatcccgaccttgccagtggtagaaagcaaagcagccgcgggcctcatgcaatgtgcatggtgcctggcagctggtcggtgctcagcacacagagctgtgacgggcctcatgcaatgtgcatggtgcctggcagctggtcggtgctcagcacacagagctgtggctgcccctggtgccgttccagggatgctgtatttttaggatttgccagcttacgagcctctcaagcatcgtcccttagaagtcagccccgttgtggatcctcagttgtatcacgtacctccctcatcagaattggctcataataattttttgtgtttcataaagtcagatcctcagaggaccgtaattgtcaaggttgggtactcataaaaaggctgcaggctctgacagccttatcagaagccacagtctcagagacactggggacacatgcccgccactgatggaatagcccgctgaggttgatactttgaaggcagcaaccttggtttggatgtgtagtcttggggatttctttaaaaacataaagttctttacatcacagccatacgttaggttttagttttcatttgctttgccagagctgtccttataaaaataacttcttcccatgtgtgcacagaactatgttgtgcttctggactccacactccccagatcccagtatgactacatcttgcctcaagtttctttcaccgcagtgggctaccataaacacatcaccttgatttttaatcccacgaggaagctgcctgaacaggacatcgcacaaggatcctacattgccctgccattgacgctgctggttctgctggccggttacaaccatgacaagctcattcctttgctgctgcagttgacaagccggctacagggagtcggcgcgctcggccaggcagcctctgacaatagcggcccagaagatgcaaagagacaagccaagaaacagaagacaaggcggacgtgaggaggaaggggacagttgcagtctcacttgggacaggccacagccaggggtccggccactacccgcccgtgggataaaagccaaaagcatgcgtcagctaacttcagcctgtgctgctgggcccgcaccccatgtcccttgtcactgtggcatcctgcacccatcctcacccctccgtagagcccctcgtgcaatgcaatgaatggaccctcctgtcactctgctgaacagaatttattttctgagtcaaatataatttattattatttttgtcaaagaagtatttaagctgtgctgtggtgtgagaatgtcattcttgatcttcagccttcgtttgcaagaagagttccagttgatgtggtgtttggttccatggcggggtaccctagggattcatctgttttcttcacttccctttgcatctgagatcctgctggaaaccacggcaacctgtatccactattaggaggtaaaaatcaataaaatggcccattcatttgtgttgtagctca

SEQ ID NO: 314956 - DNA, 869 bp, Homo sapiens
cctcttcagcatctcaagtgtagtcacctggatttccattaacagggcctcctaattttcccccacaaagcatgtttggatttcaccgcagtgggctaccataaacacatcaccttgatttttaatcccacgaggaagctgcctgaacaggacatcgcacaaggatcctacattgccctgccattgacgctgctggttctgctggccggttacaaccatgacaagctcattcctttgctgctgcagttgacaagccggctacagggagtcggcgcgctcggccaggcagcctctgacaatagcggcccagaagatgcaaagagacaagccaagaaacagaagacaaggcggacgtgaggaggaaggggacagttgcagtctcacttgggacaggccacagccaggggtccggccactacccgcccgtgggataaaagccaaaagcatgcgtcagctaacttcagcctgtgctgctgggcccgcaccccatgtcccttgtcactgtggcatcctgcacccatcctcacccctccgtagagcccctcgtgcaatgcaatgaatggaccctcctgtcactctgctgaacagaatttattttctgagtcaaatataatttattattatttttgtcaaagaagtatttaagctgtgctgtggtgtgagaatgtcattcttgatcttcagccttcgtttgcaagaagagttccagttgatgtggtgtttggttccatggcggggtaccctagggattcatctgttttcttcacttccctttgcatctgagatcctgctggaaaccacggcaacctgtatccactattaggaggtaaaaatcaataaaatggcccattcatttgtgttgtagctca

SEQ ID NO: 314957 - DNA, 3071 bp, Homo sapiens
agccgacgaccgtggagctccatgtggatggagtcagtgacatctgcacaaagggtggggacatcaactttgtcttcactgggttctctgtgaatggcaaggtcctcagcaaagggcagcccctgggtcctgcgggagttcaggtgtctctgagaaacactgggaccgaagcaaagatccagtccacagttacacagcctggcggaaagtttgcattttttaaagttctgcctggagattatgaaatcctcgcaactcatccaacctgggcgttgaaagaggcaagcaccacagtgcgtgtaaccaactccaatgccaatgcggccagtcccctcatagttgctggctacaatgtgtctggctctgtccgaagtgatggggagcccatgaaaggcgtgaagtttcttctcttttcttctttagtaactaaagaggatgtcctgggctgcaatgtctcaccagtgcctgggttccagccccaagacgagagtctggtgtatttgtgctacacggtctccagagaagatggctcgttctctttctattccttgccaagtgggggctacactgtgattccgttctatcgaggggagaggattacctttgatgtggcgccttccagacttgacttcacagtggagcatgacagcttgaaaatcgagcccgtgttccacgtcatgggattctccgtcaccgggagggtcttgaacggacccgaaggagatggtgttccagaagcagtagtcaccctgaataaccaaatcaaagttaaaacaaaagctgatggctcattccgccttgagaacataaccacagggacatacaccatccatgctcagaaagagcacctctactttgaaacggtcaccatcaaaattgcaccaaacacacctcagctggctgacattgttgcaacagggttcagtgtctgtggtcagatatcaatcattcgcttccccgacaccgtcaagcagatgaataaatacaaagttgtcctgtcatctcaagacaaggacaagtctttggtcaccgtggagacagatgctcatggatcattttgttttaaagcaaacccagggacttacaaagtgcaggtgatggttcctgaggcagaaaccagagcagggctgacgttgaaaccccagacatttcctcttactgtgaccgacaggcctgtgatggatgtggcctttgtacagttcttggcatcagtttctgggaaagtctcttgtttggacacctgtggtgacttgctggtgactctacagtccctgagccgccagggtgagaagcggagcctccagctctccggcaaggtcaacgccatgactttcacctttgacaacgtgctccctggaaaatacaaaataagcatcatgcatgaggattggtgctggaagaacaagagcctggaggtggaagtgctggaggatgacgtgtctgcagttgagttcaggcagacgggctacatgctgagatgttccctgtctcacgccatcactctggaattttatcaggatggaaatgggcgtgagaatgtggggatttataacctctccaaaggagtcaaccgattctgcctgtccaagcctggtgtgtacaaagtgacccctcgctcctgccaccggtttgagcaagcgttctacacctatgacacgtcttcacctagtatcttgacattgacagccattcgccaccatgtccttggaactatcaccaccgacaaaatgatggatgtcactgtgactatcaagtcttccatcgacagtgaacccgccttggtcttaggccctctgaagtctgtgcaggagctgcggagggagcagcagctggctgagatcgaggcccgcaggcaggagagggagaaaaacggcaatgaggaaggtgaagaaagaatgaccaagcctcccgtgcaggagatggtagatgagttacaaggccccttctcgtatgatttctcttactgggcgcggtctggagagaaaatcactgttacaccgtcatctaaagagctgctcttttatcccccttcaatggaagccgttgtcagtggagaaagctgcccagggaagctgatcgagatccacgggaaggcaggcctgtttttagaaggccagatccaccccgagttggaaggagtcgagattgtcatcagtgaaaagggggcaagttcaccgctgatcacagtctttactgatgacaaaggtgcctacagtgttggccccctgcacagtgacctggagtacacggtgacctcacagaaggagggctatgttctgactgcagtggaaggaaccatcggagacttcaaggcctatgccctggcaggcgtaagctttgagataaaagctgaggatgaccagcccctcccgggagtcctcttatccctgagtggtggcctgtttcgttccaacctcttgacccaggacaacggcattctgacattctcaaacctgagccctggccagtattacttcaaacccatgatgaaggagttccggtttgagccatcctcacagatgatcgaggtgcaggaaggccagaacctgaagatcaccatcacggggtaccgaaccgcttacagttgctatggcacagtgtcttccttaaacggagagcccgaacaaggggttgccatggaagcggtgggccagaacgactgcagcatttacggagaagacaccgtgacagacgaagagggcaagttcagattacgtggattgctgccgggatgtgtgtaccacgttcagctcaaggcagaaggcaacgaccacattgagcgggcgctcccccaccatagggtgattgaggttgggaataatgacatcgatgatgtaaacatcatagttttccggcagattaatcaatttgatttaagtggaaatgtgatcacttcctctgaataccttcctacgttatgggtcaagctttacaaaagcgaaaacctcgacaatccaatccagacagttttccctttgcatctgagatcctgctggaaaccacggcaacctgtatccactattaggaggtaaaaatcaataaaatggcccattcatttgtgttgtagctca

SEQ ID NO: 314958 - DNA, 2867 bp, Homo sapiens
agccgacgaccgtggagctccatgtggatggagtcagtgacatctgcacaaagggtggggacatcaactttgtcttcactgggttctctgtgaatggcaaggtcctcagcaaagggcagcccctgggtcctgcgggagttcaggtgtctctgagaaacactgggaccgaagcaaagatccagtccacagttacacagcctggcggaaagtttgcattttttaaagttctgcctggagattatgaaatcctcgcaactcatccaacctgggcgttgaaagaggcaagcaccacagtgcgtgtaaccaactccaatgccaatgcggccagtcccctcatagttgctggctacaatgtgtctggctctgtccgaagtgatggggagcccatgaaaggcgtgaagtttcttctcttttcttctttagtaactaaagaggatgtcctgggctgcaatgtctcaccagtgcctgggttccagccccaagacgagagtctggtgtatttgtgctacacggtctccagagaagatggctcgttctctttctattccttgccaagtgggggctacactgtgattccgttctatcgaggggagaggattacctttgatgtggcgccttccagacttgacttcacagtggagcatgacagcttgaaaatcgagcccgtgttccacgtcatgggattctccgtcaccgggagggtcttgaacggacccgaaggagatggtgttccagaagcagtagtcaccctgaataaccaaatcaaagttaaaacaaaagctgatggctcattccgccttgagaacataaccacagggacatacaccatccatgctcagaaagagcacctctactttgaaacggtcaccatcaaaattgcaccaaacacacctcagctggctgacattgttgcaacagggttcagtgtctgtggtcagatatcaatcattcgcttccccgacaccgtcaagcagatgaataaatacaaagttgtcctgtcatctcaagacaaggacaagtctttggtcaccgtggagacagatgctcatggatcattttgttttaaagcaaacccagggacttacaaagtgcaggtgatggttcctgaggcagaaaccagagcagggctgacgttgaaaccccagacatttcctcttactgtgaccgacaggcctgtgatggatgtggcctttgtacagttcttggcatcagtttctgggaaagtctcttgtttggacacctgtggtgacttgctggtgactctacagtccctgagccgccagggtgagaagcggagcctccagctctccggcaaggtcaacgccatgactttcacctttgacaacgtgctccctggaaaatacaaaataagcatcatgcatgaggattggtgctggaagaacaagagcctggaggtggaagtgctggaggatgacgtgtctgcagttgagttcaggcagacgggctacatgctgagatgttccctgtctcacgccatcactctggaattttatcaggatggaaatgggcgtgagaatgtggggatttataacctctccaaaggagtcaaccgattctgcctgtccaagcctggtgtgtacaaagtgacccctcgctcctgccaccggtttgagcaagcgttctacacctatgacacgtcttcacctagtatcttgacattgacagccattcgccaccatgtccttggaactatcaccaccgacaaaatgatggatgtcactgtgactatcaagtcttccatcgacagtgaacccgccttggtcttaggccctctgaagtctgtgcaggagctgcggagggagcagcagctggctgagatcgaggcccgcaggcaggagagggagaaaaacggcaatgaggaaggtgaagaaagaatgaccaagcctcccgtgcaggagatggtagatgagttacaaggccccttctcgtatgatttctcttactgggcgcggtctggagagaaaatcactgttacaccgtcatctaaagagctgctcttttatcccccttcaatggaagccgttgtcagtggagaaagctgcccagggaagctgatcgagatccacgggaaggcaggcctgtttttagaaggccagatccaccccgagttggaaggagtcgagattgtcatcagtgaaaagggggcaagttcaccgctgatcacagtctttactgatgacaaaggtgcctacagtgttggccccctgcacagtgacctggagtacacggtgacctcacagaaggagggctatgttctgactgcagtggaaggaaccatcggagacttcaaggcctatgccctggcaggcgtaagctttgagataaaagctgaggatgaccagcccctcccgggagtcctcttatccctgagtggtggcctgtttcgttccaacctcttgacccaggacaacggcattctgacattctcaaacctgagccctggccagtattacttcaaacccatgatgaaggagttccggtttgagccatcctcacagatgatcgaggtgcaggaaggccagaacctgaagatcaccatcacggggtaccgaaccgcttacagttgctatggcacagtgtcttccttaaacggagagcccgaacaaggggttgccatggaagcggtgggccagaacgactgcagcatttacggagaagacaccgtgacagacgaagagggcaagttcagattacgtggattgctgccgggatgtgtgtaccacgttcagctcaaggcagaaggcaacgaccacattgagcgggcgctcccccaccatagggtgattgagccagtagtgggtcagccagtagtgggtcagccagtagtgggtcagccagtagtgggt

SEQ ID NO: 314959 - DNA, 3052 bp, Homo sapiens
agccgacgaccgtggagctccatgtggatggagtcagtgacatctgcacaaagggtggggacatcaactttgtcttcactgggttctctgtgaatggcaaggtcctcagcaaagggcagcccctgggtcctgcgggagttcaggtgtctctgagaaacactgggaccgaagcaaagatccagtccacagttacacagcctggcggaaagtttgcattttttaaagttctgcctggagattatgaaatcctcgcaactcatccaacctgggcgttgaaagaggcaagcaccacagtgcgtgtaaccaactccaatgccaatgcggccagtcccctcatagttgctggctacaatgtgtctggctctgtccgaagtgatggggagcccatgaaaggcgtgaagtttcttctcttttcttctttagtaactaaagaggatgtcctgggctgcaatgtctcaccagtgcctgggttccagccccaagacgagagtctggtgtatttgtgctacacggtctccagagaagatggctcgttctctttctattccttgccaagtgggggctacactgtgattccgttctatcgaggggagaggattacctttgatgtggcgccttccagacttgacttcacagtggagcatgacagcttgaaaatcgagcccgtgttccacgtcatgggattctccgtcaccgggagggtcttgaacggacccgaaggagatggtgttccagaagcagtagtcaccctgaataaccaaatcaaagttaaaacaaaagctgatggctcattccgccttgagaacataaccacagggacatacaccatccatgctcagaaagagcacctctactttgaaacggtcaccatcaaaattgcaccaaacacacctcagctggctgacattgttgcaacagggttcagtgtctgtggtcagatatcaatcattcgcttccccgacaccgtcaagcagatgaataaatacaaagttgtcctgtcatctcaagacaaggacaagtctttggtcaccgtggagacagatgctcatggatcattttgttttaaagcaaacccagggacttacaaagtgcaggtgatggttcctgaggcagaaaccagagcagggctgacgttgaaaccccagacatttcctcttactgtgaccgacaggcctgtgatggatgtggcctttgtacagttcttggcatcagtttctgggaaagtctcttgtttggacacctgtggtgacttgctggtgactctacagtccctgagccgccagggtgagaagcggagcctccagctctccggcaaggtcaacgccatgactttcacctttgacaacgtgctccctggaaaatacaaaataagcatcatgcatgaggattggtgctggaagaacaagagcctggaggtggaagtgctggaggatgacgtgtctgcagttgagttcaggcagacgggctacatgctgagatgttccctgtctcacgccatcactctggaattttatcaggatggaaatgggcgtgagaatgtggggatttataacctctccaaaggagtcaaccgattctgcctgtccaagcctggtgtgtacaaagtgacccctcgctcctgccaccggtttgagcaagcgttctacacctatgacacgtcttcacctagtatcttgacattgacagccattcgccaccatgtccttggaactatcaccaccgacaaaatgatggatgtcactgtgactatcaagtcttccatcgacagtgaacccgccttggtcttaggccctctgaagtctgtgcaggagctgcggagggagcagcagctggctgagatcgaggcccgcaggcaggagagggagaaaaacggcaatgaggaaggtgaagaaagaatgaccaagcctcccgtgcaggagatggtagatgagttacaaggccccttctcgtatgatttctcttactgggcgcggtctggagagaaaatcactgttacaccgtcatctaaagagctgctcttttatcccccttcaatggaagccgttgtcagtggagaaagctgcccagggaagctgatcgagatccacgggaaggcaggcctgtttttagaaggccagatccaccccgagttggaaggagtcgagattgtcatcagtgaaaagggggcaagttcaccgctgatcacagtctttactgatgacaaaggtgcctacagtgttggccccctgcacagtgacctggagtacacggtgacctcacagaaggagggctatgttctgactgcagtggaaggaaccatcggagacttcaaggcctatgccctggcaggcgtaagctttgagataaaagctgaggatgaccagcccctcccgggagtcctcttatccctgagtggtggcctgtttcgttccaacctcttgacccaggacaacggcattctgacattctcaaacctgagcccttgttcgggctctcgttccgccccccatgcccgcccggcagtcccgggctccccaccccactccctcgccagccagcaccgccggccgcccagcacagcgccagcacacctgcacacacccccccaccacccgcccaccgcaacccccccccacccaccccccccgccccccaccgccctccccctcccccgcgcacacccccgcaccccccggcccccgcccacgcccccacccccccccccccacaccgcacccggcaccgcccccccacacggcagcacacaccacccgcacgcaccacgcacccgcaagcagcgcgccaagcgtccaaccactaacccgcgcgccacccgccctcgccccgcgcgaccgcctgcggccacccacagatcccacgcctcccaacgccacccacaccccaacgcaccaccccccgcaagcagcagacgcacccccccccagcccaaacccgcagcacccgaccgccacggacgcaccctgcccgcaccatcaaaacccccgcgcccaaccccaccacccccccccccgcggacacacccacccccacccccccccccacccccgcgccc

SEQ ID NO: 314960 - DNA, 1606 bp, Homo sapiens
agccgacgaccgtggagctccatgtggatggagtcagtgacatctgcacaaagggtggggacatcaactttgtcttcactgggttctctgtgaatggcaaggtcctcagcaaagggcagcccctgggtcctgcgggagttcaggtgtctctgagaaacactgggaccgaagcaaagatccagtccacagttacacagcctggcggaaagtttgcattttttaaagttctgcctggagattatgaaatcctcgcaactcatccaacctgggcgttgaaagaggcaagcaccacagtgcgtgtaaccaactccaatgccaatgcggccagtcccctcatagttgctggctacaatgtgtctggctctgtccgaagtgatggggagcccatgaaaggcgtgaagtttcttctcttttcttctttagtaactaaagaggatgtcctgggctgcaatgtctcaccagtgcctgggttccagccccaagacgagagtctggtgtatttgtgctacacggtctccagagaagatggctcgttctctttctattccttgccaagtgggggctacactgtgattccgttctatcgaggggagaggattacctttgatgtggcgccttccagacttgacttcacagtggagcatgacagcttgaaaatcgagcccgtgttccacgtcatgggattctccgtcaccgggagggtcttgaacggacccgaaggagatggtgttccagaagcagtagtcaccctgaataaccaaatcaaagttaaaacaaaagctgatggctcattccgccttgagaacataaccacagggacatacaccatccatgctcagaaagagcacctctactttgaaacggtcaccatcaaaattgcaccaaacacacctcagctggctgacattgttgcaacagggttcagtgtctgtggtcagatatcaatcattcgcttccccgacaccgtcaagcagatgaataaatacaaagttgtcctgtcatctcaagacaaggacaagtctttggtcaccgtggagacagatgctcatggatcattttgttttaaagcaaacccagggacttacaaagtgcaggtgcgatgcattgttttaaatttaaaatgttttgagaaaaagcagtgatttttagaagggttattaggtcgaatggggttagagaaggagcattccagtttccaacttcttgtttttaagtctttacaatcctgcaccagtagaggagagtcagataggcatccagctaaaaaataatgccatctgcctctcttttttccagtcttgatggttattagtatcaggctgccagtcactcctctaccttcaggcttctggctgctgtagaatgtcgatgagtccaagaggacaccaaaaatgaactctactaatggccgctcaaaaatggccatagtgcgtggcttctgggaccccaggccaaaatggagcttcccatttcctgctttgccttgacttcaagatggctaggcagggaccacgcgacttatccattcaacagcagacgacgtctgctgtgtcatcatcaccatgtgtcacagaacagactcgtcatccatgggggtcctctaata

SEQ ID NO: 314961 - DNA, 929 bp, Homo sapiens
catttgcagctgcagtggaaagcatttgtgctcactatattgcaaaggaggtgactgaaataagctcccgtgaagcatcacagtcattacactggagcagttctctggttccacgtttcaattcgtcctatcttcctgcgagatattgactttttcctttctctaatgtgttgaaatatgaacattttaataagaatggaaaagaatatggatatttaaaataggccatctaggttgtaagaatgaatactttttacattggactcagtaaaatgtaatcattttgaagaagggaaacatgtggctagaaacctgtttaatttatttattgtcccttacttaatataatgtgatctgcagtgacctcgagtgcccttcacaatatattttcctcattaacatttagtggttctgggaagctggcctgtaactcagaagttaggaatcatttctttaatggttgccgaacgtacaatctaatccattcaaataggcaggggaaactactaccaaatatttctaaaatcagaatggcagaaagaacacaaatgattataaaagaaaatgtcacagaaaaaacacatgaccaagtgaaaaaaatgaagaatacttatcaactctaaaaaaaaagaaattttgtgcaaaattttcagagaaaactgccattatgaacagtatgtaactacagtgatctcaagaaaacaaaacacaaatgggttgttaacggttgacaatcagagttgcatgaatgatgtgtgaaggcctgaagatgttatttgtttattaaaaggaagcagttatccatcgtgtatatgcttgggttacgagtccacccctcatcttcttggtcatttgtttacatagcccacctgtgtgggcttcactattctaatatggatttgtttttcagagtcattaagctgtttata

SEQ ID NO: 314962 - DNA, 254 bp, Homo sapiens
tgaaaaggaaaagaatgtggagacctcaaattataaaccagccaggctttaaaccgtgctgctgaactccgcaagatttcttgaaggaattaatgagcagatagttttacacatgtttagaaaggaaggcagtgaaagcaagcttggcttcatcaagaacaagacatgtcagactaatcttaatcattttctgaaagtattacttggttggcagatatgaaaaatgctctagacatagttaatttgattttaag

SEQ ID NO: 314963 - DNA, 439 bp, Homo sapiens
tctcacttttctctctactagacagatggccagctaaatgcagaaggatcatgaactttacaaacaagtgaaagagtctggttccctgggttaccacatggaagtctacctgccagatccctgcaatgaactgtgaaacaagcaagaaatacattttgttacattattcagatgcatcggttctttattatctcattagcctactttgtcaaaacattccataatctcttctccaatcttcttttctcccaactccagcataaagagagagtttatggcccccaaacataaattatggtttccatcttcgttaaatatacctctttccaatctctcacaaccccacccccatcattaacccctatcaaaatcctgcttcattcaaggtcaatttcaagccccttctcacctgtgaagtcttctagagccttcagttcct

SEQ ID NO: 314964 - DNA, 605 bp, Homo sapiens
gaaggaaagagtggggacagttggctgcctgtgcaactctccagactagaaagagaccattacacatgttgtaaagcccagaggaatagttttctgcacatcttgcctggcaagtgctcttctacaatgtaaaacaaacttctctgaagtacagaacttggtaatagctaaaccccgcttgaaagtagaaaacgaagttccagaaatagaagaagggcttggaaacaagtataaagtgccaaaaaagaggtatcatcagcaggaagagggtgaggacgcacctggaagccacacacattggaggacacaggttcttcactgcaagtctgtgaagcccaataaaagaagctttggtgaaaaaggtagcctgttcaggacacagcagaatgtgatttttcacttctgaagaaaagggaaatttggacacagaaccagagaggacagtgctgtggacacgcagacacagggaagaagccaggcgaaggcagaggcagaggctggaggcaagcatctacaagccaacggacggcaaggatttccagccaccaccagaagctggggaagaagccgacaacagattctctcagagcctccagttagaacca

SEQ ID NO: 314965 - DNA, 4482 bp, Homo sapiens
gcccctctccgcgcggccggcccccagtgcaggcggagccgcgccgcgctcccaccccggccgggagctaggagccagcggccagccccgcgcagcgcagcgcagcccgcagaagcccggtcagcgcacgtgcccgcgagacctgcaaacttgtgccaccggctctgcccgtccccggggagcccgaacgccccgcagccctcacccctcccgccagtctccagccatgggctgctttgaatgctgcatcaagtgtctgggaggagtcccctacgcctccctggtggccaccatcctctgcttctccggggtggccttattctgcggctgtgggcatgtggctctcgcaggcaccgtggcgattcttgagcaacacttctccaccaacgccagtgaccatgccttgctgagcgaggtgatacaactgatgcagtatgtcatctatggaattgcgtcctttttcttcttgtatgggatcattctgttggcagaaggcttttacaccacaagtgcagtgaaagaactgcacggtgagtttaaaacaaccgcttgtggccgatgcatcagtggaatgttcgttttcctcacctatgtgcttggagtggcctggctgggtgtgtttggtttctcagcggtgcccgtgtttatgttctacaacatatggtcaacttgtgaagtcatcaagtcaccgcagaccaacgggaccacgggtgtggagcagatctgtgtggatatccgacaatacggtatcattccttggaatgctttccccggaaaaatatgtggctctgccctggagaacatctgcaacacaaacgagttctacatgtcctatcacctgttcattgtggcctgtgcaggagctggtgccaccgtcattgccctgctgatctacatgatggctactacatataactatgcggttttgaagtttaagagtcgggaagattgctgcactaaattctaaattgcataaggagttttagagagctatgctctgtagcatgaaatatcactgacactccagactaaagcagagtctaggtttctgcaattttgttacagtaatttgtaaatagctttagtaaactcaccttgcatggtagattaataagatgacttactgtacatgaattacacaataatgagatctggtggctatttccacattttgaaaaggattcagttatttactgacagtggtgagcatcctttttaaaataatgttctcatacttaaacattagagagcagtatctttaaatgaattattaacactttggaatacttacattttctgttatttttgattgcctgataaccagtttcaatgatgaaaatgaaaacaagtgctgaagatgaaatggaagagaaccgttttaatctggattttgttttgtcacacctggaaaatactttgcaaatatgttctaaattgaaaacaatttttttatgatcacatggttcactaccaaatgaccctcaaataagccagatgaaaatttgaagaaaaaggtcacccagttctctggaaaaaaaaaaaaaaaaaaaaaaaaaaaggatttatatgtgggtagttttttttttggtacaacacaatcattctgttagagcccacaaaattggtaaccttaaattgtgtgttttggtaagtaataactaactgtttcctcatagctagttctcaagctgcatgtaagattttaacgggaagagaaaataggcctggacctgaaggtctcaaatatgttgagaagaaagtatgaactataaggaacttgagatgtagatttattttgcaggaaatacgaggaaaataggaaagaagtgtttgccgcatcaagtgtaaagaatgatactgaggatttttacattttatgaaatgaaataatggcatttacaaaatgaaaaatgtagtttcacaactaagttttgttaacagagactgcatgctttgcttatagttcttaattttggttttgacattcatttaattttttccatgttaaatatgtagtttaattatttactcaaaataaacattgttcatgcttttaggcctttgggggaattgatttttatccacaggtagaaaatggtctttgcacacactacacttatttcaaatatacaatgtgctcccgaactttcgcattagtctttaaaattactctcaaaatggtattaaaaaaaaaaaaaaaagcaccctctcgtatttcattttggctttttcttaacaataccttgggccatttttttccagttcactatgttggtatactaacttttcttcagccttttaatgcgaagccaactagtagagcatgctttcaggatctgacagctctgctagtagagcgagtatttattaatacagaattaaccttcgcccctttaaagtcaagtctgtctaatctaactagcgcctcgctttgccttctcacaatgctcactagccatcatgctcacccttctcttccagatccacttcctcatgatactgtcttctaactgggcttacttaaaggatgcgagcaaaatgcaggcttaccaggatatcaaagcaaaggaagaacaggaactgcaagatatccagtctcggtcaaaagaacaactcaattcttacacataaatgtttgccagagtgtttcggccgacgtatttacagctctgacaaatcatcagacagctgctctgcagtacagatgtgtatcccaccaaactaatgtagatgtacaaacacttcactgtctgtctcaagctgctgggatgtatctctaggaaaaccttccagtgggtaaatctttttctttagaacaaatattggaggtttcatgttagccattttaaaaggcaacactttgacaaaatgatcgttcatactttgggaatttgtggcatgttcacatttattgctagggcaattctaccaagacactcaatggaatatgtcacactccttaatagggacctgtgactccttaataaggacctgtgacatgcccagcatcaagggataagaccgtaaattcacatatatgccatctgtcctcaagtgttatctacataggaaataaaatggaattgatgtaaagttccatttctgacagctgacatttattaaactttggatcaaagataatgtgattcttatgattgatttctcaaactagcttttccctcccaagtccaggacccattaatttcctgagccaatcagaaatatatttttcaataatgctaaaattagctacaattctgctgaccctactattaaagaatctggatgctggactcactgacaagctttccagaagcaattttataacagatttcattttaacaaaatactgatccaattttcattattcttgagaaatgtcagctttgccttaatgagtatttgctttaaatttctaagaatttatatcataactagagacccaaatatctttcacagaattttgttccataaatgtttttcttaattattaagaagtgttaccttattaaaatgaccaccattctaaaccatttttcagtggtctggatacgaagtttacagtttcataccaactatctaaaacctaattgcaaattgaccacagacctctaacctcctacttttatagacttgaatacttaagtaatttaaattagggttggtatttcatttttttcttatctaaatcttagtttcctggaataataaagtttgatgttcagcaagagaactgcttgagtttaagccattttcaaaagaaacttgccttttacattattgtgttccagaacattaagtgactgtaggtactgggtattagtgatggtaaactttgtgttgctctttatgaaatgatccatataactgttgggtgcatcagtgcttttcaaaggggctgcttactatagggttaactatgtatattcattgttaagagttaacttgtggtttggctgtttcctggattttataacatacatgtgcagaaatgtattcaaatgaaaggaagcatacctttatcaagatgctattaaaattgaacatcaagtataatatttcatttggattctcttttttggttaatgcctaaaaatgcctatttgggattttttttttttttaaattaagagaagctctcttctgtgtagaacagttgttccaaaatagcttagtgttttgttttcctgttgcatgacagatttaactattctttccagcagtggaggtgctgtcagagtccagtgttctagaagaggcagtgtctaaagcctaattttacttttctaattctggtagctattaccaggaatttttgaaagttttgtttaagtagtctaatattttttatgtaaagagcattaaattttgctatgtataaatttttgtaacctaacagtgaatcaatattttctatcagtgccaagggcttcctgtagttctattcaagtgttacaataaatatttgtagataatagtcaa

SEQ ID NO: 314966 - DNA, 4908 bp, Homo sapiens
gcccctctccgcgcggccggcccccagtgcaggcggagccgcgccgcgctcccaccccggccgggagctaggagccagcggccagccccgcgcagcgcagcgcagcccgcagaagcccggtcagcgcacgtgcccgcgagacctgcaaacttgtgccaccggctctgcccgtccccggggagcccgaacgccccgcagccctcacccctcccgccagtctccagccatgggctgctttgaatgctgcatcaagtgtctgggaggagtcccctacgcctccctggtggccaccatcctctgcttctccggggtggccttattctgcggctgtgggcatgtggctctcgcaggcaccgtggcgattcttgagcaacacttctccaccaacgccagtgaccatgccttgctgagcgaggtgatacaactgatgcagtatgtcatctatggaattgcgtcctttttcttcttgtatgggatcattctgttggcagaaggcttttacaccacaagtgcagtgaaagaactgcacggtgagtttaaaacaaccgcttgtggccgatgcatcagtggaatgttcgttttcctcacctatgtgcttggagtggcctggctgggtgtgtttggtttctcagcggtgcccgtgtttatgttctacaacatatggtcaacttgtgaagtcatcaagtcaccgcagaccaacgggaccacgggtgtggagcagatctgtgtggatatccgacaatacggtatcattccttggaatgctttccccggaaaaatatgtggctctgccctggagaacatctgcaacacaaacgagttctacatgtcctatcacctgttcattgtggcctgtgcaggagctggtgccaccgtcattgccctgctgatctacatgatggctactacatataactatgcggttttgaagtttaagagtcgggaagattgctgcactaaattctaaattgcataaggagttttagagagctatgctctgtagcatgaaatatcactgacactccagactaaagcagagtctaggtttctgcaattttgttacagtaatttgtaaatagctttagtaaactcaccttgcatggtagattaataagatgacttactgtacatgaattacacaataatgagatctggtggctatttccacattttgaaaaggattcagttatttactgacagtggtgagcatcctttttaaaataatgttctcatacttaaacattagagagcagtatctttaaatgaattattaacactttggaatacttacattttctgttatttttgattgcctgataaccagtttcaatgatgaaaatgaaaacaagtgctgaagatgaaatggaagagaaccgttttaatctggattttgttttgtcacacctggaaaatactttgcaaatatgttctaaattgaaaacaatttttttatgatcacatggttcactaccaaatgaccctcaaataagccagatgaaaatttgaagaaaaaggtcacccagttctctggaaaaaaaaaaaaaaaaaaaaaaaaaaaggatttatatgtgggtagttttttttttggtacaacacaatcattctgttagagcccacaaaattggtaaccttaaattgtgtgttttggtaagtaataactaactgtttcctcatagctagttctcaagctgcatgtaagattttaacgggaagagaaaataggcctggacctgaaggtctcaaatatgttgagaagaaagtatgaactataaggaacttgagatgtagatttattttgcaggaaatacgaggaaaataggaaagaagtgtttgccgcatcaagtgtaaagaatgatactgaggatttttacattttatgaaatgaaataatggcatttacaaaatgaaaaatgtagtttcacaactaagttttgttaacagagactgcatgctttgcttatagttcttaattttggttttgacattcatttaattttttccatgttaaatatgtagtttaattatttactcaaaataaacattgttcatgcttttaggcctttgggggaattgatttttatccacaggtagaaaatggtctttgcacacactacacttatttcaaatatacaatgtgctcccgaactttcgcattagtctttaaaattactctcaaaatggtattaaaaaaaaaaaaaaaagcaccctctcgtatttcattttggctttttcttaacaataccttgggccatttttttccagttcactatgttggtatactaacttttcttcagccttttaatgcgaagccaactagtagagcatgctttcaggatctgacagctctgctagtagagcgagtatttattaatacagaattaaccttcgcccctttaaagtcaagtctgtctaatctaactagcgcctcgctttgccttctcacaatgctcactagccatcatgctcacccttctcttccagatccacttcctcatgatactgtcttctaactgggcttacttaaaggatgcgagcaaaatgcaggcttaccaggatatcaaagcaaaggaagaacaggaactgcaagatatccagtctcggtcaaaagaacaactcaattcttacacataaatgtttgccagagtgtttcggccgacgtatttacagctctgacaaatcatcagacagctgctctgcagtacagatgtgtatcccaccaaactaatgtagatgtacaaacacttcactgtctgtctcaagctgctgggatgtatctctaggaaaaccttccagtgggtaaatctttttctttagaacaaatattggaggtttcatgttagccattttaaaaggcaacactttgacaaaatgatcgttcatactttgggaatttgtggcatgttcacatttattgctagggcaattctaccaagacactcaatggaatatgtcacactccttaatagggacctgtgactccttaataaggacctgtgacatgcccagcatcaagggataagaccgtaaattcacatatatgccatctgtcctcaagtgttatctacataggaaataaaatggaattgatgtaaagttccatttctgacagctgacatttattaaactttggatcaaagataatgtgattcttatgattgatttctcaaactagcttttccctcccaagtccaggacccattaatttcctgagccaatcagaaatatatttttcaataatgctaaaattagctacaattctgctgaccctactattaaagaatctggatgctggactcactgacaagctttccagaagcaattttataacagatttcattttaacaaaatactgatccaattttcattattcttgagaaatgtcagctttgccttaatgagtatttgctttaaatttctaagaatttatatcataactagagacccaaatatctttcacagaattttgttccataaatgtttttcttaattattaagaagtgttaccttattaaaatgaccaccattctaaaccatttttcagtggtctggatacgaagtttacagtttcataccaactatctaaaacctaattgcaaattgaccacagacctctaacctcctacttttatagacttgaatacttaagtaatttaaattagggttggtatttcatttttttcttatctaaatcttagtttcctggaataataaagtttgatgttcagcaagagaactgcttgagtttaagccattttcaaaagaaacttgccttttacattattgtgttccagaacattaagtgactgtaggtactgggtattagtgatggtaaactttgtgttgctctttatgaaatgatccatataactgttgggtgcatcagtgcttttcaaaggggctgcttactatagggttaactatgtatattcattgttaagagttaacttgtggtttggctgtttcctggattttataacatacatgtgcagaaatgtattcaaatgaaaggaagcatacctttatcaagatgctattaaaattgaacatcaagtataatatttcatttggattctcttttttggttaatgcctaaaaatgcctatttgggattttttttttttttaaattaagagaagctctcttctgtgtagaacagttgttccaaaatagcttagtgttttgttttcctgttgcatgacagatttaactattctttccagcagtggaggtgctgtcagagtccagtgttctagaagaggcagtgtctaaagcctaattttacttttctaattctggtagctattaccaggaatttttgaaagttttgtttaagtagtctaatattttttatgtaaagagcattaaattttgctatgtataaatttttgtaacctaacagtgaatcaatattttctatcagtgccaagggcttcctgtagttctattcaagtgttacaataaatatttgtagataatagtcaaaaaaaaaaaaaaaaaaaaaaaaaaaaaaaaaaaaaaaaaaaaaaaaaaaaaaaaaaaaaaaaaaaaaagccgcaacaaaaaaaacaaaacacaagaagcaacagaccaaaaaagagcaaccaccacacacaagaacataaacagaaagtagcacggtcgagtcgggcgcaccaaaaaagacacgagaggcgggactaaaacaacccaaccaccagcacaaacagaggaccggaccagaacataccgtggcagcagaccacaccgaagaggggccccacaaaataggaagcagacaaacacagaaaaaaagtagcgacacggaggaaaacacacagaaaaggtagtaggaggacaacaccgcgacctaacgaggagaaaagcaacaccaaggaaagagacgagaacattacagcaaaacacaaaagc

SEQ ID NO: 314967 - DNA, 4055 bp, Homo sapiens
gcccctctccgcgcggccggcccccagtgcaggcggagccgcgccgcgctcccaccccggccgggagctaggagccagcggccagccccgcgcagcgcagcgcagcccgcagaagcccggtcagcgcacgtgcccgcgagacctgcaaacttgtgccaccggctctgcccgtccccggggagcccgaacgccccgcagccctcacccctcccgccagtctccagccatgggctgctttgaatgctgcatcaagtgtctgggaggagtcccctacgcctccctggtggccaccatcctctgcttctccggggtggccttattctgcggctgtgggcatgtggctctcgcaggcaccgtggcgattcttgagcaacacttctccaccaacgccagtgaccatgccttgctgagcgaggtgatacaactgatgcagtatgtcatctatggaattgcgtcctttttcttcttgtatgggatcattctgttggcagaaggcttttacaccacaagtgcagtgaaagaactgcacggtgagtttaaaacaaccgcttgtggccgatgcatcagtggaatgttcgttttcctcacctatgtgcttggagtggcctggctgggtgtgtttggtttctcagcggtgcccgtgtttatgttctacaacatatggtcaacttgtgaagtcatcaagtcaccgcagaccaacgggaccacgggtgtggagcagatctgtgtggatatccgacaatacggtatcattccttggaatgctttccccggaaaaatatgtggctctgccctggagaacatctgcaacacaaacgagttctacatgtcctatcacctgttcattgtggcctgtgcaggagctggtgccaccgtcattgccctgctgatctacatgatggctactacatataactatgcggttttgaagtttaagagtcgggaagattgctgcactaaattctaaattgcataaggagttttagagagctatgctctgtagcatgaaatatcactgacactccagactaaagcagagtctaggtttctgcaattttgttacagtaatttgtaaatagctttagtaaactcaccttgcatggtagattaataagatgacttactgtacatgaattacacaataatgagatctggtggctatttccacattttgaaaaggattcagttatttactgacagtggtgagcatcctttttaaaataatgttctcatacttaaacattagagagcagtatctttaaatgaattattaacactttggaatacttacattttctgttatttttgattgcctgataaccagtttcaatgatgaaaatgaaaacaagtgctgaagatgaaatggaagagaaccgttttaatctggattttgttttgtcacacctggaaaatactttgcaaatatgttctaaattgaaaacaatttttttatgatcacatggttcactaccaaatgaccctcaaataagccagatgaaaatttgaagaaaaaggtcacccagttctctggaaaaaaaaaaaaaaaaaaaaaaaaaaaggatttatatgtgggtagttttttttttggtacaacacaatcattctgttagagcccacaaaattggtaaccttaaattgtgtgttttggtaagtaataactaactgtttcctcatagctagttctcaagctgcatgtaagattttaacgggaagagaaaataggcctggacctgaaggtctcaaatatgttgagaagaaagtatgaactataaggaacttgagatgtagatttattttgcaggaaatacgaggaaaataggaaagaagtgtttgccgcatcaagtgtaaagaatgatactgaggatttttacattttatgaaatgaaataatggcatttacaaaatgaaaaatgtagtttcacaactaagttttgttaacagagactgcatgctttgcttatagttcttaattttggttttgacattcatttaattttttccatgttaaatatgtagtttaattatttactcaaaataaacattgttcatgcttttaggcctttgggggaattgatttttatccacaggtagaaaatggtctttgcacacactacacttatttcaaatatacaatgtgctcccgaactttcgcattagtctttaaaattactctcaaaatggtattaaaaaaaaaaaaaaaagcaccctctcgtatttcattttggctttttcttaacaataccttgggccatttttttccagttcactatgttggtatactaacttttcttcagccttttaatgcgaagccaactagtagagcatgctttcaggatctgacagctctgctagtagagcgagtatttattaatacagaattaaccttcgcccctttaaagtcaagtctgtctaatctaactagcgcctcgctttgccttctcacaatgctcactagccatcatgctcacccttctcttccagatccacttcctcatgatactgtcttctaactgggcttacttaaaggatgcgagcaaaatgcaggcttaccaggatatcaaagcaaaggaagaacaggaactgcaagatatccagtctcggtcaaaagaacaactcaattcttacacataaatgtttgccagagtgtttcggccgacgtatttacagctctgacaaatcatcagacagctgctctgcagtacagatgtgtatcccaccaaactaatgtagatgtacaaacacttcactgtctgtctcaagctgctgggatgtatctctaggaaaaccttccagtgggtaaatctttttctttagaacaaatattggaggtttcatgttagccattttaaaaggcaacactttgacaaaatgatcgttcatactttgggaatttgtggcatgttcacatttattgctagggcaattctaccaagacactcaatggaatatgtcacactccttaatagggacctgtgactccttaataaggacctgtgacatgcccagcatcaagggataagaccgtaaattcacatatatgccatctgtcctcaagtgttatctacataggaaataaaatggaattgatgtaaagttccatttctgacagctgacatttattaaactttggatcaaagataatgtgattcttatgattgatttctcaaactagcttttccctcccaagtccaggacccattaatttcctgagccaatcagaaatatatttttcaataatgctaaaattagctacaattctgctgaccctactattaaagaatctggatgctggactcactgacaagctttccagaagcaattttataacagatttcattttaacaaaatactgatccaattttcattattcttgagaaatgtcagctttgccttaatgagtatttgctttaaatttctaagaatttatatcataactagagacccaaatatctttcacagaattttgttccataaatgtttttcttaattattaagaagtgttaccttattaaaatgaccaccattctaaaccatttttcagtggtctggatacgaagtttacagtttcataccaactatctaaaacctaattgcaaattgaccacagacctctaacctcctacttttatagacttgaatacttaagtaatttaaattagggttggtatttcatttttttcttatctaaatcttagtttcctggaataataaagtttgatgttcagcaagagaactgcttgagtttaagccattttcaaaagaaacttgccttttacattattgtgttccagaacattaagtgactgtaggtactgggtattagtgatggtaaactttgtgttgctctttatgaaatgatccatataactgttgggtgcatcagtgcttttcaaaggggctgcttactatagggttaactatgtatattcattgttaagagttaacttgtggtttggctgtttcctggattttataacatacatgtgcagaaatgtattcaaatgaaaggaagcatacctttatcaagatgctattaaaattgaacatcaagtata

SEQ ID NO: 314968 - DNA, 4698 bp, Homo sapiens
agcggggctagaagaaatgaggtggggagaaagagagagagagagagagatcgagattgagatcttaagaaagagagcaaggaggaagagcccgactgtaggcaccaccgggcgccgaatggctgttttctaactgggatcctcggtgacgtatggctgcctgccccttggcagctgtctttatggaccagtaggcagagcgaaattgacgctgacaagacttttgcatcttggaagggactgtaatctactgtagtgaagaacagagcctctcaatcagacgggtgtaaataagagacggaggggagtccagaagaaaaggaagaggaggaaaaacaagtgtgtgttggggggaacagggggaaaagcatttttggtggatggtatgaagccagccatggaaactgcagccgaggaaaatactgaacaaagccaagagagaaaaggctgctttgaatgctgcatcaagtgtctgggaggagtcccctacgcctccctggtggccaccatcctctgcttctccggggtggccttattctgcggctgtgggcatgtggctctcgcaggcaccgtggcgattcttgagcaacacttctccaccaacgccagtgaccatgccttgctgagcgaggtgatacaactgatgcagtatgtcatctatggaattgcgtcctttttcttcttgtatgggatcattctgttggcagaaggcttttacaccacaagtgcagtgaaagaactgcacggtgagtttaaaacaaccgcttgtggccgatgcatcagtggaatgttcgttttcctcacctatgtgcttggagtggcctggctgggtgtgtttggtttctcagcggtgcccgtgtttatgttctacaacatatggtcaacttgtgaagtcatcaagtcaccgcagaccaacgggaccacgggtgtggagcagatctgtgtggatatccgacaatacggtatcattccttggaatgctttccccggaaaaatatgtggctctgccctggagaacatctgcaacacaaacgagttctacatgtcctatcacctgttcattgtggcctgtgcaggagctggtgccaccgtcattgccctgctgatctacatgatggctactacatataactatgcggttttgaagtttaagagtcgggaagattgctgcactaaattctaaattgcataaggagttttagagagctatgctctgtagcatgaaatatcactgacactccagactaaagcagagtctaggtttctgcaattttgttacagtaatttgtaaatagctttagtaaactcaccttgcatggtagattaataagatgacttactgtacatgaattacacaataatgagatctggtggctatttccacattttgaaaaggattcagttatttactgacagtggtgagcatcctttttaaaataatgttctcatacttaaacattagagagcagtatctttaaatgaattattaacactttggaatacttacattttctgttatttttgattgcctgataaccagtttcaatgatgaaaatgaaaacaagtgctgaagatgaaatggaagagaaccgttttaatctggattttgttttgtcacacctggaaaatactttgcaaatatgttctaaattgaaaacaatttttttatgatcacatggttcactaccaaatgaccctcaaataagccagatgaaaatttgaagaaaaaggtcacccagttctctggaaaaaaaaaaaaaaaaaaaaaaaaaaaggatttatatgtgggtagttttttttttggtacaacacaatcattctgttagagcccacaaaattggtaaccttaaattgtgtgttttggtaagtaataactaactgtttcctcatagctagttctcaagctgcatgtaagattttaacgggaagagaaaataggcctggacctgaaggtctcaaatatgttgagaagaaagtatgaactataaggaacttgagatgtagatttattttgcaggaaatacgaggaaaataggaaagaagtgtttgccgcatcaagtgtaaagaatgatactgaggatttttacattttatgaaatgaaataatggcatttacaaaatgaaaaatgtagtttcacaactaagttttgttaacagagactgcatgctttgcttatagttcttaattttggttttgacattcatttaattttttccatgttaaatatgtagtttaattatttactcaaaataaacattgttcatgcttttaggcctttgggggaattgatttttatccacaggtagaaaatggtctttgcacacactacacttatttcaaatatacaatgtgctcccgaactttcgcattagtctttaaaattactctcaaaatggtattaaaaaaaaaaaaaaaagcaccctctcgtatttcattttggctttttcttaacaataccttgggccatttttttccagttcactatgttggtatactaacttttcttcagccttttaatgcgaagccaactagtagagcatgctttcaggatctgacagctctgctagtagagcgagtatttattaatacagaattaaccttcgcccctttaaagtcaagtctgtctaatctaactagcgcctcgctttgccttctcacaatgctcactagccatcatgctcacccttctcttccagatccacttcctcatgatactgtcttctaactgggcttacttaaaggatgcgagcaaaatgcaggcttaccaggatatcaaagcaaaggaagaacaggaactgcaagatatccagtctcggtcaaaagaacaactcaattcttacacataaatgtttgccagagtgtttcggccgacgtatttacagctctgacaaatcatcagacagctgctctgcagtacagatgtgtatcccaccaaactaatgtagatgtacaaacacttcactgtctgtctcaagctgctgggatgtatctctaggaaaaccttccagtgggtaaatctttttctttagaacaaatattggaggtttcatgttagccattttaaaaggcaacactttgacaaaatgatcgttcatactttgggaatttgtggcatgttcacatttattgctagggcaattctaccaagacactcaatggaatatgtcacactccttaatagggacctgtgactccttaataaggacctgtgacatgcccagcatcaagggataagaccgtaaattcacatatatgccatctgtcctcaagtgttatctacataggaaataaaatggaattgatgtaaagttccatttctgacagctgacatttattaaactttggatcaaagataatgtgattcttatgattgatttctcaaactagcttttccctcccaagtccaggacccattaatttcctgagccaatcagaaatatatttttcaataatgctaaaattagctacaattctgctgaccctactattaaagaatctggatgctggactcactgacaagctttccagaagcaattttataacagatttcattttaacaaaatactgatccaattttcattattcttgagaaatgtcagctttgccttaatgagtatttgctttaaatttctaagaatttatatcataactagagacccaaatatctttcacagaattttgttccataaatgtttttcttaattattaagaagtgttaccttattaaaatgaccaccattctaaaccatttttcagtggtctggatacgaagtttacagtttcataccaactatctaaaacctaattgcaaattgaccacagacctctaacctcctacttttatagacttgaatacttaagtaatttaaattagggttggtatttcatttttttcttatctaaatcttagtttcctggaataataaagtttgatgttcagcaagagaactgcttgagtttaagccattttcaaaagaaacttgccttttacattattgtgttccagaacattaagtgactgtaggtactgggtattagtgatggtaaactttgtgttgctctttatgaaatgatccatataactgttgggtgcatcagtgcttttcaaaggggctgcttactatagggttaactatgtatattcattgttaagagttaacttgtggtttggctgtttcctggattttataacatacatgtgcagaaatgtattcaaatgaaaggaagcatacctttatcaagatgctattaaaattgaacatcaagtataatatttcatttggattctcttttttggttaatgcctaaaaatgcctatttgggattttttttttttttaaattaagagaagctctcttctgtgtagaacagttgttccaaaatagcttagtgttttgttttcctgttgcatgacagatttaactattctttccagcagtggaggtgctgtcagagtccagtgttctagaagaggcagtgtctaaagcctaattttacttttctaattctggtagctattaccaggaatttttgaaagttttgtttaagtagtctaatattttttatgtaaagagcattaaattttgctatgtataaatttttgtaacctaacagtgaatcaatattttctatcagtgccaagggcttcctgtagttctattcaagtgttacaataaatatttgtagataatagtcaa

SEQ ID NO: 314969 - DNA, 2887 bp, Homo sapiens
gcccctctccgcgcggccggcccccagtgcaggcggagccgcgccgcgctcccaccccggccgggagctaggagccagcggccagccccgcgcagcgcagcgcagcccgcagaagcccggtcagcgcacgtgcccgcgagacctgcaaacttgtgccaccggctctgcccgtccccggggagcccgaacgccccgcagccctcacccctcccgccagtctccagccatgggctgctttgaatgctgcatcaagtgtctgggaggagtcccctacgcctccctggtggccaccatcctctgcttctccggggtggccttattctgcggctgtgggcatgtggctctcgcaggcaccgtggcgattcttgagcaacacttctccaccaacgccagtgaccatgccttgctgagcgaggtgatacaactgatgcagtatgtcatctatggaattgcgtcctttttcttcttgtatgggatcattctgttggcagaaggcttttacaccacaagtgcagtgaaagaactgcacggtgagtttaaaacaaccgcttgtggccgatgcatcagtggaatgttcgttttcctcacctatgtgcttggagtggcctggctgggtgtgtttggtttctcagcggtgcccgtgtttatgttctacaacatatggtcaacttgtgaagtcatcaagtcaccgcagaccaacgggaccacgggtgtggagcagatctgtgtggatatccgacaatacggtatcattccttggaatgctttccccggaaaaatatgtggctctgccctggagaacatctgcaacacaaacgagttctacatgtcctatcacctgttcattgtggcctgtgcaggagctggtgccaccgtcattgccctgatccacttcctcatgatactgtcttctaactgggcttacttaaaggatgcgagcaaaatgcaggcttaccaggatatcaaagcaaaggaagaacaggaactgcaagatatccagtctcggtcaaaagaacaactcaattcttacacataaatgtttgccagagtgtttcggccgacgtatttacagctctgacaaatcatcagacagctgctctgcagtacagatgtgtatcccaccaaactaatgtagatgtacaaacacttcactgtctgtctcaagctgctgggatgtatctctaggaaaaccttccagtgggtaaatctttttctttagaacaaatattggaggtttcatgttagccattttaaaaggcaacactttgacaaaatgatcgttcatactttgggaatttgtggcatgttcacatttattgctagggcaattctaccaagacactcaatggaatatgtcacactccttaatagggacctgtgactccttaataaggacctgtgacatgcccagcatcaagggataagaccgtaaattcacatatatgccatctgtcctcaagtgttatctacataggaaataaaatggaattgatgtaaagttccatttctgacagctgacatttattaaactttggatcaaagataatgtgattcttatgattgatttctcaaactagcttttccctcccaagtccaggacccattaatttcctgagccaatcagaaatatatttttcaataatgctaaaattagctacaattctgctgaccctactattaaagaatctggatgctggactcactgacaagctttccagaagcaattttataacagatttcattttaacaaaatactgatccaattttcattattcttgagaaatgtcagctttgccttaatgagtatttgctttaaatttctaagaatttatatcataactagagacccaaatatctttcacagaattttgttccataaatgtttttcttaattattaagaagtgttaccttattaaaatgaccaccattctaaaccatttttcagtggtctggatacgaagtttacagtttcataccaactatctaaaacctaattgcaaattgaccacagacctctaacctcctacttttatagacttgaatacttaagtaatttaaattagggttggtatttcatttttttcttatctaaatcttagtttcctggaataataaagtttgatgttcagcaagagaactgcttgagtttaagccattttcaaaagaaacttgccttttacattattgtgttccagaacattaagtgactgtaggtactgggtattagtgatggtaaactttgtgttgctctttatgaaatgatccatataactgttgggtgcatcagtgcttttcaaaggggctgcttactatagggttaactatgtatattcattgttaagagttaacttgtggtttggctgtttcctggattttataacatacatgtgcagaaatgtattcaaatgaaaggaagcatacctttatcaagatgctattaaaattgaacatcaagtataatatttcatttggattctcttttttggttaatgcctaaaaatgcctatttgggattttttttttttttaaattaagagaagctctcttctgtgtagaacagttgttccaaaatagcttagtgttttgttttcctgttgcatgacagatttaactattctttccagcagtggaggtgctgtcagagtccagtgttctagaagaggcagtgtctaaagcctaattttacttttctaattctggtagctattaccaggaatttttgaaagttttgtttaagtagtctaatattttttatgtaaagagcattaaattttgctatgtataaatttttgtaacctaacagtgaatcaatattttctatcagtgccaagggcttcctgtagttctattcaagtgttacaataaatatttgtagataatagtcaa

SEQ ID NO: 314970 - DNA, 4880 bp, Homo sapiens
agcggggctagaagaaatgaggtggggagaaagagagagagagagagagatcgagattgagatcttaagaaagagagcaaggaggaagagcccggtggggagcaggtccttctcccccacccccctacccccaactcccactggagccgcattgagactgtaggcaccaccgggcgccgaatggctgttttctaactgggatcctcggtgacgtatggctgcctgccccttggcagctgtctttatggaccagtaggcagagcgaaattgacgctgacaagacttttgcatcttggaagggactgtaatctactgtagtgaagaacagagcctctcaatcagacgggtgtaaataagagacggaggggagtccagaagaaaaggaagaggaggaaaaacaagtgtgtgttggggggaacagggggaaaagcatttttggtggatggtatgaagccagccatggaaactgcagccgaggaaaatactgaacaaagccaagagagaaaagtgaacagcagagctgaaatggaaattggcaggtaccactggatgtacccaggctcaaagaaccaccagtaccatcccgtgccaaccctgggggacagggctagccccttgagcagtccaggctgctttgaatgctgcatcaagtgtctgggaggagtcccctacgcctccctggtggccaccatcctctgcttctccggggtggccttattctgcggctgtgggcatgtggctctcgcaggcaccgtggcgattcttgagcaacacttctccaccaacgccagtgaccatgccttgctgagcgaggtgatacaactgatgcagtatgtcatctatggaattgcgtcctttttcttcttgtatgggatcattctgttggcagaaggcttttacaccacaagtgcagtgaaagaactgcacggtgagtttaaaacaaccgcttgtggccgatgcatcagtggaatgttcgttttcctcacctatgtgcttggagtggcctggctgggtgtgtttggtttctcagcggtgcccgtgtttatgttctacaacatatggtcaacttgtgaagtcatcaagtcaccgcagaccaacgggaccacgggtgtggagcagatctgtgtggatatccgacaatacggtatcattccttggaatgctttccccggaaaaatatgtggctctgccctggagaacatctgcaacacaaacgagttctacatgtcctatcacctgttcattgtggcctgtgcaggagctggtgccaccgtcattgccctgctgatctacatgatggctactacatataactatgcggttttgaagtttaagagtcgggaagattgctgcactaaattctaaattgcataaggagttttagagagctatgctctgtagcatgaaatatcactgacactccagactaaagcagagtctaggtttctgcaattttgttacagtaatttgtaaatagctttagtaaactcaccttgcatggtagattaataagatgacttactgtacatgaattacacaataatgagatctggtggctatttccacattttgaaaaggattcagttatttactgacagtggtgagcatcctttttaaaataatgttctcatacttaaacattagagagcagtatctttaaatgaattattaacactttggaatacttacattttctgttatttttgattgcctgataaccagtttcaatgatgaaaatgaaaacaagtgctgaagatgaaatggaagagaaccgttttaatctggattttgttttgtcacacctggaaaatactttgcaaatatgttctaaattgaaaacaatttttttatgatcacatggttcactaccaaatgaccctcaaataagccagatgaaaatttgaagaaaaaggtcacccagttctctggaaaaaaaaaaaaaaaaaaaaaaaaaaaggatttatatgtgggtagttttttttttggtacaacacaatcattctgttagagcccacaaaattggtaaccttaaattgtgtgttttggtaagtaataactaactgtttcctcatagctagttctcaagctgcatgtaagattttaacgggaagagaaaataggcctggacctgaaggtctcaaatatgttgagaagaaagtatgaactataaggaacttgagatgtagatttattttgcaggaaatacgaggaaaataggaaagaagtgtttgccgcatcaagtgtaaagaatgatactgaggatttttacattttatgaaatgaaataatggcatttacaaaatgaaaaatgtagtttcacaactaagttttgttaacagagactgcatgctttgcttatagttcttaattttggttttgacattcatttaattttttccatgttaaatatgtagtttaattatttactcaaaataaacattgttcatgcttttaggcctttgggggaattgatttttatccacaggtagaaaatggtctttgcacacactacacttatttcaaatatacaatgtgctcccgaactttcgcattagtctttaaaattactctcaaaatggtattaaaaaaaaaaaaaaaagcaccctctcgtatttcattttggctttttcttaacaataccttgggccatttttttccagttcactatgttggtatactaacttttcttcagccttttaatgcgaagccaactagtagagcatgctttcaggatctgacagctctgctagtagagcgagtatttattaatacagaattaaccttcgcccctttaaagtcaagtctgtctaatctaactagcgcctcgctttgccttctcacaatgctcactagccatcatgctcacccttctcttccagatccacttcctcatgatactgtcttctaactgggcttacttaaaggatgcgagcaaaatgcaggcttaccaggatatcaaagcaaaggaagaacaggaactgcaagatatccagtctcggtcaaaagaacaactcaattcttacacataaatgtttgccagagtgtttcggccgacgtatttacagctctgacaaatcatcagacagctgctctgcagtacagatgtgtatcccaccaaactaatgtagatgtacaaacacttcactgtctgtctcaagctgctgggatgtatctctaggaaaaccttccagtgggtaaatctttttctttagaacaaatattggaggtttcatgttagccattttaaaaggcaacactttgacaaaatgatcgttcatactttgggaatttgtggcatgttcacatttattgctagggcaattctaccaagacactcaatggaatatgtcacactccttaatagggacctgtgactccttaataaggacctgtgacatgcccagcatcaagggataagaccgtaaattcacatatatgccatctgtcctcaagtgttatctacataggaaataaaatggaattgatgtaaagttccatttctgacagctgacatttattaaactttggatcaaagataatgtgattcttatgattgatttctcaaactagcttttccctcccaagtccaggacccattaatttcctgagccaatcagaaatatatttttcaataatgctaaaattagctacaattctgctgaccctactattaaagaatctggatgctggactcactgacaagctttccagaagcaattttataacagatttcattttaacaaaatactgatccaattttcattattcttgagaaatgtcagctttgccttaatgagtatttgctttaaatttctaagaatttatatcataactagagacccaaatatctttcacagaattttgttccataaatgtttttcttaattattaagaagtgttaccttattaaaatgaccaccattctaaaccatttttcagtggtctggatacgaagtttacagtttcataccaactatctaaaacctaattgcaaattgaccacagacctctaacctcctacttttatagacttgaatacttaagtaatttaaattagggttggtatttcatttttttcttatctaaatcttagtttcctggaataataaagtttgatgttcagcaagagaactgcttgagtttaagccattttcaaaagaaacttgccttttacattattgtgttccagaacattaagtgactgtaggtactgggtattagtgatggtaaactttgtgttgctctttatgaaatgatccatataactgttgggtgcatcagtgcttttcaaaggggctgcttactatagggttaactatgtatattcattgttaagagttaacttgtggtttggctgtttcctggattttataacatacatgtgcagaaatgtattcaaatgaaaggaagcatacctttatcaagatgctattaaaattgaacatcaagtataatatttcatttggattctcttttttggttaatgcctaaaaatgcctatttgggattttttttttttttaaattaagagaagctctcttctgtgtagaacagttgttccaaaatagcttagtgttttgttttcctgttgcatgacagatttaactattctttccagcagtggaggtgctgtcagagtccagtgttctagaagaggcagtgtctaaagcctaattttacttttctaattctggtagctattaccaggaatttttgaaagttttgtttaagtagtctaatattttttatgtaaagagcattaaattttgctatgtataaatttttgtaacctaacagtgaatcaatattttctatcagtgccaagggcttcctgtagttctattcaagtgttacaataaatatttgtagataatagtcaa

SEQ ID NO: 314971 - DNA, 4372 bp, Homo sapiens
cgcgcccttccgagggtcccgcccctcccccgctcaggtggcgcctcctcggccacctctgcgacgaagccgggacgctggaggtgggaggggcgcggcgcaggtgtccggaacgcccaggctgctttgaatgctgcatcaagtgtctgggaggagtcccctacgcctccctggtggccaccatcctctgcttctccggggtggccttattctgcggctgtgggcatgtggctctcgcaggcaccgtggcgattcttgagcaacacttctccaccaacgccagtgaccatgccttgctgagcgaggtgatacaactgatgcagtatgtcatctatggaattgcgtcctttttcttcttgtatgggatcattctgttggcagaaggcttttacaccacaagtgcagtgaaagaactgcacggtgagtttaaaacaaccgcttgtggccgatgcatcagtggaatgttcgttttcctcacctatgtgcttggagtggcctggctgggtgtgtttggtttctcagcggtgcccgtgtttatgttctacaacatatggtcaacttgtgaagtcatcaagtcaccgcagaccaacgggaccacgggtgtggagcagatctgtgtggatatccgacaatacggtatcattccttggaatgctttccccggaaaaatatgtggctctgccctggagaacatctgcaacacaaacgagttctacatgtcctatcacctgttcattgtggcctgtgcaggagctggtgccaccgtcattgccctgctgatctacatgatggctactacatataactatgcggttttgaagtttaagagtcgggaagattgctgcactaaattctaaattgcataaggagttttagagagctatgctctgtagcatgaaatatcactgacactccagactaaagcagagtctaggtttctgcaattttgttacagtaatttgtaaatagctttagtaaactcaccttgcatggtagattaataagatgacttactgtacatgaattacacaataatgagatctggtggctatttccacattttgaaaaggattcagttatttactgacagtggtgagcatcctttttaaaataatgttctcatacttaaacattagagagcagtatctttaaatgaattattaacactttggaatacttacattttctgttatttttgattgcctgataaccagtttcaatgatgaaaatgaaaacaagtgctgaagatgaaatggaagagaaccgttttaatctggattttgttttgtcacacctggaaaatactttgcaaatatgttctaaattgaaaacaatttttttatgatcacatggttcactaccaaatgaccctcaaataagccagatgaaaatttgaagaaaaaggtcacccagttctctggaaaaaaaaaaaaaaaaaaaaaaaaaaaggatttatatgtgggtagttttttttttggtacaacacaatcattctgttagagcccacaaaattggtaaccttaaattgtgtgttttggtaagtaataactaactgtttcctcatagctagttctcaagctgcatgtaagattttaacgggaagagaaaataggcctggacctgaaggtctcaaatatgttgagaagaaagtatgaactataaggaacttgagatgtagatttattttgcaggaaatacgaggaaaataggaaagaagtgtttgccgcatcaagtgtaaagaatgatactgaggatttttacattttatgaaatgaaataatggcatttacaaaatgaaaaatgtagtttcacaactaagttttgttaacagagactgcatgctttgcttatagttcttaattttggttttgacattcatttaattttttccatgttaaatatgtagtttaattatttactcaaaataaacattgttcatgcttttaggcctttgggggaattgatttttatccacaggtagaaaatggtctttgcacacactacacttatttcaaatatacaatgtgctcccgaactttcgcattagtctttaaaattactctcaaaatggtattaaaaaaaaaaaaaaaagcaccctctcgtatttcattttggctttttcttaacaataccttgggccatttttttccagttcactatgttggtatactaacttttcttcagccttttaatgcgaagccaactagtagagcatgctttcaggatctgacagctctgctagtagagcgagtatttattaatacagaattaaccttcgcccctttaaagtcaagtctgtctaatctaactagcgcctcgctttgccttctcacaatgctcactagccatcatgctcacccttctcttccagatccacttcctcatgatactgtcttctaactgggcttacttaaaggatgcgagcaaaatgcaggcttaccaggatatcaaagcaaaggaagaacaggaactgcaagatatccagtctcggtcaaaagaacaactcaattcttacacataaatgtttgccagagtgtttcggccgacgtatttacagctctgacaaatcatcagacagctgctctgcagtacagatgtgtatcccaccaaactaatgtagatgtacaaacacttcactgtctgtctcaagctgctgggatgtatctctaggaaaaccttccagtgggtaaatctttttctttagaacaaatattggaggtttcatgttagccattttaaaaggcaacactttgacaaaatgatcgttcatactttgggaatttgtggcatgttcacatttattgctagggcaattctaccaagacactcaatggaatatgtcacactccttaatagggacctgtgactccttaataaggacctgtgacatgcccagcatcaagggataagaccgtaaattcacatatatgccatctgtcctcaagtgttatctacataggaaataaaatggaattgatgtaaagttccatttctgacagctgacatttattaaactttggatcaaagataatgtgattcttatgattgatttctcaaactagcttttccctcccaagtccaggacccattaatttcctgagccaatcagaaatatatttttcaataatgctaaaattagctacaattctgctgaccctactattaaagaatctggatgctggactcactgacaagctttccagaagcaattttataacagatttcattttaacaaaatactgatccaattttcattattcttgagaaatgtcagctttgccttaatgagtatttgctttaaatttctaagaatttatatcataactagagacccaaatatctttcacagaattttgttccataaatgtttttcttaattattaagaagtgttaccttattaaaatgaccaccattctaaaccatttttcagtggtctggatacgaagtttacagtttcataccaactatctaaaacctaattgcaaattgaccacagacctctaacctcctacttttatagacttgaatacttaagtaatttaaattagggttggtatttcatttttttcttatctaaatcttagtttcctggaataataaagtttgatgttcagcaagagaactgcttgagtttaagccattttcaaaagaaacttgccttttacattattgtgttccagaacattaagtgactgtaggtactgggtattagtgatggtaaactttgtgttgctctttatgaaatgatccatataactgttgggtgcatcagtgcttttcaaaggggctgcttactatagggttaactatgtatattcattgttaagagttaacttgtggtttggctgtttcctggattttataacatacatgtgcagaaatgtattcaaatgaaaggaagcatacctttatcaagatgctattaaaattgaacatcaagtataatatttcatttggattctcttttttggttaatgcctaaaaatgcctatttgggattttttttttttttaaattaagagaagctctcttctgtgtagaacagttgttccaaaatagcttagtgttttgttttcctgttgcatgacagatttaactattctttccagcagtggaggtgctgtcagagtccagtgttctagaagaggcagtgtctaaagcctaattttacttttctaattctggtagctattaccaggaatttttgaaagttttgtttaagtagtctaatattttttatgtaaagagcattaaattttgctatgtataaatttttgtaacctaacagtgaatcaatattttctatcagtgccaagggcttcctgtagttctattcaagtgttacaataaatatttgtagataatagtcaa

SEQ ID NO: 314972 - DNA, 1472 bp, Homo sapiens
gcccctctccgcgcggccggcccccagtgcaggcggagccgcgccgcgctcccaccccggccgggagctaggagccagcggccagccccgcgcagcgcagcgcagcccgcagaagcccggtcagcgcacgtgcccgcgagacctgcaaacttgtgccaccggctctgcccgtccccggggagcccgaacgccccgcagccctcacccctcccgccagtctccagccatgggctgctttgaatgctgcatcaagtgtctgggaggagtcccctacgcctccctggtggccaccatcctctgcttctccggggtggccttattctgcggctgtgggcatgtggctctcgcaggcaccgtggcgattcttgagcaacacttctccaccaacgccagtgaccatgccttgctgagcgaggtgatacaactgatgcagtatgtcatctatggaattgcgtcctttttcttcttgtatgggatcattctgttggcagaaggcttttacaccacaagtgcagtgaaagaactgcacggtgagtttaaaacaaccgcttgtggccgatgcatcagtggaatgttcgttttcctcacctatgtgcttggagtggcctggctgggtgtgtttggtttctcagcggtgcccgtgtttatgttctacaacatatggtcaacttgtgaagtcatcaagtcaccgcagaccaacgggaccacgggtgtggagcagatctgtgtggatatccgacaatacggtatcattccttggaatgctttccccggaaaaatatgtggctctgccctggagaacatctgcaacacaaacgagttctacatgtcctatcacctgttcattgtggcctgtgcaggagctggtgccaccgtcattgccctgctgatctacatgatggctactacatataactatgcggttttgaagtttaagagtcgggaagattgctgcactaaattctaaattgcataaggagttttagagagctatgctctgtagcatgaaatatcactgacactccagactaaagcagagtctaggtttctgcaattttgttacagtaatttgtaaatagctttagtaaactcaccttgcatggtagattaataagatgacttactgtacatgaattacacaataatgagatctggtggctatttccacattttgaaaaggattcagttatttactgacagtggtgagcatcctttttaaaataatgttctcatacttaaacattagagagcagtatctttaaatgaattattaacactttggaatacttacattttctgttatttttgattgcctgataaccagtttcaatgatgaaaatgaaaacaagtgctgaagatgaaatggaagagaaccgttttaatctggattttgttttgtcacacctggaaaatactttgcaatttagaacatatttgcagagtattttccaggtgtgacaaaatcgtctgac

SEQ ID NO: 314973 - DNA, 4199 bp, Homo sapiens
gcccctctccgcgcggccggcccccagtgcaggcggagccgcgccgcgctcccaccccggccgggagctaggagccagcggccagccccgcgcagcgcagcgcagcccgcagaagcccggtcagcgcacgtgcccgcgagacctgcaaacttgtgccaccggctctgcccgtccccggggagcccgaacgccccgcagccctcacccctcccgccagtctccagccatgggctgctttgaatgctgcatcaagtgtctgggaggagtcccctacgcctccctggtggccaccatcctctgcttctccggggtggccttattctgcggctgtgggcatgtggctctcgcaggcaccgtggcgattcttgagcaacaatatggtcaacttgtgaagtcatcaagtcaccgcagaccaacgggaccacgggtgtggagcagatctgtgtggatatccgacaatacggtatcattccttggaatgctttccccggaaaaatatgtggctctgccctggagaacatctgcaacacaaacgagttctacatgtcctatcacctgttcattgtggcctgtgcaggagctggtgccaccgtcattgccctgctgatctacatgatggctactacatataactatgcggttttgaagtttaagagtcgggaagattgctgcactaaattctaaattgcataaggagttttagagagctatgctctgtagcatgaaatatcactgacactccagactaaagcagagtctaggtttctgcaattttgttacagtaatttgtaaatagctttagtaaactcaccttgcatggtagattaataagatgacttactgtacatgaattacacaataatgagatctggtggctatttccacattttgaaaaggattcagttatttactgacagtggtgagcatcctttttaaaataatgttctcatacttaaacattagagagcagtatctttaaatgaattattaacactttggaatacttacattttctgttatttttgattgcctgataaccagtttcaatgatgaaaatgaaaacaagtgctgaagatgaaatggaagagaaccgttttaatctggattttgttttgtcacacctggaaaatactttgcaaatatgttctaaattgaaaacaatttttttatgatcacatggttcactaccaaatgaccctcaaataagccagatgaaaatttgaagaaaaaggtcacccagttctctggaaaaaaaaaaaaaaaaaaaaaaaaaaaggatttatatgtgggtagttttttttttggtacaacacaatcattctgttagagcccacaaaattggtaaccttaaattgtgtgttttggtaagtaataactaactgtttcctcatagctagttctcaagctgcatgtaagattttaacgggaagagaaaataggcctggacctgaaggtctcaaatatgttgagaagaaagtatgaactataaggaacttgagatgtagatttattttgcaggaaatacgaggaaaataggaaagaagtgtttgccgcatcaagtgtaaagaatgatactgaggatttttacattttatgaaatgaaataatggcatttacaaaatgaaaaatgtagtttcacaactaagttttgttaacagagactgcatgctttgcttatagttcttaattttggttttgacattcatttaattttttccatgttaaatatgtagtttaattatttactcaaaataaacattgttcatgcttttaggcctttgggggaattgatttttatccacaggtagaaaatggtctttgcacacactacacttatttcaaatatacaatgtgctcccgaactttcgcattagtctttaaaattactctcaaaatggtattaaaaaaaaaaaaaaaagcaccctctcgtatttcattttggctttttcttaacaataccttgggccatttttttccagttcactatgttggtatactaacttttcttcagccttttaatgcgaagccaactagtagagcatgctttcaggatctgacagctctgctagtagagcgagtatttattaatacagaattaaccttcgcccctttaaagtcaagtctgtctaatctaactagcgcctcgctttgccttctcacaatgctcactagccatcatgctcacccttctcttccagatccacttcctcatgatactgtcttctaactgggcttacttaaaggatgcgagcaaaatgcaggcttaccaggatatcaaagcaaaggaagaacaggaactgcaagatatccagtctcggtcaaaagaacaactcaattcttacacataaatgtttgccagagtgtttcggccgacgtatttacagctctgacaaatcatcagacagctgctctgcagtacagatgtgtatcccaccaaactaatgtagatgtacaaacacttcactgtctgtctcaagctgctgggatgtatctctaggaaaaccttccagtgggtaaatctttttctttagaacaaatattggaggtttcatgttagccattttaaaaggcaacactttgacaaaatgatcgttcatactttgggaatttgtggcatgttcacatttattgctagggcaattctaccaagacactcaatggaatatgtcacactccttaatagggacctgtgactccttaataaggacctgtgacatgcccagcatcaagggataagaccgtaaattcacatatatgccatctgtcctcaagtgttatctacataggaaataaaatggaattgatgtaaagttccatttctgacagctgacatttattaaactttggatcaaagataatgtgattcttatgattgatttctcaaactagcttttccctcccaagtccaggacccattaatttcctgagccaatcagaaatatatttttcaataatgctaaaattagctacaattctgctgaccctactattaaagaatctggatgctggactcactgacaagctttccagaagcaattttataacagatttcattttaacaaaatactgatccaattttcattattcttgagaaatgtcagctttgccttaatgagtatttgctttaaatttctaagaatttatatcataactagagacccaaatatctttcacagaattttgttccataaatgtttttcttaattattaagaagtgttaccttattaaaatgaccaccattctaaaccatttttcagtggtctggatacgaagtttacagtttcataccaactatctaaaacctaattgcaaattgaccacagacctctaacctcctacttttatagacttgaatacttaagtaatttaaattagggttggtatttcatttttttcttatctaaatcttagtttcctggaataataaagtttgatgttcagcaagagaactgcttgagtttaagccattttcaaaagaaacttgccttttacattattgtgttccagaacattaagtgactgtaggtactgggtattagtgatggtaaactttgtgttgctctttatgaaatgatccatataactgttgggtgcatcagtgcttttcaaaggggctgcttactatagggttaactatgtatattcattgttaagagttaacttgtggtttggctgtttcctggattttataacatacatgtgcagaaatgtattcaaatgaaaggaagcatacctttatcaagatgctattaaaattgaacatcaagtataatatttcatttggattctcttttttggttaatgcctaaaaatgcctatttgggattttttttttttttaaattaagagaagctctcttctgtgtagaacagttgttccaaaatagcttagtgttttgttttcctgttgcatgacagatttaactattctttccagcagtggaggtgctgtcagagtccagtgttctagaagaggcagtgtctaaagcctaattttacttttctaattctggtagctattaccaggaatttttgaaagttttgtttaagtagtctaatattttttatgtaaagagcattaaattttgctatgtataaatttttgtaacctaacagtgaatcaatattttctatcagtgccaagggcttcctgtagttctattcaagtgttacaataaatatttgtagataatagtcaa

SEQ ID NO: 314974 - DNA, 3612 bp, Homo sapiens
gacaaaggggttgcctaggcccaagaacagataagtggagcaataccaaactgggagcaagttaagaagtcgggaagattgctgcactaaattctaaattgcataaggagttttagagagctatgctctgtagcatgaaatatcactgacactccagactaaagcagagtctaggtttctgcaattttgttacagtaatttgtaaatagctttagtaaactcaccttgcatggtagattaataagatgacttactgtacatgaattacacaataatgagatctggtggctatttccacattttgaaaaggattcagttatttactgacagtggtgagcatcctttttaaaataatgttctcatacttaaacattagagagcagtatctttaaatgaattattaacactttggaatacttacattttctgttatttttgattgcctgataaccagtttcaatgatgaaaatgaaaacaagtgctgaagatgaaatggaagagaaccgttttaatctggattttgttttgtcacacctggaaaatactttgcaaatatgttctaaattgaaaacaatttttttatgatcacatggttcactaccaaatgaccctcaaataagccagatgaaaatttgaagaaaaaggtcacccagttctctggaaaaaaaaaaaaaaaaaaaaaaaaaaaggatttatatgtgggtagttttttttttggtacaacacaatcattctgttagagcccacaaaattggtaaccttaaattgtgtgttttggtaagtaataactaactgtttcctcatagctagttctcaagctgcatgtaagattttaacgggaagagaaaataggcctggacctgaaggtctcaaatatgttgagaagaaagtatgaactataaggaacttgagatgtagatttattttgcaggaaatacgaggaaaataggaaagaagtgtttgccgcatcaagtgtaaagaatgatactgaggatttttacattttatgaaatgaaataatggcatttacaaaatgaaaaatgtagtttcacaactaagttttgttaacagagactgcatgctttgcttatagttcttaattttggttttgacattcatttaattttttccatgttaaatatgtagtttaattatttactcaaaataaacattgttcatgcttttaggcctttgggggaattgatttttatccacaggtagaaaatggtctttgcacacactacacttatttcaaatatacaatgtgctcccgaactttcgcattagtctttaaaattactctcaaaatggtattaaaaaaaaaaaaaaaagcaccctctcgtatttcattttggctttttcttaacaataccttgggccatttttttccagttcactatgttggtatactaacttttcttcagccttttaatgcgaagccaactagtagagcatgctttcaggatctgacagctctgctagtagagcgagtatttattaatacagaattaaccttcgcccctttaaagtcaagtctgtctaatctaactagcgcctcgctttgccttctcacaatgctcactagccatcatgctcacccttctcttccagatccacttcctcatgatactgtcttctaactgggcttacttaaaggatgcgagcaaaatgcaggcttaccaggatatcaaagcaaaggaagaacaggaactgcaagatatccagtctcggtcaaaagaacaactcaattcttacacataaatgtttgccagagtgtttcggccgacgtatttacagctctgacaaatcatcagacagctgctctgcagtacagatgtgtatcccaccaaactaatgtagatgtacaaacacttcactgtctgtctcaagctgctgggatgtatctctaggaaaaccttccagtgggtaaatctttttctttagaacaaatattggaggtttcatgttagccattttaaaaggcaacactttgacaaaatgatcgttcatactttgggaatttgtggcatgttcacatttattgctagggcaattctaccaagacactcaatggaatatgtcacactccttaatagggacctgtgactccttaataaggacctgtgacatgcccagcatcaagggataagaccgtaaattcacatatatgccatctgtcctcaagtgttatctacataggaaataaaatggaattgatgtaaagttccatttctgacagctgacatttattaaactttggatcaaagataatgtgattcttatgattgatttctcaaactagcttttccctcccaagtccaggacccattaatttcctgagccaatcagaaatatatttttcaataatgctaaaattagctacaattctgctgaccctactattaaagaatctggatgctggactcactgacaagctttccagaagcaattttataacagatttcattttaacaaaatactgatccaattttcattattcttgagaaatgtcagctttgccttaatgagtatttgctttaaatttctaagaatttatatcataactagagacccaaatatctttcacagaattttgttccataaatgtttttcttaattattaagaagtgttaccttattaaaatgaccaccattctaaaccatttttcagtggtctggatacgaagtttacagtttcataccaactatctaaaacctaattgcaaattgaccacagacctctaacctcctacttttatagacttgaatacttaagtaatttaaattagggttggtatttcatttttttcttatctaaatcttagtttcctggaataataaagtttgatgttcagcaagagaactgcttgagtttaagccattttcaaaagaaacttgccttttacattattgtgttccagaacattaagtgactgtaggtactgggtattagtgatggtaaactttgtgttgctctttatgaaatgatccatataactgttgggtgcatcagtgcttttcaaaggggctgcttactatagggttaactatgtatattcattgttaagagttaacttgtggtttggctgtttcctggattttataacatacatgtgcagaaatgtattcaaatgaaaggaagcatacctttatcaagatgctattaaaattgaacatcaagtataatatttcatttggattctcttttttggttaatgcctaaaaatgcctatttgggattttttttttttttaaattaagagaagctctcttctgtgtagaacagttgttccaaaatagcttagtgttttgttttcctgttgcatgacagatttaactattctttccagcagtggaggtgctgtcagagtccagtgttctagaagaggcagtgtctaaagcctaattttacttttctaattctggtagctattaccaggaatttttgaaagttttgtttaagtagtctaatattttttatgtaaagagcattaaattttgctatgtataaatttttgtaacctaacagtgaatcaatattttctatcagtgccaagggcttcctgtagttctattcaagtgttacaataaatatttgtagataatagtcaa

SEQ ID NO: 314975 - DNA, 1149 bp, Homo sapiens
gcccctctccgcgcggccggcccccagtgcaggcggagccgcgccgcgctcccaccccggccgggagctaggagccagcggccagccccgcgcagcgcagcgcagcccgcagaagcccggtcagcgcacgtgcccgcgagacctgcaaacttgtgccaccggctctgcccgtccccggggagcccgaacgccccgcagccctcacccctcccgccagtctccagccatgggctgctttgaatgctgcatcaagtgtctgggaggagtcccctacgcctccctggtggccaccatcctctgcttctccggggtggccttattctgcggctgtgggcatgtggctctcgcaggcaccgtggcgattcttgagcaacacttctccaccaacgccagtgaccatgccttgctgagcgaggtgatacaactgatgcagtatgtcatctatggaattgcgtcctttttcttcttgtatgggatcattctgttggcagaaggcttttacaccacaagtgcagtgaaagaactgcacggtgagtttaaaacaaccgcttgtggccgatgcatcagtggaatgttcgttttcctcacctatgtgcttggagtggcctggctgggtgtgtttggtttctcagcggtgcccgtgtttatgttctacaacatatggtcaacttgtgaagtcatcaagtcaccgcagaccaacgggaccacgggtgtggagcagatctgtgtggatatccgacaatacggtatcattccttggaatgctttccccggaaaaatatgtggctctgccctggagaacatctgcaacacaaacgagttctacatgtcctatcacctgttcattgtggcctgtgcaggagctggtgccaccgtcattgccctgatccactttcctcattgatacctggacttctaaactggggcttaacttacagggatgcgaagccaaaatgcaaggcttacccccgatattcaagccaagggacagaacacggaaactgccaggatattcccagtctcgggtcaaagagaaccacagtccacatgtttacaccataaatgttatggcccgagatgttcggacgacacaattaaccagtctgaccaagtcttcaacaagtgagccgggataccatggtgttccac

SEQ ID NO: 314976 - DNA, 1427 bp, Homo sapiens
agcggggctagaagaaatgaggtggggagaaagagagagagagagagagatcgagattgagatcttaagaaagagagcaaggaggaagagcccggtggggagcaggtccttctcccccacccccctacccccaactcccactggagccgcattgagactgtaggcaccaccgggcgccgaatggctgttttctaactgggatcctcggtgacgtatggctgcctgccccttggcagctgtctttatggaccagtaggcagagcgaaattgacgctgacaagacttttgcatcttggaagggactgtaatctactgtagtgaagaacagagcctctcaatcagacgggtgtaaataagagacggaggggagtccagaagaaaaggaagaggaggaaaaacaagtgtgtgttggggggaacagggggaaaagcatttttggtggatggtatgaagccagccatggaaactgcagccgaggaaaatactgaacaaagccaagagagaaaaggctgctttgaatgctgcatcaagtgtctgggaggagtcccctacgcctccctggtggccaccatcctctgcttctccggggtggccttattctgcggctgtgggcatgtggctctcgcaggcaccgtggcgattcttgagcaacacttctccaccaacgccagtgaccatgccttgctgagcgaggtgatacaactgatgcagtatgtcatctatggaattgcgtcctttttcttcttgtatgggatcattctgttggcagaaggcttttacaccacaagtgcagtgaaagaactgcacggtgagtttaaaacaaccgcttgtggccgatgcatcagtggaatgttcgttttcctcacctatgtgcttggagtggcctggctgggtgtgtttggtttctcagcggtgcccgtgtttatgttctacaacatatggtcaacttgtgaagtcatcaagtcaccgcagaccaacgggaccacgggtgtggagcagatctgtgtggatatccgacaatacggtatcattccttggaatgctttccccggaaaaatatgtggctctgccctggagaacatctgcaacacaaacgagttctacatgtcctatcacctgttcattgtggcctgtgcaggagctggtgccaccgtcattgccctgatccactttcctcattgatacctggacttctaaactggggcttaacttacagggatgcgaagccaaaatgcaaggcttacccccgatattcaagccaagggacagaacacggaaactgccaggatattcccagtctcgggtcaaagagaaccacagtccacatgtttacaccataaatgttatggcccgagatgttcggacgacacaattaaccagtctgaccaagtcttcaacaagtgagccgggataccatggtgttccac

SEQ ID NO: 314977 - DNA, 799 bp, Homo sapiens
cgcgcccttccgagggtcccgcccctcccccgctcaggtggcgcctcctcggccacctctgcgacgaagccgggacgctggaggtgggaggggcgcggcgcaggtgtccggaacgcccaggctgctttgaatgctgcatcaagtgtctgggaggagtcccctacgcctccctggtggccaccatcctctgcttctccggggtggccttattctgcggctgtgggcatgtggctctcgcaggcaccgtggcgattcttgagcaacacttctccaccaacgccagtgaccatgccttgctgagcgaggtgatacaactgatgcagtatgtcatctatggaattgcgtcctttttcttcttgtatgggatcattctgttggcagaaggcttttacaccacaagtgcagtgaaagaactgcacggtgagtttaaaacaaccgcttgtggccgatgcatcagtggaatgttcgttttcctcacctatgtgcttggagtggcctggctgggtgtgtttggtttctcagcggtgcccgtgtttatgttctacaacatatggtcaacttgtgaagtcatcaagtcaccgcagaccaacgggaccacgggtgtggagcagatctgtgtggatatccgacaatacggtatcattccttggaatgctttccccggaaaaatatgtggctctgccctggagaacatctgcaacacaaacgagttctacatgtcctatcacctgttcattgtggcctgtgcaggagctggtgccaccgtcattgccctggtgagtaatggccccaagaccac

SEQ ID NO: 314978 - DNA, 4589 bp, Homo sapiens
gcccctctccgcgcggccggcccccagtgcaggcggagccgcgccgcgctcccaccccggccgggagctaggagccagcggccagccccgcgcagcgcagcgcagcccgcagaagcccggtcagcgcacgtgcccgcgagacctgcaaacttgtgccaccggctctgcccgtccccggggagcccgaacgccccgcagccctcacccctcccgccagtctccagccatgggctgctttgaatgctgcatcaagtgtctgggaggagtcccctacgcctccctggtggccaccatcctctgcttctccggggtggccttattctgcggctgtgggcatgtggctctcgcaggcaccgtggcgattcttgagcaacacttctccaccaacgccagtgaccatgccttgctgagcgaggtgatacaactgatgcagtatgtcatctatggaattgcgtcctttttcttcttgtatgggatcattctgttggcagaaggcttttacaccacaagtgcagtgaaagaactgcacggtgagtttaaaacaaccgcttgtggccgatgcatcagtggaatgttcgttttcctcacctatgtgcttggagtggcctggctgggtgtgtttggtttctcagcggtgcccgtgtttatgttctacaacatatggtcaacttgtgaagtcatcaagtcaccgcagaccaacgggaccacgggtgtggagcagatctgtgtggatatccgacaatacggtatcattccttggaatgctttccccggaaaaatatgtggctctgccctggagaacatctgcaacacaaacgagttctacatgtcctatcacctgttcattgtggcctgtgcaggagctggtgccaccgtcattgccctgctgatctacatgatggctactacatataactatgcggttttgaagtttaagagtcgggaagattgctgcactaaattctaaattgcataaggagttttagagagctatgctctgtagcatgaaatatcactgacactccagactaaagcagagtctaggtttctgcaattttgttacagtaatttgtaaatagctttagtaaactcaccttgcatggtagattaataagatgacttactgtacatgaattacacaataatgagatctggtggctatttccacattttgaaaaggattcagttatttactgacagtggtgagcatcctttttaaaataatgttctcatacttaaacattagagagcagtatctttaaatgaattattaacactttggaatacttacattttctgttatttttgattgcctgataaccagtttcaatgatgaaaatgaaaacaagtgctgaagatgaaatggaagagaaccgttttaatctggattttgttttgtcacacctggaaaatactttgcaaatatgttctaaattgaaaacaatttttttatgatcacatggttcactaccaaatgaccctcaaataagccagatgaaaatttgaagaaaaaggtcacccagttctctggaaaaaaaaaaaaaaaaaaaaaaaaaaaggatttatatgtgggtagttttttttttggtacaacacaatcattctgttagagcccacaaaattggtaaccttaaattgtgtgttttggtaagtaataactaactgtttcctcatagctagttctcaagctgcatgtaagattttaacgggaagagaaaataggcctggacctgaaggtctcaaatatgttgagaagaaagtatgaactataaggaacttgagatgtagatttattttgcaggaaatacgaggaaaataggaaagaagtgtttgccgcatcaagtgtaaagaatgatactgaggatttttacattttatgaaatgaaataatggcatttacaaaatgaaaaatgtagtttcacaactaagttttgttaacagagactgcatgctttgcttatagttcttaattttggttttgacattcatttaattttttccatgttaaatatgtagtttaattatttactcaaaataaacattgttcatgcttttaggcctttgggggaattgatttttatccacaggtagaaaatggtctttgcacacactacacttatttcaaatatacaatgtgctcccgaactttcgcattagtctttaaaattactctcaaaatggtattaaaaaaaaaaaaaaaagcaccctctcgtatttcattttggctttttcttaacaataccttgggccatttttttccagttcactatgttggtatactaacttttcttcagccttttaatgcgaagccaactagtagagcatgctttcaggatctgacagctctgctagtagagcgagtatttattaatacagaattaaccttcgcccctttaaagtcaagtctgtctaatctaactagcgcctcgctttgccttctcacaatgctcactagccatcatgctcacccttctcttccagatccacttcctcatgatactgtcttctaactgggcttacttaaaggatgcgagcaaaatgcaggcttaccaggatatcaaagcaaaggaagaacaggaactgcaagatatccagtctcggtcaaaagaacaactcaattcttacacataaatgtttgccagagtgtttcggccgacgtatttacagctctgacaaatcatcagacagctgctctgcagtacagatgtgtatcccaccaaactaatgtagatgtacaaacacttcactgtctgtctcaagctgctgggatgtatctctaggaaaaccttccagtgggtaaatctttttctttagaacaaatattggaggtttcatgttagccattttaaaaggcaacactttgacaaaatgatcgttcatactttgggaatttgtggcatgttcacatttattgctagggcaattctaccaagacactcaatggaatatgtcacactccttaatagggacctgtgactccttaataaggacctgtgacatgcccagcatcaagggataagaccgtaaattcacatatatgccatctgtcctcaagtgttatctacataggaaataaaatggaattgatgtaaagttccatttctgacagctgacatttattaaactttggatcaaagataatgtgattcttatgattgatttctcaaactagcttttccctcccaagtccaggacccattaatttcctgagccaatcagaaatatatttttcaataatgctaaaattagctacaattctgctgaccctactattaaagaatctggatgctggactcactgacaagctttccagaagcaattttataacagatttcattttaacaaaatactgatccaattttcattattcttgagaaatgtcagctttgccttaatgagtatttgctttaaatttctaagaatttatatcataactagagacccaaatatctttcacagaattttgttccataaatgtttttcttaattattaagaagtgttaccttattaaaatgaccaccattctaaaccatttttcagtggtctggatacgaagtttacagtttcataccaactatctaaaacctaattgcaaattgaccacagacctctaacctcctacttttatagacttgaatacttaagtaatttaaattagggttggtatttcatttttttcttatctaaatcttagtttcctggaataataaagtttgatgttcagcaagagaactgcttgagtttaagccattttcaaaagaaacttgccttttacattattgtgttccagaacattaagtgactgtaggtactgggtattagtgatggtaaactttgtgttgctctttatgaaatgatccatataactgttgggtgcatcagtgcttttcaaaggggctgcttactatagggttaactatgtatattcattgttaagagttaacttgtggtttggctgtttcctggattttataacatacatgtgcagaaatgtattcaaatgaaaggaagcatacctttatcaagatgctattaaaattgaacatcaagtataatatttcatttggattctcttttttggttaatgcctaaaaatgcctatttgggattttttttttttttaaattaagagaagctctcttctgtgtagaacagttgttccaaaatagcttagtgttttgttttcctgttgcatgacagatttaactattctttccagcagtggaggtgctgtcagagtccagtgttctagaagaggcagtgtctaaagcctaattttacttttctaattctggtagctattaccaggaatttttgaaagttttgtttaagtagtctaatattttttatgtaaagagcattaaattttgctatgtataaatttttgtaacctaacagtgaatcaatattttctatcagtgccaagggcttcctgtagttctattcaagtgttacaataaatatttgtagataatagtcaatacttgtgtatgcttattttaaagatctatttaggtggaaatagttgtggatgtactaagagtaatgaaataaaattatagcttcattcacttgcctttttaccata

SEQ ID NO: 314979 - DNA, 4760 bp, Homo sapiens
agcggggctagaagaaatgaggtggggagaaagagagagagagagagagatcgagattgagatcttaagaaagagagcaaggaggaagagcccggtggggagcaggtccttctcccccacccccctacccccaactcccactggagccgcattgagactgtaggcaccaccgggcgccgaatggctgttttctaactgggatcctcggtgacgtatggctgcctgccccttggcagctgtctttatggaccagtaggcagagcgaaattgacgctgacaagacttttgcatcttggaagggactgtaatctactgtagtgaagaacagagcctctcaatcagacgggtgtaaataagagacggaggggagtccagaagaaaaggaagaggaggaaaaacaagtgtgtgttggggggaacagggggaaaagcatttttggtggatggtatgaagccagccatggaaactgcagccgaggaaaatactgaacaaagccaagagagaaaaggctgctttgaatgctgcatcaagtgtctgggaggagtcccctacgcctccctggtggccaccatcctctgcttctccggggtggccttattctgcggctgtgggcatgtggctctcgcaggcaccgtggcgattcttgagcaacacttctccaccaacgccagtgaccatgccttgctgagcgaggtgatacaactgatgcagtatgtcatctatggaattgcgtcctttttcttcttgtatgggatcattctgttggcagaaggcttttacaccacaagtgcagtgaaagaactgcacggtgagtttaaaacaaccgcttgtggccgatgcatcagtggaatgttcgttttcctcacctatgtgcttggagtggcctggctgggtgtgtttggtttctcagcggtgcccgtgtttatgttctacaacatatggtcaacttgtgaagtcatcaagtcaccgcagaccaacgggaccacgggtgtggagcagatctgtgtggatatccgacaatacggtatcattccttggaatgctttccccggaaaaatatgtggctctgccctggagaacatctgcaacacaaacgagttctacatgtcctatcacctgttcattgtggcctgtgcaggagctggtgccaccgtcattgccctgctgatctacatgatggctactacatataactatgcggttttgaagtttaagagtcgggaagattgctgcactaaattctaaattgcataaggagttttagagagctatgctctgtagcatgaaatatcactgacactccagactaaagcagagtctaggtttctgcaattttgttacagtaatttgtaaatagctttagtaaactcaccttgcatggtagattaataagatgacttactgtacatgaattacacaataatgagatctggtggctatttccacattttgaaaaggattcagttatttactgacagtggtgagcatcctttttaaaataatgttctcatacttaaacattagagagcagtatctttaaatgaattattaacactttggaatacttacattttctgttatttttgattgcctgataaccagtttcaatgatgaaaatgaaaacaagtgctgaagatgaaatggaagagaaccgttttaatctggattttgttttgtcacacctggaaaatactttgcaaatatgttctaaattgaaaacaatttttttatgatcacatggttcactaccaaatgaccctcaaataagccagatgaaaatttgaagaaaaaggtcacccagttctctggaaaaaaaaaaaaaaaaaaaaaaaaaaaggatttatatgtgggtagttttttttttggtacaacacaatcattctgttagagcccacaaaattggtaaccttaaattgtgtgttttggtaagtaataactaactgtttcctcatagctagttctcaagctgcatgtaagattttaacgggaagagaaaataggcctggacctgaaggtctcaaatatgttgagaagaaagtatgaactataaggaacttgagatgtagatttattttgcaggaaatacgaggaaaataggaaagaagtgtttgccgcatcaagtgtaaagaatgatactgaggatttttacattttatgaaatgaaataatggcatttacaaaatgaaaaatgtagtttcacaactaagttttgttaacagagactgcatgctttgcttatagttcttaattttggttttgacattcatttaattttttccatgttaaatatgtagtttaattatttactcaaaataaacattgttcatgcttttaggcctttgggggaattgatttttatccacaggtagaaaatggtctttgcacacactacacttatttcaaatatacaatgtgctcccgaactttcgcattagtctttaaaattactctcaaaatggtattaaaaaaaaaaaaaaaagcaccctctcgtatttcattttggctttttcttaacaataccttgggccatttttttccagttcactatgttggtatactaacttttcttcagccttttaatgcgaagccaactagtagagcatgctttcaggatctgacagctctgctagtagagcgagtatttattaatacagaattaaccttcgcccctttaaagtcaagtctgtctaatctaactagcgcctcgctttgccttctcacaatgctcactagccatcatgctcacccttctcttccagatccacttcctcatgatactgtcttctaactgggcttacttaaaggatgcgagcaaaatgcaggcttaccaggatatcaaagcaaaggaagaacaggaactgcaagatatccagtctcggtcaaaagaacaactcaattcttacacataaatgtttgccagagtgtttcggccgacgtatttacagctctgacaaatcatcagacagctgctctgcagtacagatgtgtatcccaccaaactaatgtagatgtacaaacacttcactgtctgtctcaagctgctgggatgtatctctaggaaaaccttccagtgggtaaatctttttctttagaacaaatattggaggtttcatgttagccattttaaaaggcaacactttgacaaaatgatcgttcatactttgggaatttgtggcatgttcacatttattgctagggcaattctaccaagacactcaatggaatatgtcacactccttaatagggacctgtgactccttaataaggacctgtgacatgcccagcatcaagggataagaccgtaaattcacatatatgccatctgtcctcaagtgttatctacataggaaataaaatggaattgatgtaaagttccatttctgacagctgacatttattaaactttggatcaaagataatgtgattcttatgattgatttctcaaactagcttttccctcccaagtccaggacccattaatttcctgagccaatcagaaatatatttttcaataatgctaaaattagctacaattctgctgaccctactattaaagaatctggatgctggactcactgacaagctttccagaagcaattttataacagatttcattttaacaaaatactgatccaattttcattattcttgagaaatgtcagctttgccttaatgagtatttgctttaaatttctaagaatttatatcataactagagacccaaatatctttcacagaattttgttccataaatgtttttcttaattattaagaagtgttaccttattaaaatgaccaccattctaaaccatttttcagtggtctggatacgaagtttacagtttcataccaactatctaaaacctaattgcaaattgaccacagacctctaacctcctacttttatagacttgaatacttaagtaatttaaattagggttggtatttcatttttttcttatctaaatcttagtttcctggaataataaagtttgatgttcagcaagagaactgcttgagtttaagccattttcaaaagaaacttgccttttacattattgtgttccagaacattaagtgactgtaggtactgggtattagtgatggtaaactttgtgttgctctttatgaaatgatccatataactgttgggtgcatcagtgcttttcaaaggggctgcttactatagggttaactatgtatattcattgttaagagttaacttgtggtttggctgtttcctggattttataacatacatgtgcagaaatgtattcaaatgaaaggaagcatacctttatcaagatgctattaaaattgaacatcaagtataatatttcatttggattctcttttttggttaatgcctaaaaatgcctatttgggattttttttttttttaaattaagagaagctctcttctgtgtagaacagttgttccaaaatagcttagtgttttgttttcctgttgcatgacagatttaactattctttccagcagtggaggtgctgtcagagtccagtgttctagaagaggcagtgtctaaagcctaattttacttttctaattctggtagctattaccaggaatttttgaaagttttgtttaagtagtctaatattttttatgtaaagagcattaaattttgctatgtataaatttttgtaacctaacagtgaatcaatattttctatcagtgccaagggcttcctgtagttctattcaagtgttacaataaatatttgtagataatagtcaa

SEQ ID NO: 314980 - DNA, 4567 bp, Homo sapiens
taaaaagcaaaagaattccggggtagttatgggaaagaacctagagagcaagaagaaaagaggaatggtgcccgaatctgggagagatagacttcaggatggccagtcattgaatgggggataggtgaagaacagagcctctcaatcagacgggtgtaaataagagacggaggggagtccagaagaaaaggaagaggaggaaaaacaagtgtgtgttggggggaacagggggaaaagcatttttggtggatggtatgaagccagccatggaaactgcagccgaggaaaatactgaacaaagccaagagagaaaaggctgctttgaatgctgcatcaagtgtctgggaggagtcccctacgcctccctggtggccaccatcctctgcttctccggggtggccttattctgcggctgtgggcatgtggctctcgcaggcaccgtggcgattcttgagcaacacttctccaccaacgccagtgaccatgccttgctgagcgaggtgatacaactgatgcagtatgtcatctatggaattgcgtcctttttcttcttgtatgggatcattctgttggcagaaggcttttacaccacaagtgcagtgaaagaactgcacggtgagtttaaaacaaccgcttgtggccgatgcatcagtggaatgttcgttttcctcacctatgtgcttggagtggcctggctgggtgtgtttggtttctcagcggtgcccgtgtttatgttctacaacatatggtcaacttgtgaagtcatcaagtcaccgcagaccaacgggaccacgggtgtggagcagatctgtgtggatatccgacaatacggtatcattccttggaatgctttccccggaaaaatatgtggctctgccctggagaacatctgcaacacaaacgagttctacatgtcctatcacctgttcattgtggcctgtgcaggagctggtgccaccgtcattgccctgctgatctacatgatggctactacatataactatgcggttttgaagtttaagagtcgggaagattgctgcactaaattctaaattgcataaggagttttagagagctatgctctgtagcatgaaatatcactgacactccagactaaagcagagtctaggtttctgcaattttgttacagtaatttgtaaatagctttagtaaactcaccttgcatggtagattaataagatgacttactgtacatgaattacacaataatgagatctggtggctatttccacattttgaaaaggattcagttatttactgacagtggtgagcatcctttttaaaataatgttctcatacttaaacattagagagcagtatctttaaatgaattattaacactttggaatacttacattttctgttatttttgattgcctgataaccagtttcaatgatgaaaatgaaaacaagtgctgaagatgaaatggaagagaaccgttttaatctggattttgttttgtcacacctggaaaatactttgcaaatatgttctaaattgaaaacaatttttttatgatcacatggttcactaccaaatgaccctcaaataagccagatgaaaatttgaagaaaaaggtcacccagttctctggaaaaaaaaaaaaaaaaaaaaaaaaaaaggatttatatgtgggtagttttttttttggtacaacacaatcattctgttagagcccacaaaattggtaaccttaaattgtgtgttttggtaagtaataactaactgtttcctcatagctagttctcaagctgcatgtaagattttaacgggaagagaaaataggcctggacctgaaggtctcaaatatgttgagaagaaagtatgaactataaggaacttgagatgtagatttattttgcaggaaatacgaggaaaataggaaagaagtgtttgccgcatcaagtgtaaagaatgatactgaggatttttacattttatgaaatgaaataatggcatttacaaaatgaaaaatgtagtttcacaactaagttttgttaacagagactgcatgctttgcttatagttcttaattttggttttgacattcatttaattttttccatgttaaatatgtagtttaattatttactcaaaataaacattgttcatgcttttaggcctttgggggaattgatttttatccacaggtagaaaatggtctttgcacacactacacttatttcaaatatacaatgtgctcccgaactttcgcattagtctttaaaattactctcaaaatggtattaaaaaaaaaaaaaaaagcaccctctcgtatttcattttggctttttcttaacaataccttgggccatttttttccagttcactatgttggtatactaacttttcttcagccttttaatgcgaagccaactagtagagcatgctttcaggatctgacagctctgctagtagagcgagtatttattaatacagaattaaccttcgcccctttaaagtcaagtctgtctaatctaactagcgcctcgctttgccttctcacaatgctcactagccatcatgctcacccttctcttccagatccacttcctcatgatactgtcttctaactgggcttacttaaaggatgcgagcaaaatgcaggcttaccaggatatcaaagcaaaggaagaacaggaactgcaagatatccagtctcggtcaaaagaacaactcaattcttacacataaatgtttgccagagtgtttcggccgacgtatttacagctctgacaaatcatcagacagctgctctgcagtacagatgtgtatcccaccaaactaatgtagatgtacaaacacttcactgtctgtctcaagctgctgggatgtatctctaggaaaaccttccagtgggtaaatctttttctttagaacaaatattggaggtttcatgttagccattttaaaaggcaacactttgacaaaatgatcgttcatactttgggaatttgtggcatgttcacatttattgctagggcaattctaccaagacactcaatggaatatgtcacactccttaatagggacctgtgactccttaataaggacctgtgacatgcccagcatcaagggataagaccgtaaattcacatatatgccatctgtcctcaagtgttatctacataggaaataaaatggaattgatgtaaagttccatttctgacagctgacatttattaaactttggatcaaagataatgtgattcttatgattgatttctcaaactagcttttccctcccaagtccaggacccattaatttcctgagccaatcagaaatatatttttcaataatgctaaaattagctacaattctgctgaccctactattaaagaatctggatgctggactcactgacaagctttccagaagcaattttataacagatttcattttaacaaaatactgatccaattttcattattcttgagaaatgtcagctttgccttaatgagtatttgctttaaatttctaagaatttatatcataactagagacccaaatatctttcacagaattttgttccataaatgtttttcttaattattaagaagtgttaccttattaaaatgaccaccattctaaaccatttttcagtggtctggatacgaagtttacagtttcataccaactatctaaaacctaattgcaaattgaccacagacctctaacctcctacttttatagacttgaatacttaagtaatttaaattagggttggtatttcatttttttcttatctaaatcttagtttcctggaataataaagtttgatgttcagcaagagaactgcttgagtttaagccattttcaaaagaaacttgccttttacattattgtgttccagaacattaagtgactgtaggtactgggtattagtgatggtaaactttgtgttgctctttatgaaatgatccatataactgttgggtgcatcagtgcttttcaaaggggctgcttactatagggttaactatgtatattcattgttaagagttaacttgtggtttggctgtttcctggattttataacatacatgtgcagaaatgtattcaaatgaaaggaagcatacctttatcaagatgctattaaaattgaacatcaagtataatatttcatttggattctcttttttggttaatgcctaaaaatgcctatttgggattttttttttttttaaattaagagaagctctcttctgtgtagaacagttgttccaaaatagcttagtgttttgttttcctgttgcatgacagatttaactattctttccagcagtggaggtgctgtcagagtccagtgttctagaagaggcagtgtctaaagcctaattttacttttctaattctggtagctattaccaggaatttttgaaagttttgtttaagtagtctaatattttttatgtaaagagcattaaattttgctatgtataaatttttgtaacctaacagtgaatcaatattttctatcagtgccaagggcttcctgtagttctattcaagtgttacaataaatatttgtagataatagtcaa

SEQ ID NO: 314981 - DNA, 4602 bp, Homo sapiens
gcccctctccgcgcggccggcccccagtgcaggcggagccgcgccgcgctcccaccccggccgggagctaggagccagcggccagccccgcgcagcgcagcgcagcccgcagaagcccggtcagcgcacgtgcccgcgagacctgcaaacttgtgccaccggctctgcccgtccccggggagcccgaacgccccgcagccctcacccctcccgccagtctccagccatggtgaacagcagagctgaaatggaaattggcaggtaccactggatgtacccaggctcaaagaaccaccagtaccatcccgtgccaaccctgggggacagggctagccccttgagcagtccaggctgctttgaatgctgcatcaagtgtctgggaggagtcccctacgcctccctggtggccaccatcctctgcttctccggggtggccttattctgcggctgtgggcatgtggctctcgcaggcaccgtggcgattcttgagcaacacttctccaccaacgccagtgaccatgccttgctgagcgaggtgatacaactgatgcagtatgtcatctatggaattgcgtcctttttcttcttgtatgggatcattctgttggcagaaggcttttacaccacaagtgcagtgaaagaactgcacggtgagtttaaaacaaccgcttgtggccgatgcatcagtggaatgttcgttttcctcacctatgtgcttggagtggcctggctgggtgtgtttggtttctcagcggtgcccgtgtttatgttctacaacatatggtcaacttgtgaagtcatcaagtcaccgcagaccaacgggaccacgggtgtggagcagatctgtgtggatatccgacaatacggtatcattccttggaatgctttccccggaaaaatatgtggctctgccctggagaacatctgcaacacaaacgagttctacatgtcctatcacctgttcattgtggcctgtgcaggagctggtgccaccgtcattgccctgctgatctacatgatggctactacatataactatgcggttttgaagtttaagagtcgggaagattgctgcactaaattctaaattgcataaggagttttagagagctatgctctgtagcatgaaatatcactgacactccagactaaagcagagtctaggtttctgcaattttgttacagtaatttgtaaatagctttagtaaactcaccttgcatggtagattaataagatgacttactgtacatgaattacacaataatgagatctggtggctatttccacattttgaaaaggattcagttatttactgacagtggtgagcatcctttttaaaataatgttctcatacttaaacattagagagcagtatctttaaatgaattattaacactttggaatacttacattttctgttatttttgattgcctgataaccagtttcaatgatgaaaatgaaaacaagtgctgaagatgaaatggaagagaaccgttttaatctggattttgttttgtcacacctggaaaatactttgcaaatatgttctaaattgaaaacaatttttttatgatcacatggttcactaccaaatgaccctcaaataagccagatgaaaatttgaagaaaaaggtcacccagttctctggaaaaaaaaaaaaaaaaaaaaaaaaaaaggatttatatgtgggtagttttttttttggtacaacacaatcattctgttagagcccacaaaattggtaaccttaaattgtgtgttttggtaagtaataactaactgtttcctcatagctagttctcaagctgcatgtaagattttaacgggaagagaaaataggcctggacctgaaggtctcaaatatgttgagaagaaagtatgaactataaggaacttgagatgtagatttattttgcaggaaatacgaggaaaataggaaagaagtgtttgccgcatcaagtgtaaagaatgatactgaggatttttacattttatgaaatgaaataatggcatttacaaaatgaaaaatgtagtttcacaactaagttttgttaacagagactgcatgctttgcttatagttcttaattttggttttgacattcatttaattttttccatgttaaatatgtagtttaattatttactcaaaataaacattgttcatgcttttaggcctttgggggaattgatttttatccacaggtagaaaatggtctttgcacacactacacttatttcaaatatacaatgtgctcccgaactttcgcattagtctttaaaattactctcaaaatggtattaaaaaaaaaaaaaaaagcaccctctcgtatttcattttggctttttcttaacaataccttgggccatttttttccagttcactatgttggtatactaacttttcttcagccttttaatgcgaagccaactagtagagcatgctttcaggatctgacagctctgctagtagagcgagtatttattaatacagaattaaccttcgcccctttaaagtcaagtctgtctaatctaactagcgcctcgctttgccttctcacaatgctcactagccatcatgctcacccttctcttccagatccacttcctcatgatactgtcttctaactgggcttacttaaaggatgcgagcaaaatgcaggcttaccaggatatcaaagcaaaggaagaacaggaactgcaagatatccagtctcggtcaaaagaacaactcaattcttacacataaatgtttgccagagtgtttcggccgacgtatttacagctctgacaaatcatcagacagctgctctgcagtacagatgtgtatcccaccaaactaatgtagatgtacaaacacttcactgtctgtctcaagctgctgggatgtatctctaggaaaaccttccagtgggtaaatctttttctttagaacaaatattggaggtttcatgttagccattttaaaaggcaacactttgacaaaatgatcgttcatactttgggaatttgtggcatgttcacatttattgctagggcaattctaccaagacactcaatggaatatgtcacactccttaatagggacctgtgactccttaataaggacctgtgacatgcccagcatcaagggataagaccgtaaattcacatatatgccatctgtcctcaagtgttatctacataggaaataaaatggaattgatgtaaagttccatttctgacagctgacatttattaaactttggatcaaagataatgtgattcttatgattgatttctcaaactagcttttccctcccaagtccaggacccattaatttcctgagccaatcagaaatatatttttcaataatgctaaaattagctacaattctgctgaccctactattaaagaatctggatgctggactcactgacaagctttccagaagcaattttataacagatttcattttaacaaaatactgatccaattttcattattcttgagaaatgtcagctttgccttaatgagtatttgctttaaatttctaagaatttatatcataactagagacccaaatatctttcacagaattttgttccataaatgtttttcttaattattaagaagtgttaccttattaaaatgaccaccattctaaaccatttttcagtggtctggatacgaagtttacagtttcataccaactatctaaaacctaattgcaaattgaccacagacctctaacctcctacttttatagacttgaatacttaagtaatttaaattagggttggtatttcatttttttcttatctaaatcttagtttcctggaataataaagtttgatgttcagcaagagaactgcttgagtttaagccattttcaaaagaaacttgccttttacattattgtgttccagaacattaagtgactgtaggtactgggtattagtgatggtaaactttgtgttgctctttatgaaatgatccatataactgttgggtgcatcagtgcttttcaaaggggctgcttactatagggttaactatgtatattcattgttaagagttaacttgtggtttggctgtttcctggattttataacatacatgtgcagaaatgtattcaaatgaaaggaagcatacctttatcaagatgctattaaaattgaacatcaagtataatatttcatttggattctcttttttggttaatgcctaaaaatgcctatttgggattttttttttttttaaattaagagaagctctcttctgtgtagaacagttgttccaaaatagcttagtgttttgttttcctgttgcatgacagatttaactattctttccagcagtggaggtgctgtcagagtccagtgttctagaagaggcagtgtctaaagcctaattttacttttctaattctggtagctattaccaggaatttttgaaagttttgtttaagtagtctaatattttttatgtaaagagcattaaattttgctatgtataaatttttgtaacctaacagtgaatcaatattttctatcagtgccaagggcttcctgtagttctattcaagtgttacaataaatatttgtagataatagtcaa

SEQ ID NO: 314982 - DNA, 4518 bp, Homo sapiens
ttaaatatgtagtttaattatttactcaaaataaacattgttcatgcttttaggcctttgggggaattgatttttatccacaggtagaaaatggtctttgcacacactacacttatttcaaatatacaatgtgctcccgaactttcgcattagtctttaaaattactctcaaaatggtattaaaaaaaaaaaaaaagcaccctcttgtatttcatttttgctttttcttaacaatacctttggccatttttttccagttcactatgtttgtatactaacttttcttcagccttttaatgcgaagccaactagtagagcatgctttcaggatctgacagctctgctagtagagcgagtatttattaatacagaattaaccttcgcccctttaaagtcaagtctgtctaatctaactagcgcctcgctttgccttctcacaatgctcactagccatcatgctcacccttctcttccagatccacttcctcatgatactgtcttcttgtatgggatcattctgttggcagaaggcttttacaccacaagtgcagtgaaagaactgcacggtgagtttaaaacaaccgcttgtggccgatgcatcagtggaatgttcgttttcctcacctatgtgcttggagtggcctggctgggtgtgtttggtttctcagcggtgcccgtgtttatgttctacaacatatggtcaacttgtgaagtcatcaagtcaccgcagaccaacgggaccacgggtgtggagcagatctgtgtggatatccgacaatacggtatcattccttggaatgctttccccggaaaaatatgtggctctgccctggagaacatctgcaacacaaacgagttctacatgtcctatcacctgttcattgtggcctgtgcaggagctggtgccaccgtcattgccctgctgatctacatgatggctactacatataactatgcggttttgaagtttaagagtcgggaagattgctgcactaaattctaaattgcataaggagttttagagagctatgctctgtagcatgaaatatcactgacactccagactaaagcagagtctaggtttctgcaattttgttacagtaatttgtaaatagctttagtaaactcaccttgcatggtagattaataagatgacttactgtacatgaattacacaataatgagatctggtggctatttccacattttgaaaaggattcagttatttactgacagtggtgagcatcctttttaaaataatgttctcatacttaaacattagagagcagtatctttaaatgaattattaacactttggaatacttacattttctgttatttttgattgcctgataaccagtttcaatgatgaaaatgaaaacaagtgctgaagatgaaatggaagagaaccgttttaatctggattttgttttgtcacacctggaaaatactttgcaaatatgttctaaattgaaaacaatttttttatgatcacatggttcactaccaaatgaccctcaaataagccagatgaaaatttgaagaaaaaggtcacccagttctctggaaaaaaaaaaaaaaaaaaaaaaaaaaaggatttatatgtgggtagttttttttttggtacaacacaatcattctgttagagcccacaaaattggtaaccttaaattgtgtgttttggtaagtaataactaactgtttcctcatagctagttctcaagctgcatgtaagattttaacgggaagagaaaataggcctggacctgaaggtctcaaatatgttgagaagaaagtatgaactataaggaacttgagatgtagatttattttgcaggaaatacgaggaaaataggaaagaagtgtttgccgcatcaagtgtaaagaatgatactgaggatttttacattttatgaaatgaaataatggcatttacaaaatgaaaaatgtagtttcacaactaagttttgttaacagagactgcatgctttgcttatagttcttaattttggttttgacattcatttaattttttccatgttaaatatgtagtttaattatttactcaaaataaacattgttcatgcttttaggcctttgggggaattgatttttatccacaggtagaaaatggtctttgcacacactacacttatttcaaatatacaatgtgctcccgaactttcgcattagtctttaaaattactctcaaaatggtattaaaaaaaaaaaaaaaagcaccctctcgtatttcattttggctttttcttaacaataccttgggccatttttttccagttcactatgttggtatactaacttttcttcagccttttaatgcgaagccaactagtagagcatgctttcaggatctgacagctctgctagtagagcgagtatttattaatacagaattaaccttcgcccctttaaagtcaagtctgtctaatctaactagcgcctcgctttgccttctcacaatgctcactagccatcatgctcacccttctcttccagatccacttcctcatgatactgtcttctaactgggcttacttaaaggatgcgagcaaaatgcaggcttaccaggatatcaaagcaaaggaagaacaggaactgcaagatatccagtctcggtcaaaagaacaactcaattcttacacataaatgtttgccagagtgtttcggccgacgtatttacagctctgacaaatcatcagacagctgctctgcagtacagatgtgtatcccaccaaactaatgtagatgtacaaacacttcactgtctgtctcaagctgctgggatgtatctctaggaaaaccttccagtgggtaaatctttttctttagaacaaatattggaggtttcatgttagccattttaaaaggcaacactttgacaaaatgatcgttcatactttgggaatttgtggcatgttcacatttattgctagggcaattctaccaagacactcaatggaatatgtcacactccttaatagggacctgtgactccttaataaggacctgtgacatgcccagcatcaagggataagaccgtaaattcacatatatgccatctgtcctcaagtgttatctacataggaaataaaatggaattgatgtaaagttccatttctgacagctgacatttattaaactttggatcaaagataatgtgattcttatgattgatttctcaaactagcttttccctcccaagtccaggacccattaatttcctgagccaatcagaaatatatttttcaataatgctaaaattagctacaattctgctgaccctactattaaagaatctggatgctggactcactgacaagctttccagaagcaattttataacagatttcattttaacaaaatactgatccaattttcattattcttgagaaatgtcagctttgccttaatgagtatttgctttaaatttctaagaatttatatcataactagagacccaaatatctttcacagaattttgttccataaatgtttttcttaattattaagaagtgttaccttattaaaatgaccaccattctaaaccatttttcagtggtctggatacgaagtttacagtttcataccaactatctaaaacctaattgcaaattgaccacagacctctaacctcctacttttatagacttgaatacttaagtaatttaaattagggttggtatttcatttttttcttatctaaatcttagtttcctggaataataaagtttgatgttcagcaagagaactgcttgagtttaagccattttcaaaagaaacttgccttttacattattgtgttccagaacattaagtgactgtaggtactgggtattagtgatggtaaactttgtgttgctctttatgaaatgatccatataactgttgggtgcatcagtgcttttcaaaggggctgcttactatagggttaactatgtatattcattgttaagagttaacttgtggtttggctgtttcctggattttataacatacatgtgcagaaatgtattcaaatgaaaggaagcatacctttatcaagatgctattaaaattgaacatcaagtataatatttcatttggattctcttttttggttaatgcctaaaaatgcctatttgggattttttttttttttaaattaagagaagctctcttctgtgtagaacagttgttccaaaatagcttagtgttttgttttcctgttgcatgacagatttaactattctttccagcagtggaggtgctgtcagagtccagtgttctagaagaggcagtgtctaaagcctaattttacttttctaattctggtagctattaccaggaatttttgaaagttttgtttaagtagtctaatattttttatgtaaagagcattaaattttgctatgtataaatttttgtaacctaacagtgaatcaatattttctatcagtgccaagggcttcctgtagttctattcaagtgttacaataaatatttgtagataatagtcaa

SEQ ID NO: 314983 - DNA, 2777 bp, Homo sapiens
cgcgcccttccgagggtcccgcccctcccccgctcaggtggcgcctcctcggccacctctgcgacgaagccgggacgctggaggtgggaggggcgcggcgcaggtgtccggaacgcccaggctgctttgaatgctgcatcaagtgtctgggaggagtcccctacgcctccctggtggccaccatcctctgcttctccggggtggccttattctgcggctgtgggcatgtggctctcgcaggcaccgtggcgattcttgagcaacacttctccaccaacgccagtgaccatgccttgctgagcgaggtgatacaactgatgcagtatgtcatctatggaattgcgtcctttttcttcttgtatgggatcattctgttggcagaaggcttttacaccacaagtgcagtgaaagaactgcacggtgagtttaaaacaaccgcttgtggccgatgcatcagtggaatgttcgttttcctcacctatgtgcttggagtggcctggctgggtgtgtttggtttctcagcggtgcccgtgtttatgttctacaacatatggtcaacttgtgaagtcatcaagtcaccgcagaccaacgggaccacgggtgtggagcagatctgtgtggatatccgacaatacggtatcattccttggaatgctttccccggaaaaatatgtggctctgccctggagaacatctgcaacacaaacgagttctacatgtcctatcacctgttcattgtggcctgtgcaggagctggtgccaccgtcattgccctgatccacttcctcatgatactgtcttctaactgggcttacttaaaggatgcgagcaaaatgcaggcttaccaggatatcaaagcaaaggaagaacaggaactgcaagatatccagtctcggtcaaaagaacaactcaattcttacacataaatgtttgccagagtgtttcggccgacgtatttacagctctgacaaatcatcagacagctgctctgcagtacagatgtgtatcccaccaaactaatgtagatgtacaaacacttcactgtctgtctcaagctgctgggatgtatctctaggaaaaccttccagtgggtaaatctttttctttagaacaaatattggaggtttcatgttagccattttaaaaggcaacactttgacaaaatgatcgttcatactttgggaatttgtggcatgttcacatttattgctagggcaattctaccaagacactcaatggaatatgtcacactccttaatagggacctgtgactccttaataaggacctgtgacatgcccagcatcaagggataagaccgtaaattcacatatatgccatctgtcctcaagtgttatctacataggaaataaaatggaattgatgtaaagttccatttctgacagctgacatttattaaactttggatcaaagataatgtgattcttatgattgatttctcaaactagcttttccctcccaagtccaggacccattaatttcctgagccaatcagaaatatatttttcaataatgctaaaattagctacaattctgctgaccctactattaaagaatctggatgctggactcactgacaagctttccagaagcaattttataacagatttcattttaacaaaatactgatccaattttcattattcttgagaaatgtcagctttgccttaatgagtatttgctttaaatttctaagaatttatatcataactagagacccaaatatctttcacagaattttgttccataaatgtttttcttaattattaagaagtgttaccttattaaaatgaccaccattctaaaccatttttcagtggtctggatacgaagtttacagtttcataccaactatctaaaacctaattgcaaattgaccacagacctctaacctcctacttttatagacttgaatacttaagtaatttaaattagggttggtatttcatttttttcttatctaaatcttagtttcctggaataataaagtttgatgttcagcaagagaactgcttgagtttaagccattttcaaaagaaacttgccttttacattattgtgttccagaacattaagtgactgtaggtactgggtattagtgatggtaaactttgtgttgctctttatgaaatgatccatataactgttgggtgcatcagtgcttttcaaaggggctgcttactatagggttaactatgtatattcattgttaagagttaacttgtggtttggctgtttcctggattttataacatacatgtgcagaaatgtattcaaatgaaaggaagcatacctttatcaagatgctattaaaattgaacatcaagtataatatttcatttggattctcttttttggttaatgcctaaaaatgcctatttgggattttttttttttttaaattaagagaagctctcttctgtgtagaacagttgttccaaaatagcttagtgttttgttttcctgttgcatgacagatttaactattctttccagcagtggaggtgctgtcagagtccagtgttctagaagaggcagtgtctaaagcctaattttacttttctaattctggtagctattaccaggaatttttgaaagttttgtttaagtagtctaatattttttatgtaaagagcattaaattttgctatgtataaatttttgtaacctaacagtgaatcaatattttctatcagtgccaagggcttcctgtagttctattcaagtgttacaataaatatttgtagataatagtcaa

SEQ ID NO: 314984 - DNA, 600 bp, Homo sapiens
aagcatgttcaacagaaggaaagataacatgatcctaaaagcttttactcctgcagctatgtctcccaagataataataattgtaaaactcaaaagctacttacccatggcaaataggaagaagctcagtatcggctcctcccaccataacccccacttcctccactgcctcctggaccatagtttcctcgtgccgaattcggcacgaggagaactagtctcgagttttttttttttttttaaattaagagaagctctcttctgtgtagaacagttgttccaaaatagcttagtgttttgttttcctgttgcatgacagatttaactattctttccagcagtggaggtgctgtcagagtccagtgttctagaagaggcagtgtctaaagcctaattttacttttctaattctggtagctattaccaggaatttttgaaagttttgtttaagtagtctaatattttttatgtaaagagcattaaattttgctatgtataaatttttgtaacctaacagtgaatcaatattttctatcagtgccaagggcttcctgtagttctattcaagtgttacaataaatatttgtagataatagtcaa

SEQ ID NO: 314985 - DNA, 783 bp, Homo sapiens
gagttaagtagtttgtgccacccaggagttgcaccttttctcaggttccactagatggtatgacagtggaattagccccaggcagtgtctaaaatcccacttctgttgctgaccctgtggcctcagaaaagggttctttttgctttgtttcctctttatcagggtgttggaagaaggatctctaagtgtctctctgtgatcctctgagcaaggaggtagataaaattgttagcttatttaattttcacttttactaagactctatttttattttagccgtataggtgagggacttgatcaggctctgccctgtctgacagaactcattctcaccaataatagtctcgtggaactggtaagttgcacagaaggaaaatgtatttggtgggtggggttaaaggtactatgtgcttcctacagaaaatttacaaaatctagaaaatgatctcagtatcctctttcttgtctttttcttaattcaggatctgggccttttgggttctgcagccgtatgttgcaaatattttcctacttttacttgacttttgacttaggatgtcttgttagagaagttcctaatttaggtgcagtccaatgaatcaatcttcttctttattgtagcccttttgatgtttaaatttcccctattccagggttataaactcctatgttgttttctacaattgcagtgttcaatatagtaccagtaactacaggtggctacttataattgagatgtgctagaactataaaatacacactggatttcaaagacttaagtgc

SEQ ID NO: 314986 - DNA, 1061 bp, Homo sapiens
  misc_feature (18)..(18): n is a, c, g, or t
  misc_feature (34)..(34): n is a, c, g, or t
  misc_feature (39)..(40): n is a, c, g, or t
cagcgggggcaaacttanggctaggtacgaggcngggtnngccacgggctttccacagcgcgggggaacgggaggctgcaggatggtcaagctgacggcggagctgatcgagcaggcggcgcagtacaccaacgcggtgcgcgaccgggagctggacctccgggggtataaaattcccgtcattgaaaatctaggtgctacgttagaccagtttgatgctattgatttttctgacaatgagatcaggaaactggatggttttcctttgttgagaagactgaaaacattgttagtgaacaacaacagaatatgccgtataggtgagggacttgatcaggctctgccctgtctgacagaactcattctcaccaataatagtctcgtggaactgggtgatctggaccctctggcatctctcaaatcgctgacttacctaagtatcctaagaaatccggtaaccaataagaagcattacagattgtatgtgatttataaagttccgcaagtcagagtactggatttccagaaagtgaaactaaaagagcgtcaggaagcagagaaaatgttcaagggcaaacggggtgcacagcttgcaaaggatattgccaggagaagcaaaacttttaatccaggtgctggtttgccaactgacaaaaagaaaggtgggccatctccaggggatgtagaagcaatcaagaatgccatagcaaatgcttcaactctggctgaagtggagaggctgaaggggttgctgcagtctggtcagatccctggcagagaacgcagatcagggcccactgatgatggtgaagaagagatggaagaagacacagtcacaaacgggtcctgagcagtgaggcagatgtataataataggccctcttggaacaagtcttgcttttcgaacatggtataatagccttgtttgtgttagcaaagtggaatctatcagcattgttgaaatgcttaagactgctgctgataattttgtaatataagttttgaaatctaaatgtcaattttctacaaattataaaaataaactccactcactatgctac

SEQ ID NO: 314987 - DNA, 1111 bp, Homo sapiens
gtgctgcctggcggcggggcgcggggcacgctgggacgtctcgctggcgggaggccacgggctttccacagcgcgggggaacgggaggctgcaggatggtcaagctgacggcggagctgatcgagcaggcggcgcagtacaccaacgcggtgcgcgaccgggagctggacctccgggggtataaaattcccgtcattgaaaatctaggtgctacgttagaccagtttgatgctattgatttttctgacaatgagatcaggaaactggatggttttcctttgttgagaagactgaaaacattgttagtgaacaacaacagaatatgccgtataggtgagggacttgatcaggctctgccctgtctgacagaactcattctcaccaataatagtctcgtggaactgggtgatctggaccctctggcatctctcaaatcgctgacttacctaagtatcctaagaaatccggtaaccaataagaagcattacagattgtatgtgatttataaagttccgcaagtcagagtactggatttccagaaagtgaaactaaaagagcgtcaggaagcagagaaaatgttcaagggcaaacggggtgcacagcttgcaaaggatattgccaggagaagcaaaacttttaatccaggtgctggtttgccaactgacaaaaagaaaggtgggccatctccaggggatgtagaagcaatcaagaatgccatagcaaatgcttcaactctggctgaagtggagaggctgaaggggttgctgcagtctggtcagatccctggcagagaacgcagatcagggcccactgatgatggtgaagaagagatggaagaagacacagtcacaaacgggtcctgagcagtgaggcagatgtataataataggccctcttggaacaagtcttgcttttcgaacatggtataatagccttgtttgtgttagcaaagtggaatctatcagcattgttgaaatgcttaagactgctgctgataattttgtaatataagttttgaaatctaaatgtcaattttctacaaattataaaaataaactccactcactatgctacaaaaaaaaacacgacaccaccgcgacccaaaaacaag

SEQ ID NO: 314988 - DNA, 994 bp, Homo sapiens
  misc_feature (943)..(943): n is a, c, g, or t
gtgctgcctggcggcggggcgcggggcacgctgggacgtctcgctggcgggaggccacgggctttccacagcgcgggggaacgggaggctgcaggatggtcaagctgacggcggagctgatcgagcaggcggcgcagtacaccaacgcggtgcgcgaccgggagctggacctccgggggtataaaattcccgtcattgaaaatctaggtgctacgttagaccagtttgatgctattgatttttctgacaatgagatcaggaaactggatggttttcctttgttgagaagactgaaaacattgttagtgaacaacaacagaatatgccgtataggtgagggacttgatcaggctctgccctgtctgacagaactcattctcaccaataatagtctcgtggaactgggtgatctggaccctctggcatctctcaaatcgctgacttacctaagtatcctaagaaatccggtaaccaataagaagcattacagattgtatgtgatttataaagttccgcaagtcagagtactggatttccagaaagtgaaactaaaagagcgtcaggaagcagagaaaatgttcaagggcaaacggggtgcacagcttgcaaaggatattgccaggagaagcaaaacttttaatccaggtgctggtttgccaactgacaaaaagaaaggtgggccatctccaggggatgtagaagcaatcaagaatgccatagcaaatgcttcaactctggctgaagtggagaggctgaaggggttgctgcagtctggtcagatccctggcagagaacgcagatcagggcccactgatgatggtgaagaagagatggaagaagacacagtcacaaacgggtcctgagcagtgaggcagatgtataataataggccctcttggaacaagtcttgcttttcgaacatggtataatagccttgtttccnttccccccccccaccccctccccactgcccaaacgccccccccccccgccc

SEQ ID NO: 314989 - DNA, 1025 bp, Homo sapiens
gagttaagtagtttgtgccacccaggagttgcaccttttctcaggttccactagatggtatgacagtggaattagccccaggcagtgtctaaaatcccacttctgttgctgaccctgtggcctcagaaaagggttctttttgctttgtttcctctttatcagggtgttggaagaaggatctctaagtgtctctctgtgatcctctgagcaaggaggtagataaaattgttagcttatttaattttcacttttactaagactctatttttattttagccgtataggtgagggacttgatcaggctctgccctgtctgacagaactcattctcaccaataatagtctcgtggaactgggtgatctggaccctctggcatctctcaaatcgctgacttacctaagtatcctaagaaatccggtaaccaataagaagcattacagattgtatgtgatttataaagttccgcaagtcagagtactggatttccagaaagtgaaactaaaagagcgtcaggaagcagagaaaatgttcaagggcaaacggggtgcacagcttgcaaaggatattgccaggagaagcaaaacttttaatccaggtgctggtttgccaactgacaaaaagaaaggtgggccatctccaggggatgtagaagcaatcaagaatgccatagcaaatgcttcaactctggctgaagtggagaggctgaaggggttgctgcagtctggtcagatccctggcagagaacgcagatcagggcccactgatgatggtgaagaagagatggaagaagacacagtcacaaacgggtcctgagcagtgaggcagatgtataataataggccctcttggaacaagtcttgcttttcgaacatggtataatagccttgtttgtgttagcaaagtggaatctatcagcattgttgaaatgcttaagactgctgctgataattttgtaatataagttttgaaatctaaatgtcaattttctacaaattataaaaataaactccactcactatgctac

SEQ ID NO: 314990 - DNA, 2100 bp, Homo sapiens
gtgctgcctggcggcggggcgcggggcacgctgggacgtctcgctggcgggaggccacgggctttccacagcgcgggggaacgggaggctgcaggatggtcaagctgacggcggagctgatcgagcaggcggcgcagtacaccaacgcggtgcgcgaccgggagctggacctccgggggtataaaattcccgtcattgaaaatctaggtgctacgttagaccagtttgatgctattgatttttctgacaatgagatcaggaaactggatggttttcctttgttgagaagactgaaaacattgttagtgaacaacaacagaatatgccgtataggtgagggacttgatcaggctctgccctgtctgacagaactcattctcaccaataatagtctcgtggaactgggtgatctggaccctctggcatctctcaaatcgctgacttacctaagtatcctaagaaatccggtaaccaataagaagcattacagattgtatgtgatttataaagttccgcaagtcagagtactggatttccagaaagtgaaactaaaagtaagtagtaatctgttgcttgtgagccattatagagttgtgtgtttttctttatatttttgttactgattattaaaattgtctaaatgagtaaattttaccattagtttgtaataaaagtgggagggaaaatgttacatcacatttttttctaatagcagagtttatgatagaacttttaagttggagctctcttatgtaatgctggctattccgaagttcgcaaagtgctgaggccacggtgagcagtcttaacagtggattgtctgcctagatacgttcccagcggagaacttaatgtaacctactttcgtgcagctccgtgtgttaggatgatttttccctttattaggaattcattattttattattcatttaattgccttcttagttccctgggatcccctccttggagctaggagaatgaactttcttcagggagctctaccaaagaaagaagaccactgtgtcttctcttaatttgaaattgctttttggtattttcaccagcccggagtactgtaggagagttcgcttccatgtcttctgaggaatgcatctaaatgcatgtggtattcctatttccattaactctgtgtgtggtgtcgctgtaggagcgtcaggaagcagagaaaatgttcaagggcaaacggggtgcacagcttgcaaaggatattgccaggagaagcaaaacgtaagacacggatatccaacttaactctacttcaccttcagaaacatgatctgatctgtctggcagttcgtctcctacaaaattaaccaaaaactctgacatattaatgtggtattaaatttgagtgcttatagtccatgtacatcaatggtccacacatcacaagaaatttctaccagcttagcagagcaaatatttcagtagtcagtcttcatgtgataccatgtacatcctattttctatataggaagatgaactggatggtgtttctgaaggagagagttcttgtatcagtttgttaacaaagataagatactacactggttgaattactttcaaaagcttttgaaagtaaaagagaagcaacttctgttggtctaggtctaacagttatgttcttccccctcttaagttttaatccaggtgctggtttgccaactgacaaaaagaaaggtgggccatctccaggggatgtagaagcaatcaagaatgccatagcaaatgcttcaactctggctgaagtggagaggctgaaggggttgctgcagtctggtcagatccctggcagagaacgcagatcagggcccactgatgatggtgaagaagagatggaagaagacacagtcacaaacgggtcctgagcagtgaggcagatgtataataataggccctcttggaacaagtcttgcttttcgaacatggtataatagccttgtttgtgttagcaaagtggaatctatcagcattgttgaaatgcttaagactgctgctgataattttgtaatataagttttgaaatctaaatgtcaattttctacaaattataaaaataaactccactcactatgctac

SEQ ID NO: 314991 - DNA, 2010 bp, Homo sapiens
tgccagatgagcatccggttaagctcctgggagccttctgttagcgccgtgcctcttgacaggcacgggtgacttcattacttcctgggtataaaattcccgtcattgaaaatctaggtgctacgttagaccagtttgatgctattgatttttctgacaatgagatcaggaaactggatggttttcctttgttgagaagactgaaaacattgttagtgaacaacaacagaatatgccgtataggtgagggacttgatcaggctctgccctgtctgacagaactcattctcaccaataatagtctcgtggaactgggtgatctggaccctctggcatctctcaaatcgctgacttacctaagtatcctaagaaatccggtaaccaataagaagcattacagattgtatgtgatttataaagttccgcaagtcagagtactggatttccagaaagtgaaactaaaagtaagtagtaatctgttgcttgtgagccattatagagttgtgtgtttttctttatatttttgttactgattattaaaattgtctaaatgagtaaattttaccattagtttgtaataaaagtgggagggaaaatgttacatcacatttttttctaatagcagagtttatgatagaacttttaagttggagctctcttatgtaatgctggctattccgaagttcgcaaagtgctgaggccacggtgagcagtcttaacagtggattgtctgcctagatacgttcccagcggagaacttaatgtaacctactttcgtgcagctccgtgtgttaggatgatttttccctttattaggaattcattattttattattcatttaattgccttcttagttccctgggatcccctccttggagctaggagaatgaactttcttcagggagctctaccaaagaaagaagaccactgtgtcttctcttaatttgaaattgctttttggtattttcaccagcccggagtactgtaggagagttcgcttccatgtcttctgaggaatgcatctaaatgcatgtggtattcctatttccattaactctgtgtgtggtgtcgctgtaggagcgtcaggaagcagagaaaatgttcaagggcaaacggggtgcacagcttgcaaaggatattgccaggagaagcaaaacgtaagacacggatatccaacttaactctacttcaccttcagaaacatgatctgatctgtctggcagttcgtctcctacaaaattaaccaaaaactctgacatattaatgtggtattaaatttgagtgcttatagtccatgtacatcaatggtccacacatcacaagaaatttctaccagcttagcagagcaaatatttcagtagtcagtcttcatgtgataccatgtacatcctattttctatataggaagatgaactggatggtgtttctgaaggagagagttcttgtatcagtttgttaacaaagataagatactacactggttgaattactttcaaaagcttttgaaagtaaaagagaagcaacttctgttggtctaggtctaacagttatgttcttccccctcttaagttttaatccaggtgctggtttgccaactgacaaaaagaaaggtgggccatctccaggggatgtagaagcaatcaagaatgccatagcaaatgcttcaactctggctgaagtggagaggctgaaggggttgctgcagtctggtcagatccctggcagagaacgcagatcagggcccactgatgatggtgaagaagagatggaagaagacacagtcacaaacgggtcctgagcagtgaggcagatgtataataataggccctcttggaacaagtcttgcttttcgaacatggtataatagccttgtttgtgttagcaaagtggaatctatcagcattgttgaaatgcttaagactgctgctgataattttgtaatataagttttgaaatctaaatgtcaattttctacaaattataaaaataaactccactcactatgctac

SEQ ID NO: 314992 - DNA, 994 bp, Homo sapiens
gtgctgcctggcggcggggcgcggggcacgctgggacgtctcgctggcgggaggccacgggctttccacagcgcgggggaacgggaggctgcaggatggtcaagctgacggcggagctgatcgagcaggcggcgcagtacaccaacgcggtgcgcgaccgggagctggacctccgggggtataaaattcccgtcattgaaaatctaggtgctacgttagaccagtttgatgctattgatttttctgacaatgagatcaggaaactggatggttttcctttgttgagaagactgaaaacattgttagtgaacaacaacagaatatgccgtataggtgagggacttgatcaggctctgccctgtctgacagaactcattctcaccaataatagtctcgtggaactgggtgatctggaccctctggcatctctcaaatcgctgacttacctaagtatcctaagaaatccggtaaccaataagaagcattacagattgtatgtgatttataaagttccgcaagtcagagtactggatttccagaaagtgaaactaaaattttaatccaggtgctggtttgccaactgacaaaaagaaaggtgggccatctccaggggatgtagaagcaatcaagaatgccatagcaaatgcttcaactctggctgaagtggagaggctgaaggggttgctgcagtctggtcagatccctggcagagaacgcagatcagggcccactgatgatggtgaagaagagatggaagaagacacagtcacaaacgggtcctgagcagtgaggcagatgtataataataggccctcttggaacaagtcttgcttttcgaacatggtataatagccttgtttgtgttagcaaagtggaatctatcagcattgttgaaatgcttaagactgctgctgataattttgtaatataagttttgaaatctaaatgtcaattttctacaaattataaaaataaactccactcactatgctac

SEQ ID NO: 314993 - DNA, 720 bp, Homo sapiens
gtgctgcctggcggcggggcgcggggcacgctgggacgtctcgctggcgggaggccacgggctttccacagcgcgggggaacgggaggctgcaggatggtcaagctgacggcggagctgatcgagcaggcggcgcagtacaccaacgcggtgcgcgaccgggagctggacctccgggtatcctaagaaatccggtaaccaataagaagcattacagattgtatgtgatttataaagttccgcaagtcagagtactggatttccagaaagtgaaactaaaattttaatccaggtgctggtttgccaactgacaaaaagaaaggtgggccatctccaggggatgtagaagcaatcaagaatgccatagcaaatgcttcaactctggctgaagtggagaggctgaaggggttgctgcagtctggtcagatccctggcagagaacgcagatcagggcccactgatgatggtgaagaagagatggaagaagacacagtcacaaacgggtcctgagcagtgaggcagatgtataataataggccctcttggaacaagtcttgcttttcgaacatggtataatagccttgtttgtgttagcaaagtggaatctatcagcattgttgaaatgcttaagactgctgctgataattttgtaatataagttttgaaatctaaatgtcaattttctacaaattataaaaataaactccactcactatgctac

SEQ ID NO: 314994 - DNA, 2077 bp, Homo sapiens
gtgctgcctggcggcggggcgcggggcacgctgggacgtctcgctggcgggaggccacgggctttccacagcgcgggggaacgggaggctgcaggatggtcaagctgacggcggagctgatcgagcaggcggcgcagtacaccaacgcggtgcgcgaccgggagctggacctccgggggtataaaattcccgtcattgaaaatctaggtgctacgttagaccagtttgatgctattgatttttctgacaatgagatcaggaaactggatggttttcctttgttgagaagactgaaaacattgttagtgaacaacaacagaatatgccgtataggtgagggacttgatcaggctctgccctgtctgacagaactcattctcaccaataatagtctcgtggaactgggtgatctggaccctctggcatctctcaaatcgctgacttacctaagtatcctaagaaatccggtaaccaataagaagcattacagattgtatgtgatttataaagttccgcaagtcagagtactggatttccagaaagtgaaactaaaagtaagtagtaatctgttgcttgtgagccattatagagttgtgtgtttttctttatatttttgttactgattattaaaattgtctaaatgagtaaattttaccattagtttgtaataaaagtgggagggaaaatgttacatcacatttttttctaatagcagagtttatgatagaacttttaagttggagctctcttatgtaatgctggctattccgaagttcgcaaagtgctgaggccacggtgagcagtcttaacagtggattgtctgcctagatacgttcccagcggagaacttaatgtaacctactttcgtgcagctccgtgtgttaggatgatttttccctttattaggaattcattattttattattcatttaattgccttcttagttccctgggatcccctccttggagctaggagaatgaactttcttcagggagctctaccaaagaaagaagaccactgtgtcttctcttaatttgaaattgctttttggtattttcaccagcccggagtactgtaggagagttcgcttccatgtcttctgaggaatgcatctaaatgcatgtggtattcctatttccattaactctgtgtgtggtgtcgctgtaggagcgtcaggaagcagagaaaatgttcaagggcaaacggggtgcacagcttgcaaaggatattgccaggagaagcaaaacgtaagacacggatatccaacttaactctacttcaccttcagaaacatgatctgatctgtctggcagttcgtctcctacaaaattaaccaaaaactctgacatattaatgtggtattaaatttgagtgcttatagtccatgtacatcaatggtccacacatcacaagaaatttctaccagcttagcagagcaaatatttcagtagtcagtcttcatgtgataccatgtacatcctattttctatataggaagatgaactggatggtgtttctgaaggagagagttcttgtatcagtttgttaacaaagataagatactacactggttgaattactttcaaaagcttttgaaagtaaaagagaagcaacttctgttggtctaggtctaacagttatgttcttccccctcttaagttttaatccaggtgctggtttgccaactgacaaaaagaaaggtgggccatctccaggggatgtagaagcaatcaaggtaatcatgtgttaggattcttggactggaatgagctaagatgggttcagaacacaaagctggataataaacatgttccgaacattaaaacaaaacaaacacaacaaaacacaaaaacacaaaaaaaacaaaaaacataaaaaaaaaataaacaaaaataaatcaaacaaaacaataaaaaataatacaaacaataaaacacaaataaagaagaaaagaacaaagacagataaaagaaacaaaacaagacgaacgggaagacataagcagcgggcatcggggaggcgccgggtcagcaacaagtggggggggagaggaggagcgccaggtgtggttggggg

SEQ ID NO: 314995 - DNA, 1030 bp, Homo sapiens
gtgctgcctggcggcggggcgcggggcacgctgggacgtctcgctggcgggaggccacgggctttccacagcgcgggggaacgggaggctgcaggatggtcaagctgacggcggagctgatcgagcaggcggcgcagtacaccaacgcggtgcgcgaccgggagctggacctccgggggtataaaattcccgtcattgaaaatctaggtgctacgttagaccagtttgatgctattgatttttctgacaatgagatcaggaaactggatggttttcctttgttgagaagactgaaaacattgttagtgaacaacaacagaatatgccgtataggtgagggacttgatcaggctctgccctgtctgacagaactcattctcaccaataatagtctcgtggaactgggtgatctggaccctctggcatctctcaaatcgctgacttacctaagtatcctaagaaatccggtaaccaataagaagcattacagattgtatgtgatttataaagttccgcaagtcagagtactggatttccagaaagtgaaactaaaagagcgtcaggaagcagagaaaatgttcaagggcaaacggggtgcacagcttgcaaaggatattgccaggagaagcaaaacttttaatccaggtgctggtttgccaactgacaaatgccatagcaaatgcttcaactctggctgaagtggagaggctgaaggggttgctgcagtctggtcagatccctggcagagaacgcagatcagggcccactgatgatggtgaagaagagatggaagaagacacagtcacaaacgggtcctgagcagtgaggcagatgtataataataggccctcttggaacaagtcttgcttttcgaacatggtataatagccttgtttgtgttagcaaagtggaatctatcagcattgttgaaatgcttaagactgctgctgataattttgtaatataagttttgaaatctaaatgtcaattttctacaaattataaaaataaactccactcactatgctac

SEQ ID NO: 314996 - DNA, 2077 bp, Homo sapiens
ttgggcttgttgctagagagtaaaaattcagtaaataatgaaaagacaacttgcttcaaaagcactctccatttcagaatctcaaaatagcgtgtggtattcgcgttcttacctgtggctattgcttgacagggtgatctggaccctctggcatctctcaaatcgctgacttacctaagtatcctaagaaatccggtaaccaataagaagcattacagattgtatgtgatttataaagttccgcaagtcagagtactggatttccagaaagtgaaactaaaagtaagtagtaatctgttgcttgtgagccaccgcgcctggccgaagactgttttcatctaataacaccaaggtgttacttgctttagtatgaacatttgcactgatggagcaatagtgggtagaactgcgggcacctcagtaggagtcaaggcagcagcctaaataatagctgttacattcttccctgctctgcactcccagtagcgtgcataccagtttcacttaagagtgtcctggatgcagcagtaaagataattaaatatcactcctcgggcacacgtctctttgatattctgggtgacagaaagggggtgcacatgtctgcattcttgagttaggtggttatctccatgcactggtgcagttgtttcagttgagaggcagctacctgtcttctcaaacatgatgaagtgagcctgtcacttcagggaaaacaattgaaaattcaaggtttaaagcaaaaattaaaatttagaaaacttgtatccactgccgtaacctgccagcttcccagtactttaagacttttctggggaactcaatagtaatgttatgtgcatgtgaattaatgggtgtgacatttttgatgtgtaattacatggctcaacgtttggaagatctgcaaaagtcggtgaaccacagttttccaaatgatacgaaatcatgtacgggtaaaagatttgttcaaagtacaagataaaccaagtaagagtatgaaaagttcattgataaggtttcagacttttacactgccatctaaccttgaggaagctaccatttgtcaagttttagcatagtatctaaaaagagcatccaccattatctgcacaggctgttaaaatcttcctcccttttctaactgtgtgcctgtgtggccagattttcttcatgcccgtcaatcaaaatgccgtattgcacaggatggaatgatgaaaccaatacaataattcagctgactgatgttaagtcagacattaagtcaacaataacaattgtttcccaaacaattgaaggagttacaacttttttttccccctggaatacattgagcaaaatacctgccataaattgttgaacaaatgtaacattttttggtagttgttggcatatttccctaatttagagacaataaagtcattgaactgttgccagtatatggcatgtagtaggtgcccagatgtttttgagtatttccggtttctttgcctacggtagtgccatgaaaagcacatgagtataggctttaccttcaccaaaaatgaattattatcaactacaatgggaggcaacaattttgaaatctttgtgacccttttcctttgaaattgagcatcccttccagtacctgccaaagacagactagaccgtccctggacgataagctcctcaaaggcaggtgctgcttttgatctttttgtacctacttcagtgtgtaacaaacagtggccacagaacaaacacttgcatgctaagggaatggattctctaaaattgatactacttttgctttggtggttttctttagggcccactgatgatggtgaagaagagatggaagaagacacagtcacaaacgggtcctgagcagtgaggcagatgtataataataggccctcttggaacaagtcttgcttttcgaacatggtataatagccttgtttgtgttagcaaagtggaatctatcagcattgttgaaatgcttaagactgctgctgataattttgtaatataagttttgaaatctaaatgtcaattttctacaaattataaaaataaactccactcactatgctac

SEQ ID NO: 314997 - DNA, 611 bp, Homo sapiens
ttttactttcgaagatttgctgtctggcaaatccttttgactgatcagtagggaccctcgttttataatattgcctccttaaattattcagtaacataattgcaaatagttacttcacttagctacgattttagaacatgtggagtgattatttataagaaggcctgcatctcttcaccaattttagaaatttgtggtttggcttctagttttatttttgtgggccaataacattcttccccctacaccaaagtatttaatgttcctgatggagaagttgctgtgaatttctgtaggtgattgacacttagttttctgggtagctgatacttggttgaagttaatcatccatctccattgccctctgtcctccagaaatgccatagcaaatgcttcaactctggctgaagtggagaggctgaaggggttgctgcagtctggtcagatccctggcagagaacgcagatcaggtgaacaaatggtgttctttgtatgttcaaattaatgttacactcagagtgtaactcacaaccatttagatgccatgactctggaatgccagagtagtgcctccttacatcaaatctaatatatgaaatctctttaaatgc

SEQ ID NO: 314998 - DNA, 619 bp, Homo sapiens
atacatatgtaacaaacctgcaagttgtgcacatgtaccctagaacttaaaagtataatttaaaaaaaaagtgccttttacaaagaaagattgaatatatttccttaatgttaaattgttacaatgttgcaatgtgaagaatgtgaatgttcccttgatttataggttccttagactattcaaacagacctcttgagtgctgtgccatgaacaagtttgccattgtgtcattccttttcttgtagtatcctaagaaatccggtaaccaataagaagcattacagattgtatgtgatttataaagttccgcaagtcagagtactggatttccagaaagtgaaactaaaagtaagtagtaatctgttgcttgtgagccattatagagttgtgtgtttttctttatatttttgttactgattattaaaattgtctaaatgagtaaattttaccattagtttgtaataaaagtgggagggaaaatgttacatcacatttttttctaatagcagagtttatgatagaacttttaagttggagctctcttatgtaatgctggctattccgaagttcgcaaagtgctgaggccacggtgagcagtcttaacagtggattgtctgcc

SEQ ID NO: 314999 - DNA, 435 bp, Homo sapiens
acttagttttctgggtagctgatacttggttgaagttaatcatccatctccattgccctctgtcctccagaaatgccatagcaaatgcttcaactctggctgaagtggagaggctgaaggggttgctgcagtctggtcagatccctggcagagaacgcagatcagggcccactgatgatggtgaagaagagatggaagaagacacagtcacaaacgggtcctgagcagtgaggcagatgtataataataggccctcttggaacaagtcttgcttttcgaacatggtataatagccttgtttgtgttagcaaagtggaatctatcagcattgttgaaatgcttaagactgctgctgataattttgtaatataagttttgaaatctaaatgtcaattttctacaaattataaaaataaactccactcactatgctac

SEQ ID NO: 315000 - DNA, 1074 bp, Homo sapiens
gtgctgcctggcggcggggcgcggggcacgctgggacgtctcgctggcgggaggccacgggctttccacagcgcgggggaacgggaggctgcaggatggtcaagctgacggcggagctgatcgagcaggcggcgcagtacaccaacgcggtgcgcgaccgggagctggacctccgggggtataaaattcccgtcattgaaaatctaggtgctacgttagaccagtttgatgctattgatttttctgacaatgagatcaggaaactggatggttttcctttgttgagaagactgaaaacattgttagtgaacaacaacagaatatgccgtataggtgagggacttgatcaggctctgccctgtctgacagaactcattctcaccaataatagtctcgtggaactgggtgatctggaccctctggcatctctcaaatcgctgacttacctaagtatcctaagaaatccggtaaccaataagaagcattacagattgtatgtgatttataaagttccgcaagtcagagtactggatttccagaaagtgaaactaaaagagcgtcaggaagcagagaaaatgttcaagggcaaacggggtgcacagcttgcaaaggatattgccaggagaagcaaaacttttaatccaggtgctggtttgccaactgacaaaaagaaaggtgggccatctccaggggatgtagaagcaatcaagaatgccatagcaaatgcttcaactctggctgaagtggagaggctgaaggggttgctgcagtctggtcagatccctggcagagaacgcagatcagggcccactgatgatggtgaagaagagatggaagaagacacagtcacaaacgggtcctgagcagtgaggcagatgtataataataggccctcttggaacaagtcttgcttttcgaacatggtataatagccttgtttgtgttagcaaagtggaatctatcagcattgttgaaatgcttaagactgctgctgataattttgtaatataagttttgaaatctaaatgtcaattttctacaaattataaaaataaactccactcactatgctac

SEQ ID NO: 315001 - DNA, 1208 bp, Homo sapiens
gtgctgcctggcggcggggcgcggggcacgctgggacgtctcgctggcgggaggccacgggctttccacagcgcgggggaacgggaggctgcaggatggtcaagctgacggcggagctgatcgagcaggcggcgcagtacaccaacgcggtgcgcgaccgggagctggacctccgggggtataaaattcccgtcattgaaaatctaggtgctacgttagaccagtttgatgctattgatttttctgacaatgagatcaggaaactggatggttttcctttgttgagaagactgaaaacattgttagtgaacaacaacagaatatgccgtataggtgagggacttgatcaggctctgccctgtctgacagaactcattctcaccaataatagtctcgtggaactgggtgatctggaccctctggcatctctcaaatcgctgacttacctaagtatcctaagaaatccggtaaccaataagaagcattacagattgtatgtgatttataaagttccgcaagtcagagtactggatttccagaaagtgaaactaaaagagcgtcaggaagcagagaaaatgttcaagggcaaacggggtgcacagcttgcaaaggatattgccaggagaagcaaaacttttaatccaggtgctggtttgccaactgacaaaaagaaaggtgggccatctccaggggatgtagaagcaatcaagaatgccatagcaaatgcttcaactctggctgaagtggagaggctgaaggggttgctgcagtctggtcagatccctggcagagaacgcagatcagggcccactgatgatggtgaagaagagatggaagaagacacagtcacaaacgggtcctgagcagtgaggcagatgtataataataggccctcttggaacaagtcttgcttttcgaacatggtataatagccttgtttgtgttagcaaagtggaatctatcagcattgttgaaatgcttaagactgctgctgataattttgtaatataagttttgaaatctaaatgtcaattttctacaaattataaaaataaactccactcactatgctacaaaaaaaaacacaaaaagaaaaaaaaaagaaagagaaaagaaaagagaaataggaagaaaagagaaggaagaagggggagaggatagaggggaaaatgagggaagggaggagacgagatagtagaagggagagg

SEQ ID NO: 315002 - DNA, 1085 bp, Homo sapiens
tgccagatgagcatccggttaagctcctgggagccttctgttagcgccgtgcctcttgacaggcacgggtgacttcattacttcctgattctaagcttcatggcactggggacttgagactcgttcagcgttttctctctagtatcttaaacagcggcaagtcatgcgtgacccgacataggtgctagggtataaaattcccgtcattgaaaatctaggtgctacgttagaccagtttgatgctattgatttttctgacaatgagatcaggaaactggatggttttcctttgttgagaagactgaaaacattgttagtgaacaacaacagaatatgccgtataggtgagggacttgatcaggctctgccctgtctgacagaactcattctcaccaataatagtctcgtggaactgggtgatctggaccctctggcatctctcaaatcgctgacttacctaagtatcctaagaaatccggtaaccaataagaagcattacagattgtatgtgatttataaagttccgcaagtcagagtactggatttccagaaagtgaaactaaaagagcgtcaggaagcagagaaaatgttcaagggcaaacggggtgcacagcttgcaaaggatattgccaggagaagcaaaacttttaatccaggtgctggtttgccaactgacaaaaagaaaggtgggccatctccaggggatgtagaagcaatcaagaatgccatagcaaatgcttcaactctggctgaagtggagaggctgaaggggttgctgcagtctggtcagatccctggcagagaacgcagatcagggcccactgatgatggtgaagaagagatggaagaagacacagtcacaaacgggtcctgagcagtgaggcagatgtataataataggccctcttggaacaagtcttgcttttcgaacatggtataatagccttgtttgtgttagcaaagtggaatctatcagcattgttgaaatgcttaagactgctgctgataattttgtaatataagttttgaaatctaaatgtcaattttctacaaattataaaaataaactccactcactatgctac

SEQ ID NO: 315003 - DNA, 754 bp, Homo sapiens
  misc_feature (18)..(18): n is a, c, g, or t
  misc_feature (34)..(34): n is a, c, g, or t
  misc_feature (39)..(40): n is a, c, g, or t
cagcgggggcaaacttanggctaggtacgaggcngggtnngccacgggctttccacagcgcgggggaacgggaggctgcaggatggtcaagctgacggcggagctgatcgagcaggcggcgcagtacaccaacgcggtgcgcgaccgggagctggacctccgggggtgatctggaccctctggcatctctcaaatcgctgacttacctaagtatcctaagaaatccggtaaccaataagaagcattacagattgtatgtgatttataaagttccgcaagtcagagtactggatttccagaaagtgaaactaaaattttaatccaggtgctggtttgccaactgacaaaaagaaaggtgggccatctccaggggatgtagaagcaatcaagaatgccatagcaaatgcttcaactctggctgaagtggagaggctgaaggggttgctgcagtctggtcagatccctggcagagaacgcagatcagggcccactgatgatggtgaagaagagatggaagaagacacagtcacaaacgggtcctgagcagtgaggcagatgtataataataggccctcttggaacaagtcttgcttttcgaacatggtataatagccttgtttgtgttagcaaagtggaatctatcagcattgttgaaatgcttaagactgctgctgataattttgtaatataagttttgaaatctaaatgtcaattttctacaaattataaaaataaactccactcactatgctac

SEQ ID NO: 315004 - DNA, 2349 bp, Homo sapiens
gtgctgcctggcggcggggcgcggggcacgctgggacgtctcgctggcgggaggccacgggctttccacagcgcgggggaacgggaggctgcaggatggtcaagctgacggcggagctgatcgagcaggcggcgcagtacaccaacgcggtgcgcgaccgggagctggacctccgggggtataaaattcccgtcattgaaaatctaggtgctacgttagaccagtttgatgctattgatttttctgacaatgagatcaggaaactggatggttttcctttgttgagaagactgaaaacattgttagtgaacaacaacagaatatgccgtataggtgagggacttgatcaggctctgccctgtctgacagaactcattctcaccaataatagtctcgtggaactgggtgatctggaccctctggcatctctcaaatcgctgacttacctaagtatcctaagaaatccggtaaccaataagaagcattacagattgtatgtgatttataaagttccgcaagtcagagtactggatttccagaaagtgaaactaaaagtaagtagtaatctgttgcttgtgagccaccgcgcctggccgaagactgttttcatctaataacaccaaggtgttacttgctttagtatgaacatttgcactgatggagcaatagtgggtagaactgcgggcacctcagtaggagtcaaggcagcagcctaaataatagctgttacattcttccctgctctgcactcccagtagcgtgcataccagtttcacttaagagtgtcctggatgcagcagtaaagataattaaatatcactcctcgggcacacgtctctttgatattctgggtgacagaaagggggtgcacatgtctgcattcttgagttaggtggttatctccatgcactggtgcagttgtttcagttgagaggcagctacctgtcttctcaaacatgatgaagtgagcctgtcacttcagggaaaacaattgaaaattcaaggtttaaagcaaaaattaaaatttagaaaacttgtatccactgccgtaacctgccagcttcccagtactttaagacttttctggggaactcaatagtaatgttatgtgcatgtgaattaatgggtgtgacatttttgatgtgtaattacatggctcaacgtttggaagatctgcaaaagtcggtgaaccacagttttccaaatgatacgaaatcatgtacgggtaaaagatttgttcaaagtacaagataaaccaagtaagagtatgaaaagttcattgataaggtttcagacttttacactgccatctaaccttgaggaagctaccatttgtcaagttttagcatagtatctaaaaagagcatccaccattatctgcacaggctgttaaaatcttcctcccttttctaactgtgtgcctgtgtggccagattttcttcatgcccgtcaatcaaaatgccgtattgcacaggatggaatgatgaaaccaatacaataattcagctgactgatgttaagtcagacattaagtcaacaataacaattgtttcccaaacaattgaaggagttacaacttttttttccccctggaatacattgagcaaaatacctgccataaattgttgaacaaatgtaacattttttggtagttgttggcatatttccctaatttagagacaataaagtcattgaactgttgccagtatatggcatgtagtaggtgcccagatgtttttgagtatttccggtttctttgcctacggtagtgccatgaaaagcacatgagtataggctttaccttcaccaaaaatgaattattatcaactacaatgggaggcaacaattttgaaatctttgtgacccttttcctttgaaattgagcatcccttccagtacctgccaaagacagactagaccgtccctggacgataagctcctcaaaggcaggtgctgcttttgatctttttgtacctacttcagtgtgtaacaaacagtggccacagaacaaacacttgcatgctaagggaatggattctctaaaattgatactacttttgctttggtggttttctttagggcccactgatgatggtgaagaagagatggaagaagacacagtcacaaacgggtcctgagcagtgaggcagatgtataataataggccctcttggaacaagtcttgcttttcgaacatggtataatagccttgtttgtgttagcaaagtggaatctatcagcattgttgaaatgcttaagactgctgctgataattttgtaatataagttttgaaatctaaatgtcaattttctacaaattataaaaataaactccactcactatgctac

SEQ ID NO: 315005 - DNA, 832 bp, Homo sapiens
gtgctgcctggcggcggggcgcggggcacgctgggacgtctcgctggcgggaggccacgggctttccacagcgcgggggaacgggaggctgcaggatggtcaagctgacggcggagctgatcgagcaggcggcgcagtacaccaacgcggtgcgcgaccgggagctggacctccgggggtataaaattcccgtcattgaaaatctaggtgctacgttagaccagtttgatgctattgatttttctgacaatgagatcaggaaactggatggttttcctttgttgagaagactgaaaacattgttagtgaacaacaacagaatatgccgtataggtgagggacttgatcaggctctgccctgtctgacagaactcattctcaccaataatagtctcgtggaactggtaagttgcacagaaggaaaatgtatttggtgggtggggttaaaggtactatgtgcttcctacagaaaatttacaaaatctagaaaatgatctcagtatcctctttcttgtctttttcttaattcaggatctgggccttttgggttctgcagccgtatgttgcaaatattttcctacttttacttgacttttgacttaggatgtcttgttagagaagttcctaatttaggtgcagtccaatgaatcaatcttcttctttattgtagcccttttgatgtttaaatttcccctattccagggttataaactcctatgttgttttctacaattgcagtgttcaatatagtaccagtaactacaggtggctacttataattgagatgtgctagaactataaaatacacactggatttcaaagacttaagtgc

SEQ ID NO: 315006 - DNA, 3884 bp, Homo sapiens
gaattccggcccccgtgtctgggcgtccgcctcctggcctcctggctgaggggaagctgagtgggccacggcccatgtgtcgcactcgcctcggctcccacacagccgcctctgctccagcaaggatgtggctcttccacactctgctctgcatagccagcctggccctgctggccgctttcaatgtggatgtggcccggccctggctcacgcccaagggaggtgcccctttcgtgctcagctcccttctgcaccaagaccccagcaccaaccagacctggctcctggtcaccagccccagaaccaagaggacaccagggcccctccatcgatgttcccttgtccaggatgaaatcctttgccatcctgtagagcatgtccccatccccaaggggaggcaccggggagtgaccgttgtccggagccaccacggtgttttgatatgcattcaagtgctggtccggcggcctcacagcctcagctcagaactcacaggcacctgtagcctcctgggccctgacctccgtccccaggctcaggccaacttcttcgaccttgaaaatctcctggatccagatgcacgtgtggacactggagactgctacagcaacaaagaaggcggtggagaagacgatgtgaacacagccaggcagcgccgggctctggagaaggaggaggaggaagacaaggaggaggaggaagacgaggaggaggaggaagctggcaccgagattgccatcatcctggatggctcaggaagcattgatcccccagactttcagagagccaaagacttcatctccaacatgatgaggaacttctatgaaaagtgttttgagtgcaactttgccttggtgcagtatggaggagtgatccagactgagtttgaccttcgggacagccaggatgtgatggcctccctcgccagagtccagaacatcactcaagtggggagtgtcaccaagactgcctcagccatgcaacacgtcttagacagcatcttcacctcaagccacggctccaggagaaaggcatccaaggtcatggtggtgctcaccgatggtggcatattcgaggaccccctcaaccttacgacagtcatcaactcccccaaaatgcagggtgttgagcgctttgccattggggtgggagaagaatttaagagtgctaggactgcgagggaactgaacctgatcgcctcagacccggatgagacccatgctttcaaggtgaccaactacatggcgctggatgggctgctgagcaaactgcggtacaacatcatcagcatggaaggcacggttggagacgcccttcactaccagctggcacagattggcttcagtgctcagatcctggatgagcggcaggtgctgctcggcgccgtcggggcctttgactggtccggaggggcgttgctctacgacacacgcagccgccggggccgcttcctgaaccagacagcggcggcggcggcagacgcggaggctgcgcagtacagctacctgggttacgctgtggccgtgctgcacaagacctgcagcctctcctacgtcgcgggggctccacagtacaaacatcatggggccgtgtttgagctccagaaggagggcagagaggccagcttcctgccagtgctggagggagagcagatggggtcctattttggctctgagctgtgccctgtggacattgacatggatggaagcacggacttcttgctggtggctgctccattttaccacgttcatggagaagaaggcagagtctacgtgtaccgtctcagcgagcaggatggttctttctccttggcacgcatactgagtgggcaccccgggttcaccaatgcccgctttggctttgccatggcggctatgggggatctcagtcaggataagctcacagatgtggccatcggggcccccctggaaggttttggggcagatgatggtgccagcttcggcagtgtgtatatctacaatggacactgggacggcctctccgccagcccctcgcagcggatcagagcctccacggtggccccaggactccagtacttcggcatgtccatggctggtggctttgatattagtggcgacggccttgccgacatcaccgtgggcactctgggccaggcggttgtgttccgctcccggcctgtggttcgcctgaaggtctccatggccttcacccccagcgcactgcccatcggcttcaacggcgtcgtgaatgtccgtttatgttttgaaatcagctctgtaaccacagcctctgagtcaggcctccgtgaggcacttctcaacttcacgctggatgtggatgtggggaagcagaggagacggctgcagtgttcagacgtaagaagctgtctgggctgcctgagggagtggagcagcggatcccagctttgtgaggacctcctgctcatgcccacagagggagagctctgtgaggaggactgcttctccaatgccagtgtcaaagtcagctaccagctccagacccctgagggacagacggaccatccccagcccatcctggaccgctacactgagccctttgccatcttccagctgccctatgagaaggcctgcaagaataagctgttttgtgtcgcagaattacagttggccaccaccgtctctcagcaggagttggtggtgggtctcacaaaggagctgaccctgaacattaacctaactaactccggggaagattcctacatgacaagcatggccttgaattaccccagaaacctgcagttgaagaggatgcaaaagcctccctctccaaacattcagtgtgatgaccctcagccggttgcttctgtcctgatcatgaactgcaggattggtcaccccgtcctcaagaggtcatctgctcatgtttcagtcgtttggcagctagaggagaatgcctttccaaacaggacagcagacatcactgtgactgtcaccaattccaatgaaagacggtctttggccaacgagacccacacccttcaattcaggcatggcttcgttgcagttctgtccaaaccatccataatgtacgtgaacacaggccaggggctttctcaccacaaagaattcctcttccatgtacatggggagaacctctttggagcagaataccagttgcaaatttgcgtcccaaccaaattacgaggtctccaggttgcagcagtgaagaagctgacgaggactcaggcctccacggtgtgcacctggagtcaggagcgcgcttgtgcgtacagttcggttcagcatgtggaagaatggcattcagtgagctgtgtcatcgcttcagataaagaaaatgtcaccgtggctgcagagatctcctgggatcactctgaggagttactaaaagatgtaactgaactgcagatccttggtgaaatatctttcaacaaatctctatatgagggactgaatgcagagaaccacagaactaagatcactgtcgtcttcctgaaagatgagaagtaccattctttgcctatcatcattaaaggcagcgttggtggacttctggtgttgatcgtgattctggtcatcctgttcaagtgtggcttttttaaaagaaaatatcaacaactgaacttggagagcatcaggaaggcccagctgaaatcagagaatctgctcgaagaagagaattaggacctgctatccactgggagaggctatcagccagtcctgggacttggagacccagcatcctttgcattactttttccttcaggatgatctagagcagcatggagctgttggtagaatattagtttttaaccatacattgtcccaaaagtgtctgtgcattgtgcaaaaagtaaacttaggaaacatttggtattaaataaatttacacttttctttgca

SEQ ID NO: 315007 - DNA, 649 bp, Homo sapiens
gagaatcgcttgaacctgacggggtggaggttgcagtgagccgagatcgcaccacttcactccagcctgggcgaaagagcgaaactccatctcaaaaaaaaaaaaaaggaagttgaagaataactgcagatgtcttgtttgggtaactttatgtagtgttgtgtacgttagggccattaactaagcccaggaatacctttaaagggaaaggtggtgaaggctgttcaaacacagtgagttcatgtctaaaatatgttttgtttccctcattcctttccccatcttctagttactaaaagatgtaactgaactgcagatccttggtgaaatatctttcaacaaatctctatatgagggactgaatgcagagaaccacagaactaaggtaattcctggctggcttctgagtagtgcccaaggaaaattgtgcctaacctttgagcacctccacagacattctgttgccctcttcctgttttcagccttaacacttctgatcttggctctgccatcgctgcctttgtgacctttgagtgagtcagcttcttatgaaataaggcaattaagaggcctaagctgaggagttctgagttgaaataactaggctggaatctgcagtatatactttgatttgaaaatggattgatta

SEQ ID NO: 315008 - DNA, 750 bp, Homo sapiens
  misc_feature (672)..(672): n is a, c, g, or t
  misc_feature (750)..(750): n is a, c, g, or t
ctagctcccggccctgcgcatgcgcacctcgccagggccggggccgggacgggacggaaaactggcggcttggtttgttcagcgcgtcgcggtcatggctctcgtttcaggcctccacggtgtgcacctggagtcaggagcgcgcttgtgcgtacagttcggttcagcatgtggaagaatggcattcagtgagctgtgtcatcgcttcagataaagaaaatgtcaccgtggctgcagagatctcctgggatcactctgaggagttactaaaagatgtaactgaactgcagatccttggtgaaatatctttcaacaaatctctatatgagggactgaatgcagagaaccacagaactaagatcactgtcgtcttcctgaaagatgagaagtaccattctttgcctatcatcattaaaggcagcgttggtggacttctggtgttgatcgtgattctggtcatcctgttcaagtgtggcttttttaaaagaaaatatcaacaactgaacttggagagcatcaggaaggcccagctgaaatcagagaatctgctcgaagaagagaattaggacctgctatccactgggagaggctatcagccagtcctgggacttggagacccagcatcctttgcattactttttccttcaggatgatctagaagcaaccatgggnaacctgtttgggttaaaaataattaagtttttttaaacccattaccatttgttccccaaaaaagttgttctggttgcn

SEQ ID NO: 315009 - DNA, 593 bp, Homo sapiens
ctagctcccggccctgcgcatgcgcacctcgccagggccggggccgggacgggacggaaaactggcggcttggtttgttcagcgcgtcgcggtcatggctctcgtttcaggcctccacggtgtgcacctggagtcaggagcgcgcttgtgcgtacagttcggttcagatcactgtcgtcttcctgaaagatgagaagtaccattctttgcctatcatcattaaaggcagcgttggtggacttctggtgttgatcgtgattctggtcatcctgttcaagtgtggcttttttaaaagaaaatatcaacaactgaacttggagagcatcaggaaggcccagctgaaatcagagaatctgctcgaagaagagaattaggacctgctatccactgggagaggctatcagccagtcctgggacttggagacccagcatcctttgcattactttttccttcaggatgatctagagcagcatggagctgttggtagaatattagtttttaaccatacattgtcccaaaagtgtctgtgcattgtgcaaaaagtaaacttaggaaacatttggtattaaataaatttacacttttctttgca

SEQ ID NO: 315010 - DNA, 621 bp, Homo sapiens
tgggtgattggatagttttagatgatctaaaatgctgcatcagggaatatctagctttttgctttactgtcatcagctttgatcaatacacgggttgttgccaagtcctcgtattttgctccttaaaataacatgtaggattttttcctcgtttgcttcacctgatttattgggcgatctctttgtcttgtctagatcactgtcgtcttcctgaaagatgagaagtaccattctttgcctatcatcattaaaggcagcgttggtggacttctggtgttgatcgtgattctggtcatcctgttcaagtgtggcttttttaaaagaaaatatcaacaactgaacttggagagcatcaggaaggcccagctgaaatcagagaatctgctcgaagaagagaattaggacctgctatccactgggagaggctatcagccagtcctgggacttggagacccagcatcctttgcattactttttccttcaggatgatctagagcagcatggagctgttggtagaatattagtttttaaccatacattgtcccaaaagtgtctgtgcattgtgcaaaaagtaaacttaggaaacatttggtattaaataaatttacacttttctttgca

SEQ ID NO: 315011 - DNA, 552 bp, Homo sapiens
ggttcaactgctcgggagagcagggttcagaggaaggtggagtcagttctgattgagggatgagcaccagaggtcttgaaggattggactctccaggagagattcagagtaagttaggagaagggagtagtaagtatgagaagcagaggaatataggggctatttaggcaacagccagaatgccagttttctgaaacagatggctatctttggcctgtaactggacttttccttcctttgtttcagtgtggcttttttaaaagaaaatatcaacaactgaacttggagagcatcaggaaggcccagctgaaatcagagaatctgctcgaagaagagaattaggacctgctatccactgggagaggctatcagccagtcctgggacttggagacccagcatcctttgcattactttttccttcaggatgatctagagcagcatggagctgttggtagaatattagtttttaaccatacattgtcccaaaagtgtctgtgcattgtgcaaaaagtaaacttaggaaacatttggtattaaataaatttacactt

SEQ ID NO: 315012 - DNA, 689 bp, Homo sapiens
ctagctcccggccctgcgcatgcgcacctcgccagggccggggccgggacgggacggaaaactggcggcttggtttgttcagcgcgtcgcggtcatggctctcgtttcaggcctccacggtgtgcacctggagtcaggagcgcgcttgtgcgtacagttcggttcagttactaaaagatgtaactgaactgcagatccttggtgaaatatctttcaacaaatctctatatgagggactgaatgcagagaaccacagaactaagatcactgtcgtcttcctgaaagatgagaagtaccattctttgcctatcatcattaaaggcagcgttggtggacttctggtgttgatcgtgattctggtcatcctgttcaagtgtggcttttttaaaagaaaatatcaacaactgaacttggagagcatcaggaaggcccagctgaaatcagagaatctgctcgaagaagagaattaggacctgctatccactgggagaggctatcagccagtcctgggacttggagacccagcatcctttgcattactttttccttcaggatgatctagagcagcatggagctgttggtagaatattagtttttaaccatacattgtcccaaaagtgtctgtgcattgtgcaaaaagtaaacttaggaaacatttggtattaaataaatttacacttttctttgca

SEQ ID NO: 315013 - DNA, 822 bp, Homo sapiens
  misc_feature (705)..(705): n is a, c, g, or t
ctagctcccggccctgcgcatgcgcacctcgccagggccggggccgggacgggacggaaaactggcggcttggtttgttcagcgcgtcgcggtcatggctctcgtttcaggcctccacggtgtgcacctggagtcaggagcgcgcttgtgcgtacagttcggttcagttactaaaagatgtaactgaactgcagatccttggtgaaatatctttcaacaaatctctatatgagggactgaatgcagagaaccacagaactaagatcactgtcgtcttcctgaaagatgagaagtaccattctttgcctatcatcattaaaggcagcgttggtggacttctggtgttgatcgtgattctggtcatcctgttcaagtgtggcttttttaaaagaaaatatcaacaactgaacttggagagcatcaggaaggcccagctgaaatcagagaatctgctcgaagaagagaattaggacctgctatccactgggagaggctatcagccagtcctgggacttggagacccagcatcctttgcattactttttccttcaggatgatctagagcagcatggagctgttggtagaatattagtttttaaccatacattgtcccaaaagtgtctgtgcattgtgcaaaaagtaaacttaggaaacatttggtattaaataaatttacacttttctttgcaaaaaaaaaaaaaaaanaaaatttgggggcggcctgaaattttaacattgtgggggggcgccgagaaatggggtcgggaacgggaggggggtcccaaaaagcggggcggggtgaaccagggtgggcggtaggcc

SEQ ID NO: 315014 - DNA, 3611 bp, Homo sapiens
gaattccggcccccgtgtctgggcgtccgcctcctggcctcctggctgaggggaagctgagtgggccacggcccatgtgtcgcactcgcctcggctcccacacagccgcctctgctccagcaaggatgtggctcttccacactctgctctgcatagccagcctggccctgctggccgctttcaatgtggatgtggcccggccctggctcacgcccaagggaggtgcccctttcgtgctcagctcccttctgcaccaagaccccagcaccaaccagacctggctcctggtcaccagccccagaaccaagaggacaccagggcccctccatcgatgttcccttgtccaggatgaaatcctttgccatcctgtagagcatgtccccatccccaaggggaggcaccggggagtgaccgttgtccggagccaccacggtgttttgatatgcattcaagtgctggtccggcggcctcacagcctcagctcagaactcacaggcacctgtagcctcctgggccctgacctccgtccccaggctcaggccaacttcttcgaccttgaaaatctcctggatccagatgcacgtgtggacactggagactgctacagcaacaaagaaggcggtggagaagacgatgtgaacacagccaggcagcgccgggctctggagaaggaggaggaggaagacaaggaggaggaggaagacgaggaggaggaggaagctggcaccgagattgccatcatcctggatggctcaggaagcattgatcccccagactttcagagagccaaagacttcatctccaacatgatgaggaacttctatgaaaagtgttttgagtgcaactttgccttggtgcagtatggaggagtgatccagactgagtttgaccttcgggacagccaggatgtgatggcctccctcgccagagtccagaacatcactcaagtggggagtgtcaccaagactgcctcagccatgcaacacgtcttagacagcatcttcacctcaagccacggctccaggagaaaggcatccaaggtcatggtggtgctcaccgatggtggcatattcgaggaccccctcaaccttacgacagtcatcaactcccccaaaatgcagggtgttgagcgctttgccattggggtgggagaagaatttaagagtgctaggactgcgagggaactgaacctgatcgcctcagacccggatgagacccatgctttcaaggtgaccaactacatggcgctggatgggctgctgagcaaactgcggtacaacatcatcagcatggaaggcacggttggagacgcccttcactaccagctggcacagattggcttcagtgctcagatcctggatgagcggcaggtgctgctcggcgccgtcggggcctttgactggtccggaggggcgttgctctacgacacacgcagccgccggggccgcttcctgaaccagacagcggcggcggcggcagacgcggaggctgcgcagtacagctacctgggttacgctgtggccgtgctgcacaagacctgcagcctctcctacgtcgcgggggctccacagtacaaacatcatggggccgtgtttgagctccagaaggagggcagagaggccagcttcctgccagtgctggagggagagcagatggggtcctattttggctctgagctgtgccctgtggacattgacatggatggaagcacggacttcttgctggtggctgctccattttaccacgttcatggagaagaaggcagagtctacgtgtaccgtctcagcgagcaggatggttctttctccttggcacgcatactgagtgggcaccccgggttcaccaatgcccgctttggctttgccatggcggctatgggggatctcagtcaggataagctcacagatgtggccatcggggcccccctggaaggttttggggcagatgatggtgccagcttcggcagtgtgtatatctacaatggacactgggacggcctctccgccagcccctcgcagcggatcagagcctccacggtggccccaggactccagtacttcggcatgtccatggctggtggctttgatattagtggcgacggccttgccgacatcaccgtgggcactctgggccaggcggttgtgttccgctcccggcctgtggttcgcctgaaggtctccatggccttcacccccagcgcactgcccatcggcttcaacggcgtcgtgaatgtccgtttatgttttgaaatcagctctgtaaccacagcctctgagtcaggcctccgtgaggcacttctcaacttcacgctggatgtggatgtggggaagcagaggagacggctgcagtgttcagacgtaagaagctgtctgggctgcctgagggagtggagcagcggatcccagctttgtgaggacctcctgctcatgcccacagagggagagctctgtgaggaggactgcttctccaatgccagtgtcaaagtcagctaccagctccagacccctgagggacagacggaccatccccagcccatcctggaccgctacactgagccctttgccatcttccagctgccctatgagaaggcctgcaagaataagctgttttgtgtcgcagaattacagttggccaccaccgtctctcagcaggagttggtggtgggtctcacaaaggagctgaccctgaacattaacctaactaactccggggaagattcctacatgacaagcatggccttgaattaccccagaaacctgcagttgaagaggatgcaaaaggctcatgtttcagtcgtttggcagctagaggagaatgcctttccaaacaggacagcagacatcactgtgactgtcaccaaaccatccataatgtacgtgaacacaggccaggggctttctcaccacaaagaattcctcttccatgtacatggggagaacctctttggagcagaataccagttgcaaatttgcgtcccaaccaaattacgaggtctccaggttgcagcagtgaagaagctgacgaggactcaggcctccacggtgtgcacctggagtcaggagcgcgcttgtgcgtacagttcggttcagttactaaaagatgtaactgaactgcagatccttggtgaaatatctttcaacaaatctctatatgagggactgaatgcagagaaccacagaactaagatcactgtcgtcttcctgaaagatgagaagtaccattctttgcctatcatcattaaaggcagcgttggtggacttctggtgttgatcgtgattctggtcatcctgttcaagtgtggcttttttaaaagaaaatatcaacaactgaacttggagagcatcaggaaggcccagctgaaatcagagaatctgctcgaagaagagaattaggacctgctatccactgggagaggctatcagccagtcctgggacttggagacccagcatcctttgcattactttttccttcaggatgatctagagcagcatggagctgttggtagaatattagtttttaaccatacattgtcccaaaagtgtctgtgcattgtgcaaaaagtaaacttaggaaacatttggtattaaataaatttacacttttctttgca

SEQ ID NO: 315015 - DNA, 1020 bp, Homo sapiens
ttttgaaactgaaagaagtagcattttggcatgatctggagctgacatacattccagaggctatatagatgatgacatctaccagtgaggctacatgactgacgtagaaactgaggttctttcgctagtctaggacaaagatgaagcttaacttcactgatggatagaaccagactttgtcactgtttaaataatacatttttggttgttttctaaatatgaattcggttcactctgaaattagagcagttccatgagttcactgaatttatttgaacaatagtgtttgccatggtttgaatgatggtatctgctccaaaattcatgttgaaatttaaccctcaatgcaacagtgttaaaaggtgtagttggcctgtgggaggttattaaattatgacagagcttcactatcataaataggattaacgccttatgaagtggctcaaggtcgaaaggcgcaccttcttgcccttccactcttctaccctgtgaggacacggcgtttatctcttgcccttctgccatttgaagatacagtattgctcccctcagaggaggcagcaataaagtgccatgttggaagcagagagcaacccatatcagatgccagtcctgctagccccttaatcttagacttctcagtctctagaaccatgagaaataaatttgtattgtttgtaaattaccgattctatggaatttttgttacagcagcacaaatggtctgacagtgttcttctttaaaaaggaataatgttcatggatacagctctattgttcctggaattcttggggaagattctttggagttttgtggagttatatataacttactaggttgtccttgccatatttttatgatggtgagtgaacacagtatacctatgggtgagattagaataaaatagagatttttatttgtgtattacatatttagccaacatttattgtctactatatgctattctatttaaaatgttttcacttttcctgcttcttatctccttgtttccttgtaca

SEQ ID NO: 315016 - DNA, 1262 bp, Homo sapiens
tgccactcggtgtcctcccgcggaggggcgtagggtgtaaacaggcgacgcgctgggggaggtgcggccttgctgcgtccacgtctcgggcatgctcgaggcgggccagggcggtagcgccgccagctcagagcccacctgaggtaactcctgcggcctctaggatcggagtcccccacgccgcgcgcagccgccgccgctggccgccaataagggcggccgagcccccggcccgggcagggggtgtggctgccggcagcgcgtcggctacaggtgggctgggctgggctgggctgggctgggctgggtgggggcggccgccaaggacccatccctgcgctgcgggcccggcgtggagcccgcggagaggcagcgcgactccaggcagtgggtctctctgccccggtgctcgcgtctgcccctggggccgggccgagcggaaccaggaatcgcagaaacggtcagcgcccagggctctaggccggccgccccgggtgccaggtgaattcctttccctgaccggctgtgagacgttggcccgtcagccgtcgtctttggcctgagtgtgcacatctgtaaaatggaagctcggactagtgatccgtgaggaccttccacgtctgacgtgtgatctcgagagacctgcgtacattcggggtgccagaaggaaagcatagcttgaaatccatggcccaaaatgactctaccagtggagactctcttctgtgaagaagacgaccagataagaggttgggatgagcatgccactgcatcagatctctgccattccatcccaggatgccatctctgctagagtctacagaagtaagaccaaagaaaaggagagggaagaacagaatgagaagactttgggacatttcatgagtcattcaagcaacatttctaaggctgggagtcctccgtcagcatcagctccggctccggtgtcctccttctctcgcacttctatcacgccatccagccaggacatctgcagttccagtgcagtgttttctgagtgttgtcaccacagttccgtgcagtctgctgttgtctcgaaagctcctcactgccagagttctctgacacaagggctcactgtgacagttatctgtaaggacacattacaggcgtcaaagagaaattcctttggttcagaatgggcccaggccttgaagcctgctaagaataccaaagccagaagaacactaaagttctcaaggtccctcaatgatgtgggtgagaaggcgcaggatacttca

SEQ ID NO: 315017 - DNA, 751 bp, Homo sapiens
agcggatggtaggtatagggctgtggatatcgtcagtttgaccaagtattccaagaggccccatggagtttgtcatctgtaatagaggacgttagtgcattagtgatgaaaaaactgcttaccactgactattgtgatctcccagggagtataaggcagctccgcacttgaaatccatggcccaaaatgactctaccagtggagactctcttctgtgaagaagacgaccagataagaggttgggatgagcatgccactgcatcagatctctgccattccatcccaggatgccatctctgctagagtctacagaagtaagaccaaagaaaaggagagggaagaacagaatgagaagactttgggacatttcatgagtcattcaagcaacatttctaaggctgggagtcctccgtcagcatcagctccggctccggtgtcctccttctctcgcacttctatcacgccatccagccaggacatctgcagttccagtgcagtgttttctgagtgttgtcaccacagttccgtgcagtctgctgttgtctcgaaagctcctcactgccagagttctctgacacaagggctcactgtgacagttatctgtaaggacacattacaggcgtcaaagagaaattcctttggttcagaatgggcccaggccttgaagcctgctaagaataccaaagccagaagaacactaaagttctcaaggtccctcaatgatgtgggtgagaaggcgcaggatacttca

SEQ ID NO: 315018 - DNA, 5388 bp, Homo sapiens
tgccactcggtgtcctcccgcggaggggcgtagggtgtaaacaggcgacgcgctgggggaggtgcggccttgctgcgtccacgtctcgggcatgctcgaggcgggccagggcggtagcgccgccagctcagagcccacctgaggtaactcctgcggcctctaggatcggagtcccccacgccgcgcgcagccgccgccgctggccgccaataagggcggccgagcccccggcccgggcagggggtgtggctgccggcagcgcgtcggctacaggtgggctgggctgggctgggctgggctgggctgggtgggggcggccgccaaggacccatccctgcgctgcgggcccggcgtggagcccgcggagaggcagcgcgactccaggcagtgggtctctctgccccggtgctcgcgtctgcccctggggccgggccgagcggaaccaggaatcgcagaaacggtcagcgcccagggctctaggccggccgccccgggtgccaggtgaattcctttccctgaccggctgtgagacgttggcccgtcagccgtcgtctttggcctgagtgtgcacatctgtaaaatggaagctcggactagtgatccgtgaggaccttccacgtctgacgtgtgatctcgagagacctgcgtacattcggggtgccagaaggaaagcatagagatggggtcttgctgtgttgcccagactggtctcaaactcctggcctcaagtgatccttctgcctcagcttcccaaagtactgggattacagcttgaaatccatggcccaaaatgactctaccagtggagactctcttctgtgaagaagacgaccagataagaggttgggatgagcatgccactgcatcagatctctgccattccatcccaggatgccatctctgctagagtctacagaagtaagaccaaagaaaaggagagggaagaacagaatgagaagactttgggacatttcatgagtcattcaagcaacatttctaaggctgggagtcctccgtcagcatcagctccggctccggtgtcctccttctctcgcacttctatcacgccatccagccaggacatctgcaggatctgccactgtgaaggagatgatgagagccccctgatcaccccctgccactgcacaggaagcctccacttcgtgcaccaggcctgcctgcagcagtggatcaagagctccgacacgcgctgctgcgagctctgcaagtatgagttcatcatggagaccaagctgaagccactgagaaaatgggagaagttgcagatgacgtccagcgagcgcaggaagatcatgtgctcagtgacattccacgtcattgccatcacatgtgtggtctggtccttgtatgtgctcattgaccgtactgctgaggagatcaagcaggggcaggcaacaggaatcctagaatggcccttttggactaaattggtggttgtggccatcggcttcaccggaggacttctttttatgtatgttcagtgtaaagtgtatgtgcaattgtggaagagactcaaggcctataatagagtgatctatgttcaaaactgtccagaaacaagcaaaaagaatatttttgaaaaatctccactaacagagcccaactttgaaaataaacatggatatggaatctgtcattccgacacaaactcttcttgttgcacagagcctgaagacactggagcagaaatcattcacgtctgattgtgtgcgggttgtcattttcctggacatccatgaagagctgaaggaaattgtttactgccaattgtatacctttcttatgtcctttaatagcatagactggacaggtgactatttatagtggcttctctttttctaaaccctccttagtctcctagaaaaccttcctgtgggccaggcatgcctgggtcctgcctctgcctggcagctctgtgggaaagtggaagaccccatgatgacatcatggggagccagcagagttcctgcccatggtcttgagctgaatgagagaataaaatgccaatcccaagggaagaggaggagcaggggtgcccaggccctgatacccagccgcctccagcttgcagtggtccccagcctggagcagagcattggggagtgtctagccatgacgagaagattccctctgcatcacggcgaaccccaggagatggtattgaaacagacccccaaacacagactcctgcctgccctctgccgatgctgcctcctccatgctcttgagcaggtggagccatggtgctctgtggtggcgcatgattcactgagcaaacagcactttacagaagaaaatctttattttgtaatatgtgtgtccagcgggattgacactcaaaaaaagtctcacttagaaatcttcccttccttacctttgtatctcctttacatcatgagagatcaaaaatccattttgccttacatatgctaagaagcgtggcattctttctgttcataaaacagactcatgacttttaagacaggacaagcaggccagaggctttttttttaatcacagatctcatgggaattagtggatgctaaatggcaattaaagcatgattcctatgcttttgagcctgttttatgacaaggtgttactttgtagacctggcccatacatttcttttttgtcaacactgaaaaagaacagtttctgagatcgaaatggaaggaaaggaagtgagtaatgacaacaaaactgaatatttaaaaaatattcctttatagttaaatctctccagttggtgttggcttcacattgaaagagcagccatgtgccaccctggccggggtgtgtgcactgcatgcaggttctcccttgcatgcaagatgggtgctggcccactgtgaggcttctgctcggggaagttctgtggagtcactaccagggccaagaggcaggtgggctggctctgggacgagggccaggtgtgagcaaactgccagggtccgctgtgccactgctccccggccacatgcccgcccagctgtcgccttaaccagactgaacagacaggatccttcagggcccttggccccactctcagtgcattctgtcatcagggattaccacctgtaccattttcataaaacaaaaccaaaatcactaccatcaaatggccttgtccctctaaaaagtctgcttaaaattctgtttttaaaacccagtttcctagttttccaggcaaatagttacctccgggaaagttgctgggggggcctgaagcacaatgtagcgcagatgcttcctttccaggccattctctcacccagcctgcacggaggagatgggagatgctgggggtcctgccctcagtctttttgggccttaggcgtttcgttcatcctgctaaggggatgaagcaaacacgaggtgattcctttgcctttcagagtggaagccctggagtttgttttgaaggccaggaggctgaaggatctctaagctacggtgtgggcttaatagcagcaggctttgtcctcctgtctcctccaagccagtgtctgattccttggcaacacaggtcttagtctgtggagtggctctgctgtggccttcctctggccgggcaggcactgtccagccatagccagctcctgagaataggtcagcctctcctttctgtctcccagggcacatccagcccgtgcctgtgttcactgtgccccgaagtgcaattacccataccccttctcagcctggggaccccaggcaaccacagactgtccactcaggggagctgaatcccaggtcagccctgccaatgtcccttaggaactgcccaggcaaggcccctggttttgtatacttgttcctgccacccagcagtagatgagtgtttcaggtgaagaccaggatagattttctaagtgtgaatccccacttcacatatggaaccccttatgctgaacttgaaaagcaccaagacttcctgtagacaagaaagtgcttaggtagggacagcccctgggcatcccacccaatgtagctggcaccccactatggcaaaggtgccttgataactgagccctgtatccctcccatgcccagccagattctcatgggaagccctctcccttcttttctgcctaacaccatctcatcgtttctggcctcactgtggacaatccacacacattcttctttcctctcctggcggggcacagagccacccccttgccttttcttttcttgaaggttctagttcagctcctgattcatcagacccttctagccccctgcatctagcagtgaagcatgaagcctggtggggatgtggtactcccatctggtgtggccaccagctctgccaatgttcctgtagccttggaaaacttgctctctcggttcttttgggtgctgtgtactccccagcttccccccttccccccccattttgcacctgggtttagtgaaaggatggcatttggttgacccatatagaaacccagaatgaggtctcagggccaggaggcctggtatttgtaggccagggaaggggaagaggcaagtggtctggggtatcaccagccagccctctctgatttggcctctactccccataagtcacagtaccataagcaggcttctggcctcagcaatttggtctttgtgcccaagtttattgtgagaatttcctgaaaactctataaaaggtctcttcctactgtaggcctctaatgtttctcccctttttgcttcagtccactcttcagtcttgtaggcctagttttcaaacctgcacatgtgtcctacctggccacaggcatgcaggcctcaggcagctgggccagtttgggagcctcgggtgatgtctgcacgatctggggctgcctctgcacccctgctgtgggcttcagggttggagaagggctgggaccaaccgggtgagatccacaagtctctggatgtggctgaaggcaaatacacaattgaagtactttctgttttgaagtgctttcccttttgaatctggtttgaaacatgcagcttctgtctctagcccaaggaaagaccaaaacatagggaaataaaagcatttatctttgtcttggaagtaattgttgaagttgtgcagttgatcagtgcacagttagatgcaatgtttatagaaattgattgttaaaccaaatttacactggcatgtgtggtgtagtttctaaaaggcacttcacatttgaaatttttcttaccttagaaagtttctagtgatctaaatgtctagttttgtattcttttgtgtgtgttcactgtttctcagtattaccacttgaataattctctgtacaggggggtttgtgctatacactgggatgtctaattgcagcaataaagcctttctttaaaaaggaaaaaaaaaat

SEQ ID NO: 315019 - DNA, 5349 bp, Homo sapiens
tgccactcggtgtcctcccgcggaggggcgtagggtgtaaacaggcgacgcgctgggggaggtgcggccttgctgcgtccacgtctcgggcatgctcgaggcgggccagggcggtagcgccgccagctcagagcccacctgaggtaactcctgcggcctctaggatcggagtcccccacgccgcgcgcagccgccgccgctggccgccaataagggcggccgagcccccggcccgggcagggggtgtggctgccggcagcgcgtcggctacaggtgggctgggctgggctgggctgggctgggctgggtgggggcggccgccaaggacccatccctgcgctgcgggcccggcgtggagcccgcggagaggcagcgcgactccaggcagtgggtctctctgccccggtgctcgcgtctgcccctggggccgggccgagcggaaccaggaatcgcagaaacggtcagcgcccagggctctaggccggccgccccgggtgccaggtgaattcctttccctgaccggctgtgagacgttggcccgtcagccgtcgtctttggcctgagtgtgcacatctgtaaaatggaagctcggactagtgatccgtgaggaccttccacgtctgacgtgtgatctcgagagacctgcgtacattcggggtgccagaaggaaagcatagagatggggtcttgctgtgttgcccagactggtctcaaactcctggcctcaagtgatccttctgcctcagcttcccaaagtactgggattacagcttgaaatccatggcccaaaatgactctaccagtggagactctcttctgtgaagaagacgaccagataagaggttgggatgagcatgccactgcatcagatctctgccattccatcccaggatgccatctctgctagagtctacagaagtaagaccaaagaaaaggagagggaagaacagaatgagaagactttgggacatttcatgagtcattcaagcaacatttctaaggctgggagtcctccgtcagcatcagctccggctccggtgtcctccttctctcgcacttctatcacgccatccagccaggacatctgcaggatctgccactgtgaaggagatgatgagagccccctgatcaccccctgccactgcacaggaagcctccacttcgtgcaccaggcctgcctgcagcagtggatcaagagctccgacacgcgctgctgcgagctctgcaagtatgagttcatcatggagaccaagctgaagccactgagaaaatgggagaagttgcagatgacgtccagcgagcgcaggaagatcatgtgctcagtgacattccacgtcattgccatcacatgtgtggtctggtccttgtatgtgctcattgaccgtactgctgaggagatcaagcaggggcaggcaacaggaatcctagaatggcccttttggattctttttatgtatgttcagtgtaaagtgtatgtgcaattgtggaagagactcaaggcctataatagagtgatctatgttcaaaactgtccagaaacaagcaaaaagaatatttttgaaaaatctccactaacagagcccaactttgaaaataaacatggatatggaatctgtcattccgacacaaactcttcttgttgcacagagcctgaagacactggagcagaaatcattcacgtctgattgtgtgcgggttgtcattttcctggacatccatgaagagctgaaggaaattgtttactgccaattgtatacctttcttatgtcctttaatagcatagactggacaggtgactatttatagtggcttctctttttctaaaccctccttagtctcctagaaaaccttcctgtgggccaggcatgcctgggtcctgcctctgcctggcagctctgtgggaaagtggaagaccccatgatgacatcatggggagccagcagagttcctgcccatggtcttgagctgaatgagagaataaaatgccaatcccaagggaagaggaggagcaggggtgcccaggccctgatacccagccgcctccagcttgcagtggtccccagcctggagcagagcattggggagtgtctagccatgacgagaagattccctctgcatcacggcgaaccccaggagatggtattgaaacagacccccaaacacagactcctgcctgccctctgccgatgctgcctcctccatgctcttgagcaggtggagccatggtgctctgtggtggcgcatgattcactgagcaaacagcactttacagaagaaaatctttattttgtaatatgtgtgtccagcgggattgacactcaaaaaaagtctcacttagaaatcttcccttccttacctttgtatctcctttacatcatgagagatcaaaaatccattttgccttacatatgctaagaagcgtggcattctttctgttcataaaacagactcatgacttttaagacaggacaagcaggccagaggctttttttttaatcacagatctcatgggaattagtggatgctaaatggcaattaaagcatgattcctatgcttttgagcctgttttatgacaaggtgttactttgtagacctggcccatacatttcttttttgtcaacactgaaaaagaacagtttctgagatcgaaatggaaggaaaggaagtgagtaatgacaacaaaactgaatatttaaaaaatattcctttatagttaaatctctccagttggtgttggcttcacattgaaagagcagccatgtgccaccctggccggggtgtgtgcactgcatgcaggttctcccttgcatgcaagatgggtgctggcccactgtgaggcttctgctcggggaagttctgtggagtcactaccagggccaagaggcaggtgggctggctctgggacgagggccaggtgtgagcaaactgccagggtccgctgtgccactgctccccggccacatgcccgcccagctgtcgccttaaccagactgaacagacaggatccttcagggcccttggccccactctcagtgcattctgtcatcagggattaccacctgtaccattttcataaaacaaaaccaaaatcactaccatcaaatggccttgtccctctaaaaagtctgcttaaaattctgtttttaaaacccagtttcctagttttccaggcaaatagttacctccgggaaagttgctgggggggcctgaagcacaatgtagcgcagatgcttcctttccaggccattctctcacccagcctgcacggaggagatgggagatgctgggggtcctgccctcagtctttttgggccttaggcgtttcgttcatcctgctaaggggatgaagcaaacacgaggtgattcctttgcctttcagagtggaagccctggagtttgttttgaaggccaggaggctgaaggatctctaagctacggtgtgggcttaatagcagcaggctttgtcctcctgtctcctccaagccagtgtctgattccttggcaacacaggtcttagtctgtggagtggctctgctgtggccttcctctggccgggcaggcactgtccagccatagccagctcctgagaataggtcagcctctcctttctgtctcccagggcacatccagcccgtgcctgtgttcactgtgccccgaagtgcaattacccataccccttctcagcctggggaccccaggcaaccacagactgtccactcaggggagctgaatcccaggtcagccctgccaatgtcccttaggaactgcccaggcaaggcccctggttttgtatacttgttcctgccacccagcagtagatgagtgtttcaggtgaagaccaggatagattttctaagtgtgaatccccacttcacatatggaaccccttatgctgaacttgaaaagcaccaagacttcctgtagacaagaaagtgcttaggtagggacagcccctgggcatcccacccaatgtagctggcaccccactatggcaaaggtgccttgataactgagccctgtatccctcccatgcccagccagattctcatgggaagccctctcccttcttttctgcctaacaccatctcatcgtttctggcctcactgtggacaatccacacacattcttctttcctctcctggcggggcacagagccacccccttgccttttcttttcttgaaggttctagttcagctcctgattcatcagacccttctagccccctgcatctagcagtgaagcatgaagcctggtggggatgtggtactcccatctggtgtggccaccagctctgccaatgttcctgtagccttggaaaacttgctctctcggttcttttgggtgctgtgtactccccagcttccccccttccccccccattttgcacctgggtttagtgaaaggatggcatttggttgacccatatagaaacccagaatgaggtctcagggccaggaggcctggtatttgtaggccagggaaggggaagaggcaagtggtctggggtatcaccagccagccctctctgatttggcctctactccccataagtcacagtaccataagcaggcttctggcctcagcaatttggtctttgtgcccaagtttattgtgagaatttcctgaaaactctataaaaggtctcttcctactgtaggcctctaatgtttctcccctttttgcttcagtccactcttcagtcttgtaggcctagttttcaaacctgcacatgtgtcctacctggccacaggcatgcaggcctcaggcagctgggccagtttgggagcctcgggtgatgtctgcacgatctggggctgcctctgcacccctgctgtgggcttcagggttggagaagggctgggaccaaccgggtgagatccacaagtctctggatgtggctgaaggcaaatacacaattgaagtactttctgttttgaagtgctttcccttttgaatctggtttgaaacatgcagcttctgtctctagcccaaggaaagaccaaaacatagggaaataaaagcatttatctttgtcttggaagtaattgttgaagttgtgcagttgatcagtgcacagttagatgcaatgtttatagaaattgattgttaaaccaaatttacactggcatgtgtggtgtagtttctaaaaggcacttcacatttgaaatttttcttaccttagaaagtttctagtgatctaaatgtctagttttgtattcttttgtgtgtgttcactgtttctcagtattaccacttgaataattctctgtacaggggggtttgtgctatacactgggatgtctaattgcagcaataaagcctttctttaaaaaggaaaaaaaaaat

SEQ ID NO: 315020 - DNA, 4772 bp, Homo sapiens
tcttggacatgaaaataaactgacaataccaccggtggtcctagcgcacaatactaatcagagatggggtcttgctgtgttgcccagactggtctcaaactcctggcctcaagtgatccttctgcctcagcttcccaaagtactgggattacagcttgaaatccatggcccaaaatgactctaccagtggagactctcttctgtgaagaagacgaccagataagaggttgggatgagcatgccactgcatcagatctctgccattccatcccaggatgccatctctgctagagtctacagaagtaagaccaaagaaaaggagagggaagaacagaatgagaagactttgggacatttcatgagtcattcaagcaacatttctaaggctgggagtcctccgtcagcatcagctccggctccggtgtcctccttctctcgcacttctatcacgccatccagccaggacatctgcaggatctgccactgtgaaggagatgatgagagccccctgatcaccccctgccactgcacaggaagcctccacttcgtgcaccaggcctgcctgcagcagtggatcaagagctccgacacgcgctgctgcgagctctgcaagtatgagttcatcatggagaccaagctgaagccactgagaaaatgggagaagttgcagatgacgtccagcgagcgcaggaagatcatgtgctcagtgacattccacgtcattgccatcacatgtgtggtctggtccttgtatgtgctcattgaccgtactgctgaggagatcaagcaggggcaggcaacaggaatcctagaatggcccttttggactaaattggtggttgtggccatcggcttcaccggaggacttctttttatgtatgttcagtgtaaagtgtatgtgcaattgtggaagagactcaaggcctataatagagtgatctatgttcaaaactgtccagaaacaagcaaaaagaatatttttgaaaaatctccactaacagagcccaactttgaaaataaacatggatatggaatctgtcattccgacacaaactcttcttgttgcacagagcctgaagacactggagcagaaatcattcacgtctgattgtgtgcgggttgtcattttcctggacatccatgaagagctgaaggaaattgtttactgccaattgtatacctttcttatgtcctttaatagcatagactggacaggtgactatttatagtggcttctctttttctaaaccctccttagtctcctagaaaaccttcctgtgggccaggcatgcctgggtcctgcctctgcctggcagctctgtgggaaagtggaagaccccatgatgacatcatggggagccagcagagttcctgcccatggtcttgagctgaatgagagaataaaatgccaatcccaagggaagaggaggagcaggggtgcccaggccctgatacccagccgcctccagcttgcagtggtccccagcctggagcagagcattggggagtgtctagccatgacgagaagattccctctgcatcacggcgaaccccaggagatggtattgaaacagacccccaaacacagactcctgcctgccctctgccgatgctgcctcctccatgctcttgagcaggtggagccatggtgctctgtggtggcgcatgattcactgagcaaacagcactttacagaagaaaatctttattttgtaatatgtgtgtccagcgggattgacactcaaaaaaagtctcacttagaaatcttcccttccttacctttgtatctcctttacatcatgagagatcaaaaatccattttgccttacatatgctaagaagcgtggcattctttctgttcataaaacagactcatgacttttaagacaggacaagcaggccagaggctttttttttaatcacagatctcatgggaattagtggatgctaaatggcaattaaagcatgattcctatgcttttgagcctgttttatgacaaggtgttactttgtagacctggcccatacatttcttttttgtcaacactgaaaaagaacagtttctgagatcgaaatggaaggaaaggaagtgagtaatgacaacaaaactgaatatttaaaaaatattcctttatagttaaatctctccagttggtgttggcttcacattgaaagagcagccatgtgccaccctggccggggtgtgtgcactgcatgcaggttctcccttgcatgcaagatgggtgctggcccactgtgaggcttctgctcggggaagttctgtggagtcactaccagggccaagaggcaggtgggctggctctgggacgagggccaggtgtgagcaaactgccagggtccgctgtgccactgctccccggccacatgcccgcccagctgtcgccttaaccagactgaacagacaggatccttcagggcccttggccccactctcagtgcattctgtcatcagggattaccacctgtaccattttcataaaacaaaaccaaaatcactaccatcaaatggccttgtccctctaaaaagtctgcttaaaattctgtttttaaaacccagtttcctagttttccaggcaaatagttacctccgggaaagttgctgggggggcctgaagcacaatgtagcgcagatgcttcctttccaggccattctctcacccagcctgcacggaggagatgggagatgctgggggtcctgccctcagtctttttgggccttaggcgtttcgttcatcctgctaaggggatgaagcaaacacgaggtgattcctttgcctttcagagtggaagccctggagtttgttttgaaggccaggaggctgaaggatctctaagctacggtgtgggcttaatagcagcaggctttgtcctcctgtctcctccaagccagtgtctgattccttggcaacacaggtcttagtctgtggagtggctctgctgtggccttcctctggccgggcaggcactgtccagccatagccagctcctgagaataggtcagcctctcctttctgtctcccagggcacatccagcccgtgcctgtgttcactgtgccccgaagtgcaattacccataccccttctcagcctggggaccccaggcaaccacagactgtccactcaggggagctgaatcccaggtcagccctgccaatgtcccttaggaactgcccaggcaaggcccctggttttgtatacttgttcctgccacccagcagtagatgagtgtttcaggtgaagaccaggatagattttctaagtgtgaatccccacttcacatatggaaccccttatgctgaacttgaaaagcaccaagacttcctgtagacaagaaagtgcttaggtagggacagcccctgggcatcccacccaatgtagctggcaccccactatggcaaaggtgccttgataactgagccctgtatccctcccatgcccagccagattctcatgggaagccctctcccttcttttctgcctaacaccatctcatcgtttctggcctcactgtggacaatccacacacattcttctttcctctcctggcggggcacagagccacccccttgccttttcttttcttgaaggttctagttcagctcctgattcatcagacccttctagccccctgcatctagcagtgaagcatgaagcctggtggggatgtggtactcccatctggtgtggccaccagctctgccaatgttcctgtagccttggaaaacttgctctctcggttcttttgggtgctgtgtactccccagcttccccccttccccccccattttgcacctgggtttagtgaaaggatggcatttggttgacccatatagaaacccagaatgaggtctcagggccaggaggcctggtatttgtaggccagggaaggggaagaggcaagtggtctggggtatcaccagccagccctctctgatttggcctctactccccataagtcacagtaccataagcaggcttctggcctcagcaatttggtctttgtgcccaagtttattgtgagaatttcctgaaaactctataaaaggtctcttcctactgtaggcctctaatgtttctcccctttttgcttcagtccactcttcagtcttgtaggcctagttttcaaacctgcacatgtgtcctacctggccacaggcatgcaggcctcaggcagctgggccagtttgggagcctcgggtgatgtctgcacgatctggggctgcctctgcacccctgctgtgggcttcagggttggagaagggctgggaccaaccgggtgagatccacaagtctctggatgtggctgaaggcaaatacacaattgaagtactttctgttttgaagtgctttcccttttgaatctggtttgaaacatgcagcttctgtctctagcccaaggaaagaccaaaacatagggaaataaaagcatttatctttgtcttggaagtaattgttgaagttgtgcagttgatcagtgcacagttagatgcaatgtttatagaaattgattgttaaaccaaatttacactggcatgtgtggtgtagtttctaaaaggcacttcacatttgaaatttttcttaccttagaaagtttctagtgatctaaatgtctagttttgtattcttttgtgtgtgttcactgtttctcagtattaccacttgaataattctctgtacaggggggtttgtgctatacactgggatgtctaattgcagcaataaagcctttctttaaaaaggaaaaaaaaaat

SEQ ID NO: 315021 - DNA, 4744 bp, Homo sapiens
gaattttgatcaccttagcatctgagtgaggagagatggggtcttgctgtgttgcccagactggtctcaaactcctggcctcaagtgatccttctgcctcagcttcccaaagtactgggattacagcttgaaatccatggcccaaaatgactctaccagtggagactctcttctgtgaagaagacgaccagataagaggttgggatgagcatgccactgcatcagatctctgccattccatcccaggatgccatctctgctagagtctacagaagtaagaccaaagaaaaggagagggaagaacagaatgagaagactttgggacatttcatgagtcattcaagcaacatttctaaggctgggagtcctccgtcagcatcagctccggctccggtgtcctccttctctcgcacttctatcacgccatccagccaggacatctgcaggatctgccactgtgaaggagatgatgagagccccctgatcaccccctgccactgcacaggaagcctccacttcgtgcaccaggcctgcctgcagcagtggatcaagagctccgacacgcgctgctgcgagctctgcaagtatgagttcatcatggagaccaagctgaagccactgagaaaatgggagaagttgcagatgacgtccagcgagcgcaggaagatcatgtgctcagtgacattccacgtcattgccatcacatgtgtggtctggtccttgtatgtgctcattgaccgtactgctgaggagatcaagcaggggcaggcaacaggaatcctagaatggcccttttggactaaattggtggttgtggccatcggcttcaccggaggacttctttttatgtatgttcagtgtaaagtgtatgtgcaattgtggaagagactcaaggcctataatagagtgatctatgttcaaaactgtccagaaacaagcaaaaagaatatttttgaaaaatctccactaacagagcccaactttgaaaataaacatggatatggaatctgtcattccgacacaaactcttcttgttgcacagagcctgaagacactggagcagaaatcattcacgtctgattgtgtgcgggttgtcattttcctggacatccatgaagagctgaaggaaattgtttactgccaattgtatacctttcttatgtcctttaatagcatagactggacaggtgactatttatagtggcttctctttttctaaaccctccttagtctcctagaaaaccttcctgtgggccaggcatgcctgggtcctgcctctgcctggcagctctgtgggaaagtggaagaccccatgatgacatcatggggagccagcagagttcctgcccatggtcttgagctgaatgagagaataaaatgccaatcccaagggaagaggaggagcaggggtgcccaggccctgatacccagccgcctccagcttgcagtggtccccagcctggagcagagcattggggagtgtctagccatgacgagaagattccctctgcatcacggcgaaccccaggagatggtattgaaacagacccccaaacacagactcctgcctgccctctgccgatgctgcctcctccatgctcttgagcaggtggagccatggtgctctgtggtggcgcatgattcactgagcaaacagcactttacagaagaaaatctttattttgtaatatgtgtgtccagcgggattgacactcaaaaaaagtctcacttagaaatcttcccttccttacctttgtatctcctttacatcatgagagatcaaaaatccattttgccttacatatgctaagaagcgtggcattctttctgttcataaaacagactcatgacttttaagacaggacaagcaggccagaggctttttttttaatcacagatctcatgggaattagtggatgctaaatggcaattaaagcatgattcctatgcttttgagcctgttttatgacaaggtgttactttgtagacctggcccatacatttcttttttgtcaacactgaaaaagaacagtttctgagatcgaaatggaaggaaaggaagtgagtaatgacaacaaaactgaatatttaaaaaatattcctttatagttaaatctctccagttggtgttggcttcacattgaaagagcagccatgtgccaccctggccggggtgtgtgcactgcatgcaggttctcccttgcatgcaagatgggtgctggcccactgtgaggcttctgctcggggaagttctgtggagtcactaccagggccaagaggcaggtgggctggctctgggacgagggccaggtgtgagcaaactgccagggtccgctgtgccactgctccccggccacatgcccgcccagctgtcgccttaaccagactgaacagacaggatccttcagggcccttggccccactctcagtgcattctgtcatcagggattaccacctgtaccattttcataaaacaaaaccaaaatcactaccatcaaatggccttgtccctctaaaaagtctgcttaaaattctgtttttaaaacccagtttcctagttttccaggcaaatagttacctccgggaaagttgctgggggggcctgaagcacaatgtagcgcagatgcttcctttccaggccattctctcacccagcctgcacggaggagatgggagatgctgggggtcctgccctcagtctttttgggccttaggcgtttcgttcatcctgctaaggggatgaagcaaacacgaggtgattcctttgcctttcagagtggaagccctggagtttgttttgaaggccaggaggctgaaggatctctaagctacggtgtgggcttaatagcagcaggctttgtcctcctgtctcctccaagccagtgtctgattccttggcaacacaggtcttagtctgtggagtggctctgctgtggccttcctctggccgggcaggcactgtccagccatagccagctcctgagaataggtcagcctctcctttctgtctcccagggcacatccagcccgtgcctgtgttcactgtgccccgaagtgcaattacccataccccttctcagcctggggaccccaggcaaccacagactgtccactcaggggagctgaatcccaggtcagccctgccaatgtcccttaggaactgcccaggcaaggcccctggttttgtatacttgttcctgccacccagcagtagatgagtgtttcaggtgaagaccaggatagattttctaagtgtgaatccccacttcacatatggaaccccttatgctgaacttgaaaagcaccaagacttcctgtagacaagaaagtgcttaggtagggacagcccctgggcatcccacccaatgtagctggcaccccactatggcaaaggtgccttgataactgagccctgtatccctcccatgcccagccagattctcatgggaagccctctcccttcttttctgcctaacaccatctcatcgtttctggcctcactgtggacaatccacacacattcttctttcctctcctggcggggcacagagccacccccttgccttttcttttcttgaaggttctagttcagctcctgattcatcagacccttctagccccctgcatctagcagtgaagcatgaagcctggtggggatgtggtactcccatctggtgtggccaccagctctgccaatgttcctgtagccttggaaaacttgctctctcggttcttttgggtgctgtgtactccccagcttccccccttccccccccattttgcacctgggtttagtgaaaggatggcatttggttgacccatatagaaacccagaatgaggtctcagggccaggaggcctggtatttgtaggccagggaaggggaagaggcaagtggtctggggtatcaccagccagccctctctgatttggcctctactccccataagtcacagtaccataagcaggcttctggcctcagcaatttggtctttgtgcccaagtttattgtgagaatttcctgaaaactctataaaaggtctcttcctactgtaggcctctaatgtttctcccctttttgcttcagtccactcttcagtcttgtaggcctagttttcaaacctgcacatgtgtcctacctggccacaggcatgcaggcctcaggcagctgggccagtttgggagcctcgggtgatgtctgcacgatctggggctgcctctgcacccctgctgtgggcttcagggttggagaagggctgggaccaaccgggtgagatccacaagtctctggatgtggctgaaggcaaatacacaattgaagtactttctgttttgaagtgctttcccttttgaatctggtttgaaacatgcagcttctgtctctagcccaaggaaagaccaaaacatagggaaataaaagcatttatctttgtcttggaagtaattgttgaagttgtgcagttgatcagtgcacagttagatgcaatgtttatagaaattgattgttaaaccaaatttacactggcatgtgtggtgtagtttctaaaaggcacttcacatttgaaatttttcttaccttagaaagtttctagtgatctaaatgtctagttttgtattcttttgtgtgtgttcactgtttctcagtattaccacttgaataattctctgtacaggggggtttgtgctatacactgggatgtctaattgcagcaataaagcctttctttaaaaaggaaaaaaaaaat

SEQ ID NO: 315022 - DNA, 5027 bp, Homo sapiens
ctaacatttggatcagagatcccctcactaaaacagcctgagagcctggctccttccaggacgagtgccccaacctgttctctagctgctggaaaagacccctctgtttcttaaaagcctgttaagttccttcaggctagtagctacaccttgttgcatacttccttggaaatagagagtgctttcaaattaatttctcacttattgctattagtggtcccaagaaaaagagatgaaattgcagcatcttgtaatggtgagttttttaggtctaggagagaggtactgtcatctttgtttacttgctgagagacgacagaaatgtgtagttgtggggtatgaaggtaaagtcagtgattatagctaaaaagcaaacgtcatttaaggtcactggtatttttggatgttggaatgcaggttttgttttacatagaaattttccctctaattattttaccatcttatgttctggaaaatgattccatgttgctttaaattcatctttcagtgaagttcttatttcttaccaaaaaatgacagctttgtcatttcttacatcgttttttcctttctgttgccaaatgccctccagactttccatgttggtgcggtaagctagacatttttagtttgtagtgattgttttcgtttgtgtttgtatgtttttgtgcccatagtcacttctgtaatgttcgtttctgagtttcctttggggggattaacctgccactgaagtgtcagcttccctgtcatgggactgtccttggaatgacaggttttccttccaccataggatctgccactgtgaaggagatgatgagagccccctgatcaccccctgccactgcacaggaagcctccacttcgtgcaccaggcctgcctgcagcagtggatcaagagctccgacacgcgctgctgcgagctctgcaagtatgagttcatcatggagaccaagctgaagccactgagaaaatgggagaagttgcagatgacgtccagcgagcgcaggaagatcatgtgctcagtgacattccacgtcattgccatcacatgtgtggtctggtccttgtatgtgctcattgaccgtactgctgaggagatcaagcaggggcaggcaacaggaatcctagaatggcccttttggactaaattggtggttgtggccatcggcttcaccggaggacttctttttatgtatgttcagtgtaaagtgtatgtgcaattgtggaagagactcaaggcctataatagagtgatctatgttcaaaactgtccagaaacaagcaaaaagaatatttttgaaaaatctccactaacagagcccaactttgaaaataaacatggatatggaatctgtcattccgacacaaactcttcttgttgcacagagcctgaagacactggagcagaaatcattcacgtctgattgtgtgcgggttgtcattttcctggacatccatgaagagctgaaggaaattgtttactgccaattgtatacctttcttatgtcctttaatagcatagactggacaggtgactatttatagtggcttctctttttctaaaccctccttagtctcctagaaaaccttcctgtgggccaggcatgcctgggtcctgcctctgcctggcagctctgtgggaaagtggaagaccccatgatgacatcatggggagccagcagagttcctgcccatggtcttgagctgaatgagagaataaaatgccaatcccaagggaagaggaggagcaggggtgcccaggccctgatacccagccgcctccagcttgcagtggtccccagcctggagcagagcattggggagtgtctagccatgacgagaagattccctctgcatcacggcgaaccccaggagatggtattgaaacagacccccaaacacagactcctgcctgccctctgccgatgctgcctcctccatgctcttgagcaggtggagccatggtgctctgtggtggcgcatgattcactgagcaaacagcactttacagaagaaaatctttattttgtaatatgtgtgtccagcgggattgacactcaaaaaaagtctcacttagaaatcttcccttccttacctttgtatctcctttacatcatgagagatcaaaaatccattttgccttacatatgctaagaagcgtggcattctttctgttcataaaacagactcatgacttttaagacaggacaagcaggccagaggctttttttttaatcacagatctcatgggaattagtggatgctaaatggcaattaaagcatgattcctatgcttttgagcctgttttatgacaaggtgttactttgtagacctggcccatacatttcttttttgtcaacactgaaaaagaacagtttctgagatcgaaatggaaggaaaggaagtgagtaatgacaacaaaactgaatatttaaaaaatattcctttatagttaaatctctccagttggtgttggcttcacattgaaagagcagccatgtgccaccctggccggggtgtgtgcactgcatgcaggttctcccttgcatgcaagatgggtgctggcccactgtgaggcttctgctcggggaagttctgtggagtcactaccagggccaagaggcaggtgggctggctctgggacgagggccaggtgtgagcaaactgccagggtccgctgtgccactgctccccggccacatgcccgcccagctgtcgccttaaccagactgaacagacaggatccttcagggcccttggccccactctcagtgcattctgtcatcagggattaccacctgtaccattttcataaaacaaaaccaaaatcactaccatcaaatggccttgtccctctaaaaagtctgcttaaaattctgtttttaaaacccagtttcctagttttccaggcaaatagttacctccgggaaagttgctgggggggcctgaagcacaatgtagcgcagatgcttcctttccaggccattctctcacccagcctgcacggaggagatgggagatgctgggggtcctgccctcagtctttttgggccttaggcgtttcgttcatcctgctaaggggatgaagcaaacacgaggtgattcctttgcctttcagagtggaagccctggagtttgttttgaaggccaggaggctgaaggatctctaagctacggtgtgggcttaatagcagcaggctttgtcctcctgtctcctccaagccagtgtctgattccttggcaacacaggtcttagtctgtggagtggctctgctgtggccttcctctggccgggcaggcactgtccagccatagccagctcctgagaataggtcagcctctcctttctgtctcccagggcacatccagcccgtgcctgtgttcactgtgccccgaagtgcaattacccataccccttctcagcctggggaccccaggcaaccacagactgtccactcaggggagctgaatcccaggtcagccctgccaatgtcccttaggaactgcccaggcaaggcccctggttttgtatacttgttcctgccacccagcagtagatgagtgtttcaggtgaagaccaggatagattttctaagtgtgaatccccacttcacatatggaaccccttatgctgaacttgaaaagcaccaagacttcctgtagacaagaaagtgcttaggtagggacagcccctgggcatcccacccaatgtagctggcaccccactatggcaaaggtgccttgataactgagccctgtatccctcccatgcccagccagattctcatgggaagccctctcccttcttttctgcctaacaccatctcatcgtttctggcctcactgtggacaatccacacacattcttctttcctctcctggcggggcacagagccacccccttgccttttcttttcttgaaggttctagttcagctcctgattcatcagacccttctagccccctgcatctagcagtgaagcatgaagcctggtggggatgtggtactcccatctggtgtggccaccagctctgccaatgttcctgtagccttggaaaacttgctctctcggttcttttgggtgctgtgtactccccagcttccccccttccccccccattttgcacctgggtttagtgaaaggatggcatttggttgacccatatagaaacccagaatgaggtctcagggccaggaggcctggtatttgtaggccagggaaggggaagaggcaagtggtctggggtatcaccagccagccctctctgatttggcctctactccccataagtcacagtaccataagcaggcttctggcctcagcaatttggtctttgtgcccaagtttattgtgagaatttcctgaaaactctataaaaggtctcttcctactgtaggcctctaatgtttctcccctttttgcttcagtccactcttcagtcttgtaggcctagttttcaaacctgcacatgtgtcctacctggccacaggcatgcaggcctcaggcagctgggccagtttgggagcctcgggtgatgtctgcacgatctggggctgcctctgcacccctgctgtgggcttcagggttggagaagggctgggaccaaccgggtgagatccacaagtctctggatgtggctgaaggcaaatacacaattgaagtactttctgttttgaagtgctttcccttttgaatctggtttgaaacatgcagcttctgtctctacaccccggcaggtccactatataggagtcactctgagcgcattatacgattgtacgtagtagtaactctctgagatgtgagacatgctgatctgctgtcacagttagacgctatgtttatcgacatcgtctgtcattctctaggcccactggcatgcatgttgtacagcctcttagtgcacatctacatggtgacactgtttttaccgagcgaatgtttctactgatctatatctctacatgtgtgattctcttagtgtgtgtactactctttctcatgattaccagcttgcatac

SEQ ID NO: 315023 - DNA, 587 bp, Homo sapiens
tttgtagtgtgtctaaatgcaatcatgattgcatttagacctgcacgatctggggctgcctctgcacccctgctgtgggcttcagggttggagaagggctgggaccaaccgggtgagatccacaagtctctggatgtggctgaaggcaaatacacaattgaagtactttctgttttgaagtgctttcccttttgaatctggtttgaaacatgcagcttctgtctctagcccaaggaaagaccaaaacatagggaaataaaagcatttatctttgtcttggaagtaattgttgaagttgtgcagttgatcagtgcacagttagatgcaatgtttatagaaattgattgttaaaccaaatttacactggcatgtgtggtgtagtttctaaaaggcacttcacatttgaaatttttcttaccttagaaagtttctagtgatctaaatgtctagttttgtattcttttgtgtgtgttcactgtttctcagtattaccacttgaataattctctgtacaggggggtttgtgctatacactgggatgtctaattgcagcaataaagcctttctttaaaaaggaaaaaaaaaat

SEQ ID NO: 315024 - DNA, 624 bp, Homo sapiens
tggcccaaaatgactctaccagtggagactctcttctgtgaagaagacgaccagataagaggttgggatgagcatgccactgcatcagatctctgccattccatcccaggatgccatctctgctagagtctacagaagtaagaccaaagaaaaggagagggaagaacaggtactgggagagtatcttttttagtttcattatttttattaaatttttattaaagatgacctagaacagtgcttaaactctaaaggtcaggttttctctgataatatactgacaagcacacaaatagttgtactcagaaggaattgtctttttgtagatttctaggttttcagattttggtgtaaactactgtttataaatggttataaatgacttatcttcattggttaaatctacctgattatttttggttaatcactgtgactaagttctttggattctcagaacatgatgctgctagtttcctattcatcgtagtgtgaaatttggacaccagatggctggaatttcttaatatgtgtcttagtctgccctagctgctgtaacaaaatgccatagcctgggtggtttaaataacaagcatttatttctcacagttctggaggctggaaatc

SEQ ID NO: 315025 - DNA, 267 bp, Homo sapiens
tttactttctgtgcttttatcccactgttctgcatgcagttccagtgcagtgttttctgagtgttgtcaccacagttccgtgcagtctgctgttgtctcgaaagctcctcactgccagagttctctgacacaagggctcactgtgacagttatctgtaaggacacattacaggcgtcaaagagaaattcctttggttcagaatgggcccaggccttgaagcctgctaagaataccaaagccagaagaacactaaagttctcaaggtc

SEQ ID NO: 315026 - DNA, 451 bp, Homo sapiens
gcccgcggagaggcagcgcgactccaggcagtgggtctctctgccccggtgctcgcgtctgcccctggggccgggccgagcggaaccaggaatcgcagaaacggtcagcgcccagggctctaggccggccgccccgggtgccaggtgaattcctttccctgaccggctgtgagacgttggcccgtcagccgtcgtctttggcctgagtgtgcacatctgtaaaatggaagctcggactagtgatccgtgaggaccttccacgtctgacgtgtgatctcgagagacctgcgtacattcggggtgccagaaggaaagcataggtaactattttgtcctttaattgctaacttttctttggtctttaaatctgttttcatcttaaacgattcgtattcctgtccacctgggtgaagtttttaatagaaaacttattgggtgggggttataatgg

SEQ ID NO: 315027 - DNA, 872 bp, Homo sapiens
tgccactcggtgtcctcccgcggaggggcgtagggtgtaaacaggcgacgcgctgggggaggtgcggccttgctgcgtccacgtctcgggcatgctcgaggcgggccagggcggtagcgccgccagctcagagcccacctgaggtaactcctgcggcctctaggatcggagtcccccacgccgcgcgcagccgccgccgctggccgccaataagggcggccgagcccccggcccgggcagggggtgtggctgccggcagcgcgtcggctacaggtgggctgggctgggctgggctgggctgggctgggtgggggcggccgccaaggacccatccctgcgctgcgggcccggcgtggagcccgcggagaggcagcgcgactccaggcagtgggtctctctgccccggtgctcgcgtctgcccctggggccgggccgagcggaaccaggaatcgcagaaacggtcagcgcccagggctctaggccggccgccccgggtgccaggtgaattcctttccctgaccggctgtgagacgttggcccgtcagccgtcgtctttggcctgagtgtgcacatctgtaaaatggaagctcggactagtgatccgtgaggaccttccacgtctgacgtgtgatctcgagagacctgcgtacattcggggtgccagaaggaaagcatagttgctccgatacagaatgggaatggaagacttttgaggccaaccgaatgggttaggacatatctgaaaaacatgaaaacgctaaaaagcatgaaaactgaaggagtatacgaactcaagtcgttgagagtcatgaaataatgtgaacatgctcttgtgtgaaatcttgagaccctggagcaagagaattttggat

SEQ ID NO: 315028 - DNA, 5091 bp, Homo sapiens
ctaacatttggatcagagatcccctcactaaaacagcctgagagcctggctccttccaggacgagtgccccaacctgttctctagctgctggaaaagacccctctgtttcttaaaagcctgttaagttccttcaggctagtagctacaccttgttgcatacttccttggaaatagagagtgctttcaaattaatttctcacttattgctattagtggtcccaagaaaaagagatgaaattgcagcatcttgtaatggtgagttttttaggtctaggagagaggtactgtcatctttgtttacttgctgagagacgacagaaatgtgtagttgtggggtatgaaggtaaagtcagtgattatagctaaaaagcaaacgtcatttaaggtcactggtatttttggatgttggaatgcaggttttgttttacatagaaattttccctctaattattttaccatcttatgttctggaaaatgattccatgttgctttaaattcatctttcagtgaagttcttatttcttaccaaaaaatgacagctttgtcatttcttacatcgttttttcctttctgttgccaaatgccctccagactttccatgttggtgcggtaagctagacatttttagtttgtagtgattgttttcgtttgtgtttgtatgtttttgtgcccatagtcacttctgtaatgttcgtttctgagtttcctttggggggattaacctgccactgaagtgtcagcttccctgtcatgggactgtccttggaatgacaggttttccttccaccataggatctgccactgtgaaggagatgatgagagccccctgatcaccccctgccactgcacaggaagcctccacttcgtgcaccaggcctgcctgcagcagtggatcaagagctccgacacgcgctgctgcgagctctgcaagtatgagttcatcatggagaccaagctgaagccactgagaaaatgggagaagttgcagatgacgtccagcgagcgcaggaagatcatgtgctcagtgacattccacgtcattgccatcacatgtgtggtctggtccttgtatgtgctcattgaccgtactgctgaggagatcaagcaggggcaggcaacaggaatcctagaatggcccttttggactaaattggtggttgtggccatcggcttcaccggaggacttctttttatgtatgttcagtgtaaagtgtatgtgcaattgtggaagagactcaaggcctataatagagtgatctatgttcaaaactgtccagaaacaagcaaaaagaatatttttgaaaaatctccactaacagagcccaactttgaaaataaacatggatatggaatctgtcattccgacacaaactcttcttgttgcacagagcctgaagacactggagcagaaatcattcacgtctgattgtgtgcgggttgtcattttcctggacatccatgaagagctgaaggaaattgtttactgccaattgtatacctttcttatgtcctttaatagcatagactggacaggtgactatttatagtggcttctctttttctaaaccctccttagtctcctagaaaaccttcctgtgggccaggcatgcctgggtcctgcctctgcctggcagctctgtgggaaagtggaagaccccatgatgacatcatggggagccagcagagttcctgcccatggtcttgagctgaatgagagaataaaatgccaatcccaagggaagaggaggagcaggggtgcccaggccctgatacccagccgcctccagcttgcagtggtccccagcctggagcagagcattggggagtgtctagccatgacgagaagattccctctgcatcacggcgaaccccaggagatggtattgaaacagacccccaaacacagactcctgcctgccctctgccgatgctgcctcctccatgctcttgagcaggtggagccatggtgctctgtggtggcgcatgattcactgagcaaacagcactttacagaagaaaatctttattttgtaatatgtgtgtccagcgggattgacactcaaaaaaagtctcacttagaaatcttcccttccttacctttgtatctcctttacatcatgagagatcaaaaatccattttgccttacatatgctaagaagcgtggcattctttctgttcataaaacagactcatgacttttaagacaggacaagcaggccagaggctttttttttaatcacagatctcatgggaattagtggatgctaaatggcaattaaagcatgattcctatgcttttgagcctgttttatgacaaggtgttactttgtagacctggcccatacatttcttttttgtcaacactgaaaaagaacagtttctgagatcgaaatggaaggaaaggaagtgagtaatgacaacaaaactgaatatttaaaaaatattcctttatagttaaatctctccagttggtgttggcttcacattgaaagagcagccatgtgccaccctggccggggtgtgtgcactgcatgcaggttctcccttgcatgcaagatgggtgctggcccactgtgaggcttctgctcggggaagttctgtggagtcactaccagggccaagaggcaggtgggctggctctgggacgagggccaggtgtgagcaaactgccagggtccgctgtgccactgctccccggccacatgcccgcccagctgtcgccttaaccagactgaacagacaggatccttcagggcccttggccccactctcagtgcattctgtcatcagggattaccacctgtaccattttcataaaacaaaaccaaaatcactaccatcaaatggccttgtccctctaaaaagtctgcttaaaattctgtttttaaaacccagtttcctagttttccaggcaaatagttacctccgggaaagttgctgggggggcctgaagcacaatgtagcgcagatgcttcctttccaggccattctctcacccagcctgcacggaggagatgggagatgctgggggtcctgccctcagtctttttgggccttaggcgtttcgttcatcctgctaaggggatgaagcaaacacgaggtgattcctttgcctttcagagtggaagccctggagtttgttttgaaggccaggaggctgaaggatctctaagctacggtgtgggcttaatagcagcaggctttgtcctcctgtctcctccaagccagtgtctgattccttggcaacacaggtcttagtctgtggagtggctctgctgtggccttcctctggccgggcaggcactgtccagccatagccagctcctgagaataggtcagcctctcctttctgtctcccagggcacatccagcccgtgcctgtgttcactgtgccccgaagtgcaattacccataccccttctcagcctggggaccccaggcaaccacagactgtccactcaggggagctgaatcccaggtcagccctgccaatgtcccttaggaactgcccaggcaaggcccctggttttgtatacttgttcctgccacccagcagtagatgagtgtttcaggtgaagaccaggatagattttctaagtgtgaatccccacttcacatatggaaccccttatgctgaacttgaaaagcaccaagacttcctgtagacaagaaagtgcttaggtagggacagcccctgggcatcccacccaatgtagctggcaccccactatggcaaaggtgccttgataactgagccctgtatccctcccatgcccagccagattctcatgggaagccctctcccttcttttctgcctaacaccatctcatcgtttctggcctcactgtggacaatccacacacattcttctttcctctcctggcggggcacagagccacccccttgccttttcttttcttgaaggttctagttcagctcctgattcatcagacccttctagccccctgcatctagcagtgaagcatgaagcctggtggggatgtggtactcccatctggtgtggccaccagctctgccaatgttcctgtagccttggaaaacttgctctctcggttcttttgggtgctgtgtactccccagcttccccccttccccccccattttgcacctgggtttagtgaaaggatggcatttggttgacccatatagaaacccagaatgaggtctcagggccaggaggcctggtatttgtaggccagggaaggggaagaggcaagtggtctggggtatcaccagccagccctctctgatttggcctctactccccataagtcacagtaccataagcaggcttctggcctcagcaatttggtctttgtgcccaagtttattgtgagaatttcctgaaaactctataaaaggtctcttcctactgtaggcctctaatgtttctcccctttttgcttcagtccactcttcagtcttgtaggcctagttttcaaacctgcacatgtgtcctacctggccacaggcatgcaggcctcaggcagctgggccagtttgggagcctcgggtgatgtctgcacgatctggggctgcctctgcacccctgctgtgggcttcagggttggagaagggctgggaccaaccgggtgagatccacaagtctctggatgtggctgaaggcaaatacacaattgaagtactttctgttttgaagtgctttcccttttgaatctggtttgaaacatgcagcttctgtctctagcccaaggaaagaccaaaacatagggaaataaaagcatttatctttgtcttggaagtaattgttgaagttgtgcagttgatcagtgcacagttagatgcaatgtttatagaaattgattgttaaaccaaatttacactggcatgtgtggtgtagtttctaaaaggcacttcacatttgaaatttttcttaccttagaaagtttctagtgatctaaatgtctagttttgtattcttttgtgtgtgttcactgtttctcagtattaccacttgaataattctctgtacaggggggtttgtgctatacactgggatgtctaattgcagcaataaagcctttctttaaaaaggaaaaaaaaaat

SEQ ID NO: 315029 - DNA, 5295 bp, Homo sapiens
tgccactcggtgtcctcccgcggaggggcgtagggtgtaaacaggcgacgcgctgggggaggtgcggccttgctgcgtccacgtctcgggcatgctcgaggcgggccagggcggtagcgccgccagctcagagcccacctgaggtaactcctgcggcctctaggatcggagtcccccacgccgcgcgcagccgccgccgctggccgccaataagggcggccgagcccccggcccgggcagggggtgtggctgccggcagcgcgtcggctacaggtgggctgggctgggctgggctgggctgggctgggtgggggcggccgccaaggacccatccctgcgctgcgggcccggcgtggagcccgcggagaggcagcgcgactccaggcagtgggtctctctgccccggtgctcgcgtctgcccctggggccgggccgagcggaaccaggaatcgcagaaacggtcagcgcccagggctctaggccggccgccccgggtgccaggtgaattcctttccctgaccggctgtgagacgttggcccgtcagccgtcgtctttggcctgagtgtgcacatctgtaaaatggaagctcggactagtgatccgtgaggaccttccacgtctgacgtgtgatctcgagagacctgcgtacattcggggtgccagaaggaaagcatagcttgaaatccatggcccaaaatgactctaccagtggagactctcttctgtgaagaagacgaccagataagaggttgggatgagcatgccactgcatcagatctctgccattccatcccaggatgccatctctgctagagtctacagaagtaagaccaaagaaaaggagagggaagaacagaatgagaagactttgggacatttcatgagtcattcaagcaacatttctaaggctgggagtcctccgtcagcatcagctccggctccggtgtcctccttctctcgcacttctatcacgccatccagccaggacatctgcaggatctgccactgtgaaggagatgatgagagccccctgatcaccccctgccactgcacaggaagcctccacttcgtgcaccaggcctgcctgcagcagtggatcaagagctccgacacgcgctgctgcgagctctgcaagtatgagttcatcatggagaccaagctgaagccactgagaaaatgggagaagttgcagatgacgtccagcgagcgcaggaagatcatgtgctcagtgacattccacgtcattgccatcacatgtgtggtctggtccttgtatgtgctcattgaccgtactgctgaggagatcaagcaggggcaggcaacaggaatcctagaatggcccttttggactaaattggtggttgtggccatcggcttcaccggaggacttctttttatgtatgttcagtgtaaagtgtatgtgcaattgtggaagagactcaaggcctataatagagtgatctatgttcaaaactgtccagaaacaagcaaaaagaatatttttgaaaaatctccactaacagagcccaactttgaaaataaacatggatatggaatctgtcattccgacacaaactcttcttgttgcacagagcctgaagacactggagcagaaatcattcacgtctgattgtgtgcgggttgtcattttcctggacatccatgaagagctgaaggaaattgtttactgccaattgtatacctttcttatgtcctttaatagcatagactggacaggtgactatttatagtggcttctctttttctaaaccctccttagtctcctagaaaaccttcctgtgggccaggcatgcctgggtcctgcctctgcctggcagctctgtgggaaagtggaagaccccatgatgacatcatggggagccagcagagttcctgcccatggtcttgagctgaatgagagaataaaatgccaatcccaagggaagaggaggagcaggggtgcccaggccctgatacccagccgcctccagcttgcagtggtccccagcctggagcagagcattggggagtgtctagccatgacgagaagattccctctgcatcacggcgaaccccaggagatggtattgaaacagacccccaaacacagactcctgcctgccctctgccgatgctgcctcctccatgctcttgagcaggtggagccatggtgctctgtggtggcgcatgattcactgagcaaacagcactttacagaagaaaatctttattttgtaatatgtgtgtccagcgggattgacactcaaaaaaagtctcacttagaaatcttcccttccttacctttgtatctcctttacatcatgagagatcaaaaatccattttgccttacatatgctaagaagcgtggcattctttctgttcataaaacagactcatgacttttaagacaggacaagcaggccagaggctttttttttaatcacagatctcatgggaattagtggatgctaaatggcaattaaagcatgattcctatgcttttgagcctgttttatgacaaggtgttactttgtagacctggcccatacatttcttttttgtcaacactgaaaaagaacagtttctgagatcgaaatggaaggaaaggaagtgagtaatgacaacaaaactgaatatttaaaaaatattcctttatagttaaatctctccagttggtgttggcttcacattgaaagagcagccatgtgccaccctggccggggtgtgtgcactgcatgcaggttctcccttgcatgcaagatgggtgctggcccactgtgaggcttctgctcggggaagttctgtggagtcactaccagggccaagaggcaggtgggctggctctgggacgagggccaggtgtgagcaaactgccagggtccgctgtgccactgctccccggccacatgcccgcccagctgtcgccttaaccagactgaacagacaggatccttcagggcccttggccccactctcagtgcattctgtcatcagggattaccacctgtaccattttcataaaacaaaaccaaaatcactaccatcaaatggccttgtccctctaaaaagtctgcttaaaattctgtttttaaaacccagtttcctagttttccaggcaaatagttacctccgggaaagttgctgggggggcctgaagcacaatgtagcgcagatgcttcctttccaggccattctctcacccagcctgcacggaggagatgggagatgctgggggtcctgccctcagtctttttgggccttaggcgtttcgttcatcctgctaaggggatgaagcaaacacgaggtgattcctttgcctttcagagtggaagccctggagtttgttttgaaggccaggaggctgaaggatctctaagctacggtgtgggcttaatagcagcaggctttgtcctcctgtctcctccaagccagtgtctgattccttggcaacacaggtcttagtctgtggagtggctctgctgtggccttcctctggccgggcaggcactgtccagccatagccagctcctgagaataggtcagcctctcctttctgtctcccagggcacatccagcccgtgcctgtgttcactgtgccccgaagtgcaattacccataccccttctcagcctggggaccccaggcaaccacagactgtccactcaggggagctgaatcccaggtcagccctgccaatgtcccttaggaactgcccaggcaaggcccctggttttgtatacttgttcctgccacccagcagtagatgagtgtttcaggtgaagaccaggatagattttctaagtgtgaatccccacttcacatatggaaccccttatgctgaacttgaaaagcaccaagacttcctgtagacaagaaagtgcttaggtagggacagcccctgggcatcccacccaatgtagctggcaccccactatggcaaaggtgccttgataactgagccctgtatccctcccatgcccagccagattctcatgggaagccctctcccttcttttctgcctaacaccatctcatcgtttctggcctcactgtggacaatccacacacattcttctttcctctcctggcggggcacagagccacccccttgccttttcttttcttgaaggttctagttcagctcctgattcatcagacccttctagccccctgcatctagcagtgaagcatgaagcctggtggggatgtggtactcccatctggtgtggccaccagctctgccaatgttcctgtagccttggaaaacttgctctctcggttcttttgggtgctgtgtactccccagcttccccccttccccccccattttgcacctgggtttagtgaaaggatggcatttggttgacccatatagaaacccagaatgaggtctcagggccaggaggcctggtatttgtaggccagggaaggggaagaggcaagtggtctggggtatcaccagccagccctctctgatttggcctctactccccataagtcacagtaccataagcaggcttctggcctcagcaatttggtctttgtgcccaagtttattgtgagaatttcctgaaaactctataaaaggtctcttcctactgtaggcctctaatgtttctcccctttttgcttcagtccactcttcagtcttgtaggcctagttttcaaacctgcacatgtgtcctacctggccacaggcatgcaggcctcaggcagctgggccagtttgggagcctcgggtgatgtctgcacgatctggggctgcctctgcacccctgctgtgggcttcagggttggagaagggctgggaccaaccgggtgagatccacaagtctctggatgtggctgaaggcaaatacacaattgaagtactttctgttttgaagtgctttcccttttgaatctggtttgaaacatgcagcttctgtctctagcccaaggaaagaccaaaacatagggaaataaaagcatttatctttgtcttggaagtaattgttgaagttgtgcagttgatcagtgcacagttagatgcaatgtttatagaaattgattgttaaaccaaatttacactggcatgtgtggtgtagtttctaaaaggcacttcacatttgaaatttttcttaccttagaaagtttctagtgatctaaatgtctagttttgtattcttttgtgtgtgttcactgtttctcagtattaccacttgaataattctctgtacaggggggtttgtgctatacactgggatgtctaattgcagcaataaagcctttctttaaaaaggaaaaaaaaaat

SEQ ID NO: 315030 - DNA, 4784 bp, Homo sapiens
agcggatggtaggtatagggctgtggatatcgtcagtttgaccaagtattccaagaggccccatggagtttgtcatctgtaatagaggacgttagtgcattagtgatgaaaaaactgcttaccactgactattgtgatctcccagggagtataaggcagctccgcacttgaaatccatggcccaaaatgactctaccagtggagactctcttctgtgaagaagacgaccagataagaggttgggatgagcatgccactgcatcagatctctgccattccatcccaggatgccatctctgctagagtctacagaagtaagaccaaagaaaaggagagggaagaacagaatgagaagactttgggacatttcatgagtcattcaagcaacatttctaaggctgggagtcctccgtcagcatcagctccggctccggtgtcctccttctctcgcacttctatcacgccatccagccaggacatctgcaggatctgccactgtgaaggagatgatgagagccccctgatcaccccctgccactgcacaggaagcctccacttcgtgcaccaggcctgcctgcagcagtggatcaagagctccgacacgcgctgctgcgagctctgcaagtatgagttcatcatggagaccaagctgaagccactgagaaaatgggagaagttgcagatgacgtccagcgagcgcaggaagatcatgtgctcagtgacattccacgtcattgccatcacatgtgtggtctggtccttgtatgtgctcattgaccgtactgctgaggagatcaagcaggggcaggcaacaggaatcctagaatggcccttttggactaaattggtggttgtggccatcggcttcaccggaggacttctttttatgtatgttcagtgtaaagtgtatgtgcaattgtggaagagactcaaggcctataatagagtgatctatgttcaaaactgtccagaaacaagcaaaaagaatatttttgaaaaatctccactaacagagcccaactttgaaaataaacatggatatggaatctgtcattccgacacaaactcttcttgttgcacagagcctgaagacactggagcagaaatcattcacgtctgattgtgtgcgggttgtcattttcctggacatccatgaagagctgaaggaaattgtttactgccaattgtatacctttcttatgtcctttaatagcatagactggacaggtgactatttatagtggcttctctttttctaaaccctccttagtctcctagaaaaccttcctgtgggccaggcatgcctgggtcctgcctctgcctggcagctctgtgggaaagtggaagaccccatgatgacatcatggggagccagcagagttcctgcccatggtcttgagctgaatgagagaataaaatgccaatcccaagggaagaggaggagcaggggtgcccaggccctgatacccagccgcctccagcttgcagtggtccccagcctggagcagagcattggggagtgtctagccatgacgagaagattccctctgcatcacggcgaaccccaggagatggtattgaaacagacccccaaacacagactcctgcctgccctctgccgatgctgcctcctccatgctcttgagcaggtggagccatggtgctctgtggtggcgcatgattcactgagcaaacagcactttacagaagaaaatctttattttgtaatatgtgtgtccagcgggattgacactcaaaaaaagtctcacttagaaatcttcccttccttacctttgtatctcctttacatcatgagagatcaaaaatccattttgccttacatatgctaagaagcgtggcattctttctgttcataaaacagactcatgacttttaagacaggacaagcaggccagaggctttttttttaatcacagatctcatgggaattagtggatgctaaatggcaattaaagcatgattcctatgcttttgagcctgttttatgacaaggtgttactttgtagacctggcccatacatttcttttttgtcaacactgaaaaagaacagtttctgagatcgaaatggaaggaaaggaagtgagtaatgacaacaaaactgaatatttaaaaaatattcctttatagttaaatctctccagttggtgttggcttcacattgaaagagcagccatgtgccaccctggccggggtgtgtgcactgcatgcaggttctcccttgcatgcaagatgggtgctggcccactgtgaggcttctgctcggggaagttctgtggagtcactaccagggccaagaggcaggtgggctggctctgggacgagggccaggtgtgagcaaactgccagggtccgctgtgccactgctccccggccacatgcccgcccagctgtcgccttaaccagactgaacagacaggatccttcagggcccttggccccactctcagtgcattctgtcatcagggattaccacctgtaccattttcataaaacaaaaccaaaatcactaccatcaaatggccttgtccctctaaaaagtctgcttaaaattctgtttttaaaacccagtttcctagttttccaggcaaatagttacctccgggaaagttgctgggggggcctgaagcacaatgtagcgcagatgcttcctttccaggccattctctcacccagcctgcacggaggagatgggagatgctgggggtcctgccctcagtctttttgggccttaggcgtttcgttcatcctgctaaggggatgaagcaaacacgaggtgattcctttgcctttcagagtggaagccctggagtttgttttgaaggccaggaggctgaaggatctctaagctacggtgtgggcttaatagcagcaggctttgtcctcctgtctcctccaagccagtgtctgattccttggcaacacaggtcttagtctgtggagtggctctgctgtggccttcctctggccgggcaggcactgtccagccatagccagctcctgagaataggtcagcctctcctttctgtctcccagggcacatccagcccgtgcctgtgttcactgtgccccgaagtgcaattacccataccccttctcagcctggggaccccaggcaaccacagactgtccactcaggggagctgaatcccaggtcagccctgccaatgtcccttaggaactgcccaggcaaggcccctggttttgtatacttgttcctgccacccagcagtagatgagtgtttcaggtgaagaccaggatagattttctaagtgtgaatccccacttcacatatggaaccccttatgctgaacttgaaaagcaccaagacttcctgtagacaagaaagtgcttaggtagggacagcccctgggcatcccacccaatgtagctggcaccccactatggcaaaggtgccttgataactgagccctgtatccctcccatgcccagccagattctcatgggaagccctctcccttcttttctgcctaacaccatctcatcgtttctggcctcactgtggacaatccacacacattcttctttcctctcctggcggggcacagagccacccccttgccttttcttttcttgaaggttctagttcagctcctgattcatcagacccttctagccccctgcatctagcagtgaagcatgaagcctggtggggatgtggtactcccatctggtgtggccaccagctctgccaatgttcctgtagccttggaaaacttgctctctcggttcttttgggtgctgtgtactccccagcttccccccttccccccccattttgcacctgggtttagtgaaaggatggcatttggttgacccatatagaaacccagaatgaggtctcagggccaggaggcctggtatttgtaggccagggaaggggaagaggcaagtggtctggggtatcaccagccagccctctctgatttggcctctactccccataagtcacagtaccataagcaggcttctggcctcagcaatttggtctttgtgcccaagtttattgtgagaatttcctgaaaactctataaaaggtctcttcctactgtaggcctctaatgtttctcccctttttgcttcagtccactcttcagtcttgtaggcctagttttcaaacctgcacatgtgtcctacctggccacaggcatgcaggcctcaggcagctgggccagtttgggagcctcgggtgatgtctgcacgatctggggctgcctctgcacccctgctgtgggcttcagggttggagaagggctgggaccaaccgggtgagatccacaagtctctggatgtggctgaaggcaaatacacaattgaagtactttctgttttgaagtgctttcccttttgaatctggtttgaaacatgcagcttctgtctctagcccaaggaaagaccaaaacatagggaaataaaagcatttatctttgtcttggaagtaattgttgaagttgtgcagttgatcagtgcacagttagatgcaatgtttatagaaattgattgttaaaccaaatttacactggcatgtgtggtgtagtttctaaaaggcacttcacatttgaaatttttcttaccttagaaagtttctagtgatctaaatgtctagttttgtattcttttgtgtgtgttcactgtttctcagtattaccacttgaataattctctgtacaggggggtttgtgctatacactgggatgtctaattgcagcaataaagcctttctttaaaaaggaaaaaaaaaat

SEQ ID NO: 315031 - DNA, 4603 bp, Homo sapiens
agcggatggtaggtatagggctgtggatatcgtcagtttgaccaagtattccaagaggccccatggagtttgtcatctgtaatagaggacgttagtgcattagtgatgaaaaaactgcttaccactgactattgtgatctcccagggagtataaggcagctccgcacttgaaatccatggcccaaaatgactctaccagtggagactctcttctgtgaagaagacgaccagataagaggttgggatgagcatgccactgcatcagatctctgccattccatcccaggatgccatctctgctagagtctacagaagtaagaccaaagaaaaggagagggaagaacagaatgagaagactttgggacatttcatgagtcattcaagcaacatttctaaggctgggagtcctccgtcagcatcagctccggctccggtgtcctccttctctcgcacttctatcacgccatccagccaggacatctgcagtgggagaagttgcagatgacgtccagcgagcgcaggaagatcatgtgctcagtgacattccacgtcattgccatcacatgtgtggtctggtccttgtatgtgctcattgaccgtactgctgaggagatcaagcaggggcaggcaacaggaatcctagaatggcccttttggactaaattggtggttgtggccatcggcttcaccggaggacttctttttatgtatgttcagtgtaaagtgtatgtgcaattgtggaagagactcaaggcctataatagagtgatctatgttcaaaactgtccagaaacaagcaaaaagaatatttttgaaaaatctccactaacagagcccaactttgaaaataaacatggatatggaatctgtcattccgacacaaactcttcttgttgcacagagcctgaagacactggagcagaaatcattcacgtctgattgtgtgcgggttgtcattttcctggacatccatgaagagctgaaggaaattgtttactgccaattgtatacctttcttatgtcctttaatagcatagactggacaggtgactatttatagtggcttctctttttctaaaccctccttagtctcctagaaaaccttcctgtgggccaggcatgcctgggtcctgcctctgcctggcagctctgtgggaaagtggaagaccccatgatgacatcatggggagccagcagagttcctgcccatggtcttgagctgaatgagagaataaaatgccaatcccaagggaagaggaggagcaggggtgcccaggccctgatacccagccgcctccagcttgcagtggtccccagcctggagcagagcattggggagtgtctagccatgacgagaagattccctctgcatcacggcgaaccccaggagatggtattgaaacagacccccaaacacagactcctgcctgccctctgccgatgctgcctcctccatgctcttgagcaggtggagccatggtgctctgtggtggcgcatgattcactgagcaaacagcactttacagaagaaaatctttattttgtaatatgtgtgtccagcgggattgacactcaaaaaaagtctcacttagaaatcttcccttccttacctttgtatctcctttacatcatgagagatcaaaaatccattttgccttacatatgctaagaagcgtggcattctttctgttcataaaacagactcatgacttttaagacaggacaagcaggccagaggctttttttttaatcacagatctcatgggaattagtggatgctaaatggcaattaaagcatgattcctatgcttttgagcctgttttatgacaaggtgttactttgtagacctggcccatacatttcttttttgtcaacactgaaaaagaacagtttctgagatcgaaatggaaggaaaggaagtgagtaatgacaacaaaactgaatatttaaaaaatattcctttatagttaaatctctccagttggtgttggcttcacattgaaagagcagccatgtgccaccctggccggggtgtgtgcactgcatgcaggttctcccttgcatgcaagatgggtgctggcccactgtgaggcttctgctcggggaagttctgtggagtcactaccagggccaagaggcaggtgggctggctctgggacgagggccaggtgtgagcaaactgccagggtccgctgtgccactgctccccggccacatgcccgcccagctgtcgccttaaccagactgaacagacaggatccttcagggcccttggccccactctcagtgcattctgtcatcagggattaccacctgtaccattttcataaaacaaaaccaaaatcactaccatcaaatggccttgtccctctaaaaagtctgcttaaaattctgtttttaaaacccagtttcctagttttccaggcaaatagttacctccgggaaagttgctgggggggcctgaagcacaatgtagcgcagatgcttcctttccaggccattctctcacccagcctgcacggaggagatgggagatgctgggggtcctgccctcagtctttttgggccttaggcgtttcgttcatcctgctaaggggatgaagcaaacacgaggtgattcctttgcctttcagagtggaagccctggagtttgttttgaaggccaggaggctgaaggatctctaagctacggtgtgggcttaatagcagcaggctttgtcctcctgtctcctccaagccagtgtctgattccttggcaacacaggtcttagtctgtggagtggctctgctgtggccttcctctggccgggcaggcactgtccagccatagccagctcctgagaataggtcagcctctcctttctgtctcccagggcacatccagcccgtgcctgtgttcactgtgccccgaagtgcaattacccataccccttctcagcctggggaccccaggcaaccacagactgtccactcaggggagctgaatcccaggtcagccctgccaatgtcccttaggaactgcccaggcaaggcccctggttttgtatacttgttcctgccacccagcagtagatgagtgtttcaggtgaagaccaggatagattttctaagtgtgaatccccacttcacatatggaaccccttatgctgaacttgaaaagcaccaagacttcctgtagacaagaaagtgcttaggtagggacagcccctgggcatcccacccaatgtagctggcaccccactatggcaaaggtgccttgataactgagccctgtatccctcccatgcccagccagattctcatgggaagccctctcccttcttttctgcctaacaccatctcatcgtttctggcctcactgtggacaatccacacacattcttctttcctctcctggcggggcacagagccacccccttgccttttcttttcttgaaggttctagttcagctcctgattcatcagacccttctagccccctgcatctagcagtgaagcatgaagcctggtggggatgtggtactcccatctggtgtggccaccagctctgccaatgttcctgtagccttggaaaacttgctctctcggttcttttgggtgctgtgtactccccagcttccccccttccccccccattttgcacctgggtttagtgaaaggatggcatttggttgacccatatagaaacccagaatgaggtctcagggccaggaggcctggtatttgtaggccagggaaggggaagaggcaagtggtctggggtatcaccagccagccctctctgatttggcctctactccccataagtcacagtaccataagcaggcttctggcctcagcaatttggtctttgtgcccaagtttattgtgagaatttcctgaaaactctataaaaggtctcttcctactgtaggcctctaatgtttctcccctttttgcttcagtccactcttcagtcttgtaggcctagttttcaaacctgcacatgtgtcctacctggccacaggcatgcaggcctcaggcagctgggccagtttgggagcctcgggtgatgtctgcacgatctggggctgcctctgcacccctgctgtgggcttcagggttggagaagggctgggaccaaccgggtgagatccacaagtctctggatgtggctgaaggcaaatacacaattgaagtactttctgttttgaagtgctttcccttttgaatctggtttgaaacatgcagcttctgtctctagcccaaggaaagaccaaaacatagggaaataaaagcatttatctttgtcttggaagtaattgttgaagttgtgcagttgatcagtgcacagttagatgcaatgtttatagaaattgattgttaaaccaaatttacactggcatgtgtggtgtagtttctaaaaggcacttcacatttgaaatttttcttaccttagaaagtttctagtgatctaaatgtctagttttgtattcttttgtgtgtgttcactgtttctcagtattaccacttgaataattctctgtacaggggggtttgtgctatacactgggatgtctaattgcagcaataaagcctttctttaaaaaggaaaaaaaaaat

SEQ ID NO: 315032 - DNA, 568 bp, Homo sapiens
cgccggaagttgcagccgggaagcctgcgaggtcggttccgcccgactctaacatggcggcgccctttgtctgctctggagtgccgtccccggccttctcgcggccgtgatgcacctccctctgcggtggggtccgggacatggcaggtaatgagccggacgaggggagccaagctggagtttacacaggcaaactgtcagaaaagagtagcctgggctgtctggaaatctgagctggatgccaacagcctggctcagcatgtgcgaatccacacagcccaggcactggtcatgttccagacagacgcggacttctatcagcagtatgggccaggtggcacgtggcctgccgggcaggtgctgcaggctggggagctggtcttccgccctcgcgacggggctgagggccagcccgcactggcagagacctcccctacagctcctgaatgtcccccgcctgccgagtgagctggcggcccttctgactgtttatttaaggatggatggcaccctggaaccgggaagggtggcctgttccctagagagaataaattggattattttctaa

SEQ ID NO: 315033 - DNA, 822 bp, Homo sapiens
gtccgtctcagttatctcctgctgcacagcacagcaccccaaaacccagtggcataagtcatcgccatggactttccccagcacagccagcatgtcttggaacagctgaaccagcagcggcagctggggcttctctgtgactgcacctttgtggtggacggtgttcactttaaggctcataaagcagtgctggcggcctgcagcgagtacttcaagatgctcttcgtggaccagaaggacgtggtgcacctggacatcagtaacgcggcaggcctggggcaggtgctggagtttatgtacacggccaagctgagcctgagccctgagaacgtggatgatgtgctggccgtggccactttcctccaaatgcaggacatcatcacggcctgccatgccctcaagtcacttgctgagccggctaccagccctgggggaaatgcggaggccttggccacagaaggaggggacaagagagccaaagaggagaaggtggccaccagcacgctgagcaggctggagcaggcaggacgcagcacacccataggccccagcagggacctcaaggaggagcgcggcggtcaggcccagagtgcggccagcggtgagtcagatgccaaggacccagccggctgtcctgtcacctcccagcagcctgggcacagggtagtgagggctgccttggggcaggtagcacgggcacctgcacctcttgagcctgtgttacccagaatgacctattgtgtgttccagggggtctgtttcaaccagagcagacacaacagccttggctaggggtgtgctggggcctcccctcctgggtca

SEQ ID NO: 315034 - DNA, 2769 bp, Homo sapiens
cgccggaagttgcagccgggaagcctgcgaggtcggttccgcccgactctaacatggcggcgccctttgtctgctctggagtgccgtccccggccttctcgcggccgtgatgcacctccctctgcggtggggtccgggacatggcaggtaatgagccggacgaggggagccaagctggagtttacacaggcaaactgtcagaaaagagtagcctgggctgtctggaaatctgagccatggactttccccagcacagccagcatgtcttggaacagctgaaccagcagcggcagctggggcttctctgtgactgcacctttgtggtggacggtgttcactttaaggctcataaagcagtgctggcggcctgcagcgagtacttcaagatgctcttcgtggaccagaaggacgtggtgcacctggacatcagtaacgcggcaggcctggggcaggtgctggagtttatgtacacggccaagctgagcctgagccctgagaacgtggatgatgtgctggccgtggccactttcctccaaatgcaggacatcatcacggcctgccatgccctcaagtcacttgctgagccggctaccagccctgggggaaatgcggaggccttggccacagaaggaggggacaagagagccaaagaggagaaggtggccaccagcacgctgagcaggctggagcaggcaggacgcagcacacccataggccccagcagggacctcaaggaggagcgcggcggtcaggcccagagtgcggccagcggtgcagagcagacagagaaagccgatgcgccccgggagccgccgcctgtggagctcaagccagaccccacgagtggcatggctgctgcagaagctgaggccgctttgtccgagagctcggagcaagaaatggaggtggagcccgcccggaaaggggaagaggagcaaaaggagcaagaggagcaagaggaggagggcgcagggccagctgaggtcaaggaggagggttcccagctggagaacggagaggcccccgaggagaacgagaatgaggagtcagcgggcacagactcggggcaggagctcggctccgaggcccggggcctgcgctcaggcacctacggcgaccgcacggagtccaaggcctacggctccgtcatccacaagtgcgaggactgtgggaaggagttcacgcacacggggaacttcaagcggcacatccgcatccacacgggggagaagcccttctcgtgccgggagtgcagcaaggccttttccgacccggccgcgtgcaaggcccatgagaagacgcacagccctctgaagccctacggctgcgaggagtgcgggaagagctaccgcctcatcagcctgctgaacctgcacaagaagcggcactcgggcgaggcgcgctaccgctgcgaggactgcggcaagctcttcaccacctcgggcaacctcaagcgccaccagctggtgcacagcggcgagaagccctaccagtgcgactactgcggccgctccttctccgaccccacttccaagatgcgccacctggagacccacgacacggacaaggagcacaagtgcccacactgcgacaagaagttcaaccaggtagggaacctgaaggcccacctgaagatccacatcgctgacgggcccctcaagtgccgagagtgtgggaagcagttcaccacctcagggaacctgaagcggcaccttcggatccacagcggggagaagccctacgtgtgcatccactgccagcgacagtttgcagaccccggcgctctgcagcggcacgtccgcattcacacaggtgagaagccatgccagtgtgtgatgtgcggtaaggccttcacccaggccagctccctcatcgcccacgtgcgccagcacaccggggagaagccctacgtctgcgagcgctgcggcaagagattcgtccagtccagccagttggccaatcatattcgccaccacgacaacatccgcccacacaagtgcagcgtgtgcagcaaggccttcgtgaacgtgggggacctgtccaagcacatcatcattcacactggagagaagccttacctgtgtgataagtgtgggcgtggcttcaaccgggtagacaacctgcgctcccacgtgaagaccgtgcaccagggcaaggcaggcatcaagatcctggagcccgaggagggcagtgaggtcagcgtggtcactgtggatgacatggtcacgctggctaccgaggcactggcagcgacagccgtcactcagctcacaggccctgcgactctgcccgcagtggtgccggtgggagctgcagtgacagccgatgagacggaagtcctgaaggccgagatcagcaaagctgtgaagcaagtgcaggaagaagaccccaacactcacatcctctacgcctgtgactcctgtggggacaagtttctggatgccaacagcctggctcagcatgtgcgaatccacacagcccaggcactggtcatgttccagacagacgcggacttctatcagcagtatgggccaggtggcacgtggcctgccgggcaggtgctgcaggctggggagctggtcttccgccctcgcgacggggctgagggccagcccgcactggcagagacctcccctacagctcctgaatgtcccccgcctgccgagtgagctggcggcccttctgactgtttatttaaggatggatggcaccctggaaccgggaagggtggcctgttccctagagagaataaattggattattttctaa

SEQ ID NO: 315035 - DNA, 2770 bp, Homo sapiens
cgccggaagttgcagccgggaagcctgcgaggtcggttccgcccgactctaacatggcggcgccctttgtctgctctggagtgccgtccccggccttctcgcggccgtgatgcacctccctctgcggtggggtccgggacatggcaggtaatgagccggacgaggggagccaagctggagtttacacaggcaaactgtcagaaaagagtagcctgggctgtctggaaatctgagccatggactttccccagcacagccagcatgtcttggaacagctgaaccagcagcggcagctggggcttctctgtgactgcacctttgtggtggacggtgttcactttaaggctcataaagcagtgctggcggcctgcagcgagtacttcaagatgctcttcgtggaccagaaggacgtggtgcacctggacatcagtaacgcggcaggcctggggcaggtgctggagtttatgtacacggccaagctgagcctgagccctgagaacgtggatgatgtgctggccgtggccactttcctccaaatgcaggacatcatcacggcctgccatgccctcaagtcacttgctgagccggctaccagccctgggggaaatgcggaggccttggccacagaaggtctgccctgttccatctccaggaggggacaagagagccaaagaggagaaggtggccaccagcacgctgagcaggctggagcaggcaggacgcagcacacccataggccccagcagggacctcaaggaggagcgcggcggtcaggcccagagtgcggccagcggtgcagagcagacagagaaagccgatgcgccccgggagccgccgcctgtggagctcaagccagaccccacgagtggcatggctgctgcagaagctgaggccgctttgtccgagagctcggagcaagaaatggaggtggagcccgcccggaaaggggaagaggagcaaaaggagcaagaggagcaagaggaggagggcgcagggccagctgaggtcaaggaggagggttcccagctggagaacggagaggcccccgaggagaacgagaatgaggagtcagcgggcacagactcggggcaggagctcggctccgaggcccggggcctgcgctcaggcacctacggcgaccgcacggagtccaaggcctacggctccgtcatccacaagtgcgaggactgtgggaaggagttcacgcacacggggaacttcaagcggcacatccgcatccacacgggggagaagcccttctcgtgccgggagtgcagcaaggccttttccgacccggccgcgtgcaaggcccatgagaagacgcacagccctctgaagccctacggctgcgaggagtgcgggaagagctaccgcctcatcagcctgctgaacctgcacaagaagcggcactcgggcgaggcgcgctaccgctgcgaggactgcggcaagctcttcaccacctcgggcaacctcaagcgccaccagctggtgcacagcggcgagaagccctaccagtgcgactactgcggccgctccttctccgaccccacttccaagatgcgccacctggagacccacgacacggacaaggagcacaagtgcccacactgcgacaagaagttcaaccaggtagggaacctgaaggcccacctgaagatccacatcgctgacgggcccctcaagtgccgagagtgtgggaagcagttcaccacctcagggaacctgaagcggcaccttcggatccacagcggggagaagccctacgtgtgcatccactgccagcgacagtttgcagaccccggcgctctgcagcggcacgtccgcattcacacaggtgagaagccatgccagtgtgtgatgtgcggtaaggccttcacccaggccagctccctcatcgcccacgtgcgccagcacaccggggagaagccctacgtctgcgagcgctgcggcaagagattcgtccagtccagccagttggccaatcatattcgccaccacgacaacatccgcccacacaagtgcagcgtgtgcagcaaggccttcgtgaacgtgggggacctgtccaagcacatcatcattcacactggagagaagccttacctgtgtgataagtgtgggcgtggcttcaaccgggtagacaacctgcgctcccacgtgaagaccgtgcaccagggcaaggcaggcatcaagatcctggagcccgaggagggcagtgaggtcagcgtggtcactgtggatgacatggtcacgctggctaccgaggcactggcagcgacagccgtcactcagctcacagtggtgccggtgggagctgcagtgacagccgatgagacggaagtcctgaaggccgagatcagcaaagctgtgaagcaagtgcaggaagaagaccccaacactcacatcctctacgcctgtgactcctgtggggacaagtttctggatgccaacagcctggctcagcatgtgcgaatccacacagcccaggcactggtcatgttccagacagacgcggacttctatcagcagtatgggccaggtggcacgtggcctgccgggcaggtgctgcaggctggggagctggtcttccgccctcgcgacggggctgagggccagcccgcactggcagagacctcccctacagctcctgaatgtcccccgcctgccgagtgagctggcggcccttctgactgtttatttaaggatggatggcaccctggaaccgggaagggtggcctgttccctagagagaataaattggattattttctaa

SEQ ID NO: 315036 - DNA, 2660 bp, Homo sapiens
cgccggaagttgcagccgggaagcctgcgaggtcggttccgcccgactctaacatggcggcgccctttgtctgctctggagtgccgtccccggccttctcgcggccgtgatgcacctccctctgcggtggggtccgggacatggcaggtaatgagccggacgaggggagccaagctggagtttacacaggcaaactgtcagaaaagagtagcctgggctgtctggaaatctgagccatggactttccccagcacagccagcatgtcttggaacagctgaaccagcagcggcagctggggcttctctgtgactgcacctttgtggtggacggtgttcactttaaggctcataaagcagtgctggcggcctgcagcgagtacttcaagatgctcttcgtggaccagaaggacgtggtgcacctggacatcagtaacgcggcaggcctggggcaggtgctggagtttatgtacacggccaagctgagcctgagccctgagaacgtggatgatgtgctggccgtggccactttcctccaaatgcaggacatcatcacggcctgccatgccctcaagtcacttgctgagccggctaccagccctgggggaaatgcggaggccttggccacagaaggaggggacaagagagccaaagaggagaaggtggccaccagcacgctgagcaggctggagcaggcaggacgcagcacacccataggccccagcagggacctcaaggaggagcgcggcggtcaggcccagagtgcggccagcggtgcagagcagacagagaaagccgatgcgccccgggagccgccgcctgtggagctcaagccagaccccacgagtggcatggctgctgcagaagctgaggccgctttgtccgagagctcggagcaagaaatggaggtggagcccgcccggaaaggggaagaggagcaaaaggagcaagaggagcaagaggaggagggcgcagggccagctgaggtcaaggaggagggttcccagctggagaacggagaggcccccgaggagaacgagaatgaggagtcagcgggcacagactcggggcaggagctcggctccgaggcccggggcctgcgctcaggcacctacggcgaccgcacggagtccaaggcctacggctccgtcatccacaagtgcgaggactgtgggaaggagttcacgcacacggggaacttcaagcggcacatccgcatccacacgggggagaagcccttctcgtgccgggagtgcagcaaggccttttccgacccggccgcgtgcaaggcccatgagaagacgcacagccctctgaagccctacggctgcgaggagtgcgggaagagctaccgcctcatcagcctgctgaacctgcacaagaagcggcactcgggcgaggcgcgctaccgctgcgaggactgcggcaagctcttcaccacctcgggcaacctcaagcgccaccagctggtgcacagcggcgagaagccctaccagtgcgactactgcggccgctccttctccgaccccacttccaagatgcgccacctggagacccacgacacggacaaggagcacaagtgcccacactgcgacaagaagttcaaccagggaacctgaagcggcaccttcggatccacagcggggagaagccctacgtgtgcatccactgccagcgacagtttgcagaccccggcgctctgcagcggcacgtccgcattcacacaggtgagaagccatgccagtgtgtgatgtgcggtaaggccttcacccaggccagctccctcatcgcccacgtgcgccagcacaccggggagaagccctacgtctgcgagcgctgcggcaagagattcgtccagtccagccagttggccaatcatattcgccaccacgacaacatccgcccacacaagtgcagcgtgtgcagcaaggccttcgtgaacgtgggggacctgtccaagcacatcatcattcacactggagagaagccttacctgtgtgataagtgtgggcgtggcttcaaccgggtagacaacctgcgctcccacgtgaagaccgtgcaccagggcaaggcaggcatcaagatcctggagcccgaggagggcagtgaggtcagcgtggtcactgtggatgacatggtcacgctggctaccgaggcactggcagcgacagccgtcactcagctcacagtggtgccggtgggagctgcagtgacagccgatgagacggaagtcctgaaggccgagatcagcaaagctgtgaagcaagtgcaggaagaagaccccaacactcacatcctctacgcctgtgactcctgtggggacaagtttctggatgccaacagcctggctcagcatgtgcgaatccacacagcccaggcactggtcatgttccagacagacgcggacttctatcagcagtatgggccaggtggcacgtggcctgccgggcaggtgctgcaggctggggagctggtcttccgccctcgcgacggggctgagggccagcccgcactggcagagacctcccctacagctcctgaatgtcccccgcctgccgagtgagctggcggcccttctgactgtttatttaaggatggatggcaccctggaaccgggaagggtggcctgttccctagagagaataaattggattattttctaa

SEQ ID NO: 315037 - DNA, 2559 bp, Homo sapiens
cgccggaagttgcagccgggaagcctgcgaggtcggttccgcccgactctaacatggcggcgccctttgtctgctctggagtgccgtccccggccttctcgcggccgtgatgcacctccctctgcggtggggtccgggacatggcaggtaatgagccggacgaggggagccaagctggagtttacacaggcaaactgtcagaaaagagtagcctgggctgtctggaaatctgagccatggactttccccagcacagccagcatgtcttggaacagctgaaccagcagcggcagctggggcttctctgtgactgcacctttgtggtggacggtgttcactttaaggctcataaagcagtgctggcggcctgcagcgagtacttcaagatgctcttcgtggaccagaaggacgtggtgcacctggacatcagtaacgcggcaggaggggacaagagagccaaagaggagaaggtggccaccagcacgctgagcaggctggagcaggcaggacgcagcacacccataggccccagcagggacctcaaggaggagcgcggcggtcaggcccagagtgcggccagcggtgcagagcagacagagaaagccgatgcgccccgggagccgccgcctgtggagctcaagccagaccccacgagtggcatggctgctgcagaagctgaggccgctttgtccgagagctcggagcaagaaatggaggtggagcccgcccggaaaggggaagaggagcaaaaggagcaagaggagcaagaggaggagggcgcagggccagctgaggtcaaggaggagggttcccagctggagaacggagaggcccccgaggagaacgagaatgaggagtcagcgggcacagactcggggcaggagctcggctccgaggcccggggcctgcgctcaggcacctacggcgaccgcacggagtccaaggcctacggctccgtcatccacaagtgcgaggactgtgggaaggagttcacgcacacggggaacttcaagcggcacatccgcatccacacgggggagaagcccttctcgtgccgggagtgcagcaaggccttttccgacccggccgcgtgcaaggcccatgagaagacgcacagccctctgaagccctacggctgcgaggagtgcgggaagagctaccgcctcatcagcctgctgaacctgcacaagaagcggcactcgggcgaggcgcgctaccgctgcgaggactgcggcaagctcttcaccacctcgggcaacctcaagcgccaccagctggtgcacagcggcgagaagccctaccagtgcgactactgcggccgctccttctccgaccccacttccaagatgcgccacctggagacccacgacacggacaaggagcacaagtgcccacactgcgacaagaagttcaaccaggtagggaacctgaaggcccacctgaagatccacatcgctgacgggcccctcaagtgccgagagtgtgggaagcagttcaccacctcagggaacctgaagcggcaccttcggatccacagcggggagaagccctacgtgtgcatccactgccagcgacagtttgcagaccccggcgctctgcagcggcacgtccgcattcacacaggtgagaagccatgccagtgtgtgatgtgcggtaaggccttcacccaggccagctccctcatcgcccacgtgcgccagcacaccggggagaagccctacgtctgcgagcgctgcggcaagagattcgtccagtccagccagttggccaatcatattcgccaccacgacaacatccgcccacacaagtgcagcgtgtgcagcaaggccttcgtgaacgtgggggacctgtccaagcacatcatcattcacactggagagaagccttacctgtgtgataagtgtgggcgtggcttcaaccgggtagacaacctgcgctcccacgtgaagaccgtgcaccagggcaaggcaggcatcaagatcctggagcccgaggagggcagtgaggtcagcgtggtcactgtggatgacatggtcacgctggctaccgaggcactggcagcgacagccgtcactcagctcacagtggtgccggtgggagctgcagtgacagccgatgagacggaagtcctgaaggccgagatcagcaaagctgtgaagcaagtgcaggaagaagaccccaacactcacatcctctacgcctgtgactcctgtggggacaagtttctggatgccaacagcctggctcagcatgtgcgaatccacacagcccaggcactggtcatgttccagacagacgcggacttctatcagcagtatgggccaggtggcacgtggcctgccgggcaggtgctgcaggctggggagctggtcttccgccctcgcgacggggctgagggccagcccgcactggcagagacctcccctacagctcctgaatgtcccccgcctgccgagtgagctggcggcccttctgactgtttatttaaggatggatggcaccctggaaccgggaagggtggcctgttccctagagagaataaattggattattttctaa

SEQ ID NO: 315038 - DNA, 1652 bp, Homo sapiens
gaccgccgacggcgccgcacctacggcgagagtccaggcctacggctccgtcatccacaagtgcgaggactgtgggaaggagttcacgcacacggggaacttcaagcggcacatccgcatccacacgggggagaagcccttctcgtgccgggagtgcagcaaggccttttccgacccggccgcgtgcaaggcccatgagaagacgcacagccctctgaagccctacggctgcgaggagtgcgggaagagctaccgcctcatcagcctgctgaacctgcacaagaagcggcactcgggcgaggcgcgctaccgctgcgaggactgcggcaagctcttcaccacctcgggcaacctcaagcgccaccagctggtgcacagcggcgagaagccctaccagtgcgactactgcggccgctccttctccgaccccacttccaagatgcgccacctggagacccacgacacggacaaggagcacaagtgcccacactgcgacaagaagttcaaccaggtagggaacctgaaggcccacctgaagatccacatcgctgacgggcccctcaagtgccgagagtgtgggaagcagttcaccacctcagggaacctgaagcggcaccttcggatccacagcggggagaagccctacgtgtgcatccactgccagcgacagtttgcagaccccggcgctctgcagcggcacgtccgcattcacacaggtgagaagccatgccagtgtgtgatgtgcggtaaggccttcacccaggccagctccctcatcgcccacgtgcgccagcacaccggggagaagccctacgtctgcgagcgctgcggcaagagattcgtccagtccagccagttggccaatcatattcgccaccacgacaacatccgcccacacaagtgcagcgtgtgcagcaaggccttcgtgaacgtgggggacctgtccaagcacatcatcattcacactggagagaagccttacctgtgtgataagtgtgggcgtggcttcaaccgggtagacaacctgcgctcccacgtgaagaccgtgcaccagggcaaggcaggcatcaagatcctggagcccgaggagggcagtgaggtcagcgtggtcactgtggatgacatggtcacgctggctaccgaggcactggcagcgacagccgtcactcagctcacagtggtgccggtgggagctgcagtgacagccgatgagacggaagtcctgaaggccgagatcagcaaagctgtgaagcaagtgcaggaagaagaccccaacactcacatcctctacgcctgtgactcctgtggggacaagtttctggatgccaacagcctggctcagcatgtgcgaatccacacagcccaggcactggtcatgttccagacagacgcggacttctatcagcagtatgggccaggtggcacgtggcctgccgggcaggtgctgcaggctggggagctggtcttccgccctcgcgacggggctgagggccagcccgcactggcagagacctcccctacagctcctgaatgtcccccgcctgccgagtgagctggcggcccttctgactgtttatttaaggatggatggcaccctggaaccgggaagggtggcctgttccctagagagaataaattggattattttctaa

SEQ ID NO: 315039 - DNA, 846 bp, Homo sapiens
tccatgcgagtcccttcctgtggccccacagattcgtccagtccagccagttggccaatcatattcgccaccacgacaacatccgcccacacaagtgcagcgtgtgcagcaaggccttcgtgaacgtgggggacctgtccaagcacatcatcattcacactggagagaagccttacctgtgtgataagtgtgggcgtggcttcaaccgggtagacaacctgcgctcccacgtgaagaccgtgcaccagggcaaggcaggcatcaagatcctggagcccgaggagggcagtgaggtcagcgtggtcactgtggatgacatggtcacgctggctaccgaggcactggcagcgacagccgtcactcagctcacagtggtgccggtgggagctgcagtgacagccgatgagacggaagtcctgaaggccgagatcagcaaagctgtgaagcaagtgcaggaagaagaccccaacactcacatcctctacgcctgtgactcctgtggggacaagtttctggatgccaacagcctggctcagcatgtgcgaatccacacagcccaggcactggtcatgttccagacagacgcggacttctatcagcagtatgggccaggtggcacgtggcctgccgggcaggtgctgcaggctggggagctggtcttccgccctcgcgacggggctgagggccagcccgcactggcagagacctcccctacagctcctgaatgtcccccgcctgccgagtgagctggcggcccttctgactgtttatttaaggatggatggcaccctggaaccgggaagggtggcctgttccctagagagaataaattggattattttctaa

SEQ ID NO: 315040 - DNA, 875 bp, Homo sapiens
cgccggaagttgcagccgggaagcctgcgaggtcggttccgcccgactctaacatggcggcgccctttgtctgctctggagtgccgtccccggccttctcgcggccgtgatgcacctccctctgcggtggggtccgggacatggcaggtaatgagccggacgaggggagccaagctggagtttacacaggcaaactgtcagaaaagagtagcctgggctgtctggaaatctgagccatggactttccccagcacagccagcatgtcttggaacagctgaaccagcagcggcagctggggcttctctgtgactgcacctttgtggtggacggtgttcactttaaggctcataaagcagtgctggcggcctgcagcgagtacttcaagatgctcttcgtggaccagaaggacgtggtgcacctggacatcagtaacgcggcaggcctggggcaggtgctggagtttatgtacacggccaagctgagcctgagccctgagaacgtggatgatgtgctggccgtggccactttcctccaaatgcaggacatcatcacggcctgccatgccctcaagtcacttgctgagccggctaccagccctgggggaaatgcggaggccttggccacagaaggaggggacaagagagccaaagaggagaaggtggccaccagcacgctgagcagctggtcttccgccctcgcgacggggctgagggccagcccgcactggcagagacctcccctacagctcctgaatgtcccccgcctgccgagtgagctggcggcccttctgactgtttatttaaggatggatggcaccctggaaccgggaagggtggcctgttccctagagagaataaattggattattttctaa

SEQ ID NO: 315041 - DNA, 705 bp, Homo sapiens
cgccggaagttgcagccgggaagcctgcgaggtcggttccgcccgactctaacatggcggcgccctttgtctgctctggagtgccgtccccggccttctcgcggccgtgatgcacctccctctgcggtggggtccgggacatggcaggtaatgagccggacgaggggagccaagctggagtttacacaggcaaactgtcagaaaagagtagcctgggctgtctggaaatctgagccatggactttccccagcacagccagcatgtcttggaacagctgaaccagcagcggcagctggggcttctctgtgactgcacctttgtggtggacggtgttcactttaaggctcataaagcagtgctggcggcctgcagcgagtacttcaagatgctcttcgtggaccagaaggacgtggtgcacctggacatcagtaacgcggcaggcctggggcaggtgctggagtttatgtacacggccaagtggcctgccgggcaggtgctgcaggctggggagctggtcttccgccctcgcgacggggctgagggccagcccgcactggcagagacctcccctacagctcctgaatgtcccccgcctgccgagtgagctggcggcccttctgactgtttatttaaggatggatggcaccctggaaccgggaagggtggcctgttccctagagagaataaattggattattttctaa

SEQ ID NO: 315042 - DNA, 437 bp, Homo sapiens
cgcgctggtccaggagaggtatccgacccctgggcagagggtagcaatccagcctccggtgcttcccccacccaggtgcagagcagacagagaaagccgatgcgccccgggagccgccgcctgtggagctcaagccagaccccacgagtggcatggctgctgcagaagctgaggccgctttgtccgagagctcggagcaaggtagccccgcccagccaggaccaggccctacctggtgcatcctcccagggccctgcctccactgcgcactggggcctccctctcctcctgcctccagctagtcccacctggagtcaccatgcacttcagctttgggacaccttggtcttcgcatgttcttgagtctcgaggtcgttccttggttgaccatgctagccgtgtgtctgtgagcacaggcacgtccttcaaagccctgg

SEQ ID NO: 315043 - DNA, 2748 bp, Homo sapiens
cgccggaagttgcagccgggaagcctgcgaggtcggttccgcccgactctaacatggcggcgccctttgtctgctctggagtgccgtccccggccttctcgcggccgtgatgcacctccctctgcggtggggtccgggacatggcaggtaatgagccggacgaggggagccaagctggagtttacacaggcaaactgtcagaaaagagtagcctgggctgtctggaaatctgagccatggactttccccagcacagccagcatgtcttggaacagctgaaccagcagcggcagctggggcttctctgtgactgcacctttgtggtggacggtgttcactttaaggctcataaagcagtgctggcggcctgcagcgagtacttcaagatgctcttcgtggaccagaaggacgtggtgcacctggacatcagtaacgcggcaggcctggggcaggtgctggagtttatgtacacggccaagctgagcctgagccctgagaacgtggatgatgtgctggccgtggccactttcctccaaatgcaggacatcatcacggcctgccatgccctcaagtcacttgctgagccggctaccagccctgggggaaatgcggaggccttggccacagaaggaggggacaagagagccaaagaggagaaggtggccaccagcacgctgagcaggctggagcaggcaggacgcagcacacccataggccccagcagggacctcaaggaggagcgcggcggtcaggcccagagtgcggccagcggtgcagagcagacagagaaagccgatgcgccccgggagccgccgcctgtggagctcaagccagaccccacgagtggcatggctgctgcagaagctgaggccgctttgtccgagagctcggagcaagaaatggaggtggagcccgcccggaaaggggaagaggagcaaaaggagcaagaggagcaagaggaggagggcgcagggccagctgaggtcaaggaggagggttcccagctggagaacggagaggcccccgaggagaacgagaatgaggagtcagcgggcacagactcggggcaggagctcggctccgaggcccggggcctgcgctcaggcacctacggcgaccgcacggagtccaaggcctacggctccgtcatccacaagtgcgaggactgtgggaaggagttcacgcacacggggaacttcaagcggcacatccgcatccacacgggggagaagcccttctcgtgccgggagtgcagcaaggccttttccgacccggccgcgtgcaaggcccatgagaagacgcacagccctctgaagccctacggctgcgaggagtgcgggaagagctaccgcctcatcagcctgctgaacctgcacaagaagcggcactcgggcgaggcgcgctaccgctgcgaggactgcggcaagctcttcaccacctcgggcaacctcaagcgccaccagctggtgcacagcggcgagaagccctaccagtgcgactactgcggccgctccttctccgaccccacttccaagatgcgccacctggagacccacgacacggacaaggagcacaagtgcccacactgcgacaagaagttcaaccaggtagggaacctgaaggcccacctgaagatccacatcgctgacgggcccctcaagtgccgagagtgtgggaagcagttcaccacctcagggaacctgaagcggcaccttcggatccacagcggggagaagccctacgtgtgcatccactgccagcgacagtttgcagaccccggcgctctgcagcggcacgtccgcattcacacaggtgagaagccatgccagtgtgtgatgtgcggtaaggccttcacccaggccagctccctcatcgcccacgtgcgccagcacaccggggagaagccctacgtctgcgagcgctgcggcaagagattcgtccagtccagccagttggccaatcatattcgccaccacgacaacatccgcccacacaagtgcagcgtgtgcagcaaggccttcgtgaacgtgggggacctgtccaagcacatcatcattcacactggagagaagccttacctgtgtgataagtgtgggcgtggcttcaaccgggtagacaacctgcgctcccacgtgaagaccgtgcaccagggcaaggcaggcatcaagatcctggagcccgaggagggcagtgaggtcagcgtggtcactgtggatgacatggtcacgctggctaccgaggcactggcagcgacagccgtcactcagctcacagtggtgccggtgggagctgcagtgacagccgatgagacggaagtcctgaaggccgagatcagcaaagctgtgaagcaagtgcaggaagaagaccccaacactcacatcctctacgcctgtgactcctgtggggacaagtttctggatgccaacagcctggctcagcatgtgcgaatccacacagcccaggcactggtcatgttccagacagacgcggacttctatcagcagtatgggccaggtggcacgtggcctgccgggcaggtgctgcaggctggggagctggtcttccgccctcgcgacggggctgagggccagcccgcactggcagagacctcccctacagctcctgaatgtcccccgcctgccgagtgagctggcggcccttctgactgtttatttaaggatggatggcaccctggaaccgggaagggtggcctgttccctagagagaataaattggattattttctaa

SEQ ID NO: 315044 - DNA, 3387 bp, Homo sapiens
cgccggaagttgcagccgggaagcctgcgaggtcggttccgcccgactctaacatggcggcgccctttgtctgctctggagtgccgtccccggccttctcgcggccgtgatgcacctccctctgcggtggggtccgggacatggcaggtaatgagccggacgaggggagccaagctggagtttacacaggcaaactgtcagaaaagagtagcctgggctgtctggaaatctgagccatggactttccccagcacagccagcatgtcttggaacagctgaaccagcagcggcagctggggcttctctgtgactgcacctttgtggtggacggtgttcactttaaggctcataaagcagtgctggcggcctgcagcgagtacttcaagatgctcttcgtggaccagaaggacgtggtgcacctggacatcagtaacgcggcaggcctggggcaggtgctggagtttatgtacacggccaagctgagcctgagccctgagaacgtggatgatgtgctggccgtggccactttcctccaaatgcaggacatcatcacggcctgccatgccctcaagtcacttgctgagccggctaccagccctgggggaaatgcggaggccttggccacagaaggaggggacaagagagccaaagaggagaaggtggccaccagcacgctgagcaggctggagcaggcaggacgcagcacacccataggccccagcagggacctcaaggaggagcgcggcggtcaggcccagagtgcggccagcggtgcagagcagacagagaaagccgatgcgccccgggagccgccgcctgtggagctcaagccagaccccacgagtggcatggctgctgcagaagctgaggccgctttgtccgagagctcggagcaagaaatggaggtggagcccgcccggaaaggggaagaggagcaaaaggagcaagaggagcaagaggaggagggcgcagggccagctgaggtcaaggaggagggttcccagctggagaacggagaggcccccgaggagaacgagaatgaggagtcagcgggcacagactcggggcaggagctcggctccgaggcccggggcctgcgctcaggcacctacggcgaccgcacggagtccaaggcctacggctccgtcatccacaagtgcgaggactgtgggaaggagttcacgcacacggggaacttcaagcggcacatccgcatccacacgggggagaagcccttctcgtgccgggagtgcagcaaggccttttccgacccggccgcgtgcaaggcccatgagaagacgcacagccctctgaagccctacggctgcgaggagtgcgggaagagctaccgcctcatcagcctgctgaacctgcacaagaagcggcactcgggcgaggcgcgctaccgctgcgaggactgcggcaagctcttcaccacctcgggcaacctcaagcgccaccagctggtgcacagcggcgagaagccctaccagtgcgactactgcggccgctccttctccgaccccacttccaagatgcgccacctggagacccacgacacggacaaggagcacaagtgcccacactgcgacaagaagttcaaccaggtagggaacctgaaggcccacctgaagatccacatcgctgacgggcccctcaagtgccgagagtgtgggaagcagttcaccacctcagggaacctgaagcggcaccttcggatccacagcggggagaagccctacgtgtgcatccactgccagcgacagtttgcagaccccggcgctctgcagcggcacgtccgcattcacacaggtgagaagccatgccagtgtgtgatgtgcggtaaggccttcacccaggccagctccctcatcgcccacgtgcgccagcacaccggggagaagccctacgtctgcgagcgctgcggcaagagattcgtccagtccagccagttggccaatcatattcgccaccacgacaacatccgcccacacaagtgcagcgtgtgcagcaaggccttcgtgaacgtgggggacctgtccaagcacatcatcattcacactggagagaagccttacctgtgtgataagtgtgggcgtggcttcaaccgggtagacaacctgcgctcccacgtgaagaccgtgcaccagggcaaggcaggcatcaagatcctggagcccgaggagggcagtgaggtcagcgtggtcactgtggatgacatggtcacgctggctaccgaggcactggcagcgacagccgtcactcagctcacagtggtgccggtgggagctgcagtgacagccgatgagacggaagtcctgaaggccgagatcagcaaagctgtgaagcaagtgcaggaagaagaccccaacactcacatcctctacgcctgtgactcctgtggggacaagtttctggatgccaacagcctggctcagcatgtgcgaatccacacagcccaggcactggtcatgttccagacagacgcggacttctatcagcagtatgggccaggtggcacgtggcctgccgggcaggtgctgcaggctggggagctggtcttccgccctcgcgacggggctgagggccagcccgcactggcagagacctcccctacagctcctgaatgtcccccgcctgccgagtgagctggcggcccttctgactgtttatttaaggatggatggcaccctggaaccgggaagggtggcctgttccctagagagaataaattggattattttctaaaaaaaaaaaaaaaaaaaaaaaaaaaaaaaaaaaaaaaaaaaaaaaaaaaaaaaaaggaggggggcccaacaaatagaaatgccccacaggagagggaacgaaagacacgcactagacacaacgatttagtgggaaacaacagaggggcccacaaaggaaggcagaatgaagaagaacgagaacgagagcagtgggcccgatgatataaaagagaagcgccagagacggggagaaaaagtggccaagacagcagcagcaccacactgaggaggaagaaaaaagacaaccaaacatatctgcatgagggggggaagaagacaaaaacaagcgaggcgaaccacaaacaacaacaaacgaacaaaagaactaaaaaaaaacaaacacataaaggaagggagaacacatcaacacaaaacaacacacaaagacaaagagagagaaggactaaaataagagggcgagagaacacacaaccaaacacgggacaaacataaaacagaagcagggaagcgaccagtagacaaagacaaagagagagggacgtcaaacgaagagaaatataaaagagacggacagaacgacacacacaatcaataacaacaaccggagcgagacgacacataagacaaaaaacgaaca

SEQ ID NO: 315045 - DNA, 3153 bp, Homo sapiens
cgccggaagttgcagccgggaagcctgcgaggtcggttccgcccgactctaacatggcggcgccctttgtctgctctggagtgccgtccccggccttctcgcggccgtgatgcacctccctctgcggtggggtccgggacatggcaggtaatgagccggacgaggggagccaagctggagtttacacaggcaaactgtcagaaaagagtagcctgggctgtctggaaatctgagccatggactttccccagcacagccagcatgtcttggaacagctgaaccagcagcggcagctggggcttctctgtgactgcacctttgtggtggacggtgttcactttaaggctcataaagcagtgctggcggcctgcagcgagtacttcaagatgctcttcgtggaccagaaggacgtggtgcacctggacatcagtaacgcggcaggcctggggcaggtgctggagtttatgtacacggccaagctgagcctgagccctgagaacgtggatgatgtgctggccgtggccactttcctccaaatgcaggacatcatcacggcctgccatgccctcaagtcacttgctgagccggctaccagccctgggggaaatgcggaggccttggccacagaaggaggggacaagagagccaaagaggagaaggtggccaccagcacgctgagcaggctggagcaggcaggacgcagcacacccataggccccagcagggacctcaaggaggagcgcggcggtcaggcccagagtgcggccagcggtgcagagcagacagagaaagccgatgcgccccgggagccgccgcctgtggagctcaagccagaccccacgagtggcatggctgctgcagaagctgaggccgctttgtccgagagctcggagcaagaaatggaggtggagcccgcccggaaaggggaagaggagcaaaaggagcaagaggagcaagaggaggagggcgcagggccagctgaggtcaaggaggagggttcccagctggagaacggagaggcccccgaggagaacgagaatgaggagtcagcgggcacagactcggggcaggagctcggctccgaggcccggggcctgcgctcaggcacctacggcgaccgcacggagtccaaggcctacggctccgtcatccacaagtgcgaggactgtgggaaggagttcacgcacacggggaacttcaagcggcacatccgcatccacacgggggagaagcccttctcgtgccgggagtgcagcaaggccttttccgacccggccgcgtgcaaggcccatgagaagacgcacagccctctgaagccctacggctgcgaggagtgcgggaagagctaccgcctcatcagcctgctgaacctgcacaagaagcggcactcgggcgaggcgcgctaccgctgcgaggactgcggcaagctcttcaccacctcgggcaacctcaagcgccaccagctggtgcacagcggcgagaagccctaccagtgcgactactgcggccgctccttctccgaccccacttccaagatgcgccacctggagacccacgacacggacaaggagcacaagtgcccacactgcgacaagaagttcaaccaggtgtgcggacccctcccggaaccagcgcctggcagccgccggtggccgcagccgcatgcatgccacgtggtggggcgggcggggagcacagccccggcctccaggagctcatcagcttgttcacccaggaaacaggcgcagcgatgagccacttccgcgggggagctcccggttgctctgcggagggcaggccgactcagggcggggtttggtcctgaaaaaatggggtggggcggcttacctctcaccgctgggacctgggacctctcctgacccaggagagatagagcccttcacggaccctggcaagcctgagagtcaattgttcctttgtgggaggggcaggtgagggggcccggggccgagctctgtggggtggcccccctgacccctccctgggcacaggtagggaacctgaaggcccacctgaagatccacatcgctgacgggcccctcaagtgccgagagtgtgggaagcagttcaccacctcagggaacctgaagcggcaccttcggatccacagcggggagaagccctacgtgtgcatccactgccagcgacagtttgcagaccccggcgctctgcagcggcacgtccgcattcacacaggtgagaagccatgccagtgtgtgatgtgcggtaaggccttcacccaggccagctccctcatcgcccacgtgcgccagcacaccggggagaagccctacgtctgcgagcgctgcggcaagagattcgtccagtccagccagttggccaatcatattcgccaccacgacaacatccgcccacacaagtgcagcgtgtgcagcaaggccttcgtgaacgtgggggacctgtccaagcacatcatcattcacactggagagaagccttacctgtgtgataagtgtgggcgtggcttcaaccgggtagacaacctgcgctcccacgtgaagaccgtgcaccagggcaaggcaggcatcaagatcctggagcccgaggagggcagtgaggtcagcgtggtcactgtggatgacatggtcacgctggctaccgaggcactggcagcgacagccgtcactcagctcacagtggtgccggtgggagctgcagtgacagccgatgagacggaagtcctgaaggccgagatcagcaaagctgtgaagcaagtgcaggaagaagaccccaacactcacatcctctacgcctgtgactcctgtggggacaagtttctggatgccaacagcctggctcagcatgtgcgaatccacacagcccaggcactggtcatgttccagacagacgcggacttctatcagcagtatgggccaggtggcacgtggcctgccgggcaggtgctgcaggctggggagctggtcttccgccctcgcgacggggctgagggccagcccgcactggcagagacctcccctacagctcctgaatgtcccccgcctgccgagtgagctggcggcccttctgactgtttatttaaggatggatggcaccctggaaccgggaagggtggcctgttccctagagagaataaattggattattttctaa

SEQ ID NO: 315046 - DNA, 2840 bp, Homo sapiens
cgccggaagttgcagccgggaagcctgcgaggtcggttccgcccgactctaacatggcggcgccctttgtctgctctggagtgccgtccccggccttctcgcggccgtgatgcacctccctctgcggtggggtccgggacatggcaggtaatgagccggacgaggggagccaagctggagtttacacaggcaaactgtcagaaaagagtagcctgggctgtctggaaatctgagccatggactttccccagcacagccagcatgtcttggaacagctgaaccagcagcggcagctggggcttctctgtgactgcacctttgtggtggacggtgttcactttaaggctcataaagcagtgctggcggcctgcagcgagtacttcaagatgctcttcgtggaccagaaggacgtggtgcacctggacatcagtaacgcggcaggcctggggcaggtgctggagtttatgtacacggccaagctgagcctgagccctgagaacgtggatgatgtgctggccgtggccactttcctccaaatgcaggacatcatcacggcctgccatgccctcaagtcacttgctgagccggctaccagccctgggggaaatgcggaggccttggccacagaaggaggggacaagagagccaaagaggagaaggtggccaccagcacgctgagcaggctggagcaggcaggacgcagcacacccataggccccagcagggacctcaaggaggagcgcggcggtcaggcccagagtgcggccagcggtgcagagcagacagagaaagccgatgcgccccgggagccgccgcctgtggagctcaagccagaccccacgagtggcatggctgctgcagaagctgaggccgctttgtccgagagctcggagcaagaaatggaggtggagcccgcccggaaaggggaagaggagcaaaaggagcaagaggagcaagaggaggagggcgcagggccagctgaggtcaaggaggagggttcccagctggagaacggagaggcccccgaggagaacgagaatgaggagtcagcgggcacagactcggggcaggagctcggctccgaggcccggggcctgcgctcaggcacctacggcgaccgcacggagtccaaggcctacggctccgtcatccacaagtgcgaggactgtgggaaggagttcacgcacacggggaacttcaagcggcacatccgcatccacacgggggagaagcccttctcgtgccgggagtgcagcaaggccttttccgacccggccgcgtgcaaggcccatgagaagacgcacagccctctgaagccctacggctgcgaggagtgcgggaagagctaccgcctcatcagcctgctgaacctgcacaagaagcggcactcgggcgaggcgcgctaccgctgcgaggactgcggcaagctcttcaccacctcgggcaacctcaagcgccaccagctggtgcacagcggcgagaagccctaccagtgcgactactgcggccgctccttctccgaccccacttccaagatgcgccacctggagacccacgacacggacaaggagcacaagtgcccacactgcgacaagaagttcaaccaggtagggaacctgaaggcccacctgaagatccacatcgctgacgggcccctcaagtgccgagagtgtgggaagcagttcaccacctcaggtagggccagggctgccctggctgccctcacacccctgctcctcggccaccggtggtgccccacgccaggttcgccctcggtctcgccacagggaacctgaagcggcaccttcggatccacagcggggagaagccctacgtgtgcatccactgccagcgacagtttgcagaccccggcgctctgcagcggcacgtccgcattcacacaggtgagaagccatgccagtgtgtgatgtgcggtaaggccttcacccaggccagctccctcatcgcccacgtgcgccagcacaccggggagaagccctacgtctgcgagcgctgcggcaagagattcgtccagtccagccagttggccaatcatattcgccaccacgacaacatccgcccacacaagtgcagcgtgtgcagcaaggccttcgtgaacgtgggggacctgtccaagcacatcatcattcacactggagagaagccttacctgtgtgataagtgtgggcgtggcttcaaccgggtagacaacctgcgctcccacgtgaagaccgtgcaccagggcaaggcaggcatcaagatcctggagcccgaggagggcagtgaggtcagcgtggtcactgtggatgacatggtcacgctggctaccgaggcactggcagcgacagccgtcactcagctcacagtggtgccggtgggagctgcagtgacagccgatgagacggaagtcctgaaggccgagatcagcaaagctgtgaagcaagtgcaggaagaagaccccaacactcacatcctctacgcctgtgactcctgtggggacaagtttctggatgccaacagcctggctcagcatgtgcgaatccacacagcccaggcactggtcatgttccagacagacgcggacttctatcagcagtatgggccaggtggcacgtggcctgccgggcaggtgctgcaggctggggagctggtcttccgccctcgcgacggggctgagggccagcccgcactggcagagacctcccctacagctcctgaatgtcccccgcctgccgagtgagctggcggcccttctgactgtttatttaaggatggatggcaccctggaaccgggaagggtggcctgttccctagagagaataaattggattattttctaa

SEQ ID NO: 315047 - DNA, 2358 bp, Homo sapiens
ccggtgccggatcttgaggtgggtctgtgacagctgtcctgtccttggtaggcctggggcaggtgctggagtttatgtacacggccaagctgagcctgagccctgagaacgtggatgatgtgctggccgtggccactttcctccaaatgcaggacatcatcacggcctgccatgccctcaagtcacttgctgagccggctaccagccctgggggaaatgcggaggccttggccacagaaggaggggacaagagagccaaagaggagaaggtggccaccagcacgctgagcaggctggagcaggcaggacgcagcacacccataggccccagcagggacctcaaggaggagcgcggcggtcaggcccagagtgcggccagcggtgcagagcagacagagaaagccgatgcgccccgggagccgccgcctgtggagctcaagccagaccccacgagtggcatggctgctgcagaagctgaggccgctttgtccgagagctcggagcaagaaatggaggtggagcccgcccggaaaggggaagaggagcaaaaggagcaagaggagcaagaggaggagggcgcagggccagctgaggtcaaggaggagggttcccagctggagaacggagaggcccccgaggagaacgagaatgaggagtcagcgggcacagactcggggcaggagctcggctccgaggcccggggcctgcgctcaggcacctacggcgaccgcacggagtccaaggcctacggctccgtcatccacaagtgcgaggactgtgggaaggagttcacgcacacggggaacttcaagcggcacatccgcatccacacgggggagaagcccttctcgtgccgggagtgcagcaaggccttttccgacccggccgcgtgcaaggcccatgagaagacgcacagccctctgaagccctacggctgcgaggagtgcgggaagagctaccgcctcatcagcctgctgaacctgcacaagaagcggcactcgggcgaggcgcgctaccgctgcgaggactgcggcaagctcttcaccacctcgggcaacctcaagcgccaccagctggtgcacagcggcgagaagccctaccagtgcgactactgcggccgctccttctccgaccccacttccaagatgcgccacctggagacccacgacacggacaaggagcacaagtgcccacactgcgacaagaagttcaaccaggtagggaacctgaaggcccacctgaagatccacatcgctgacgggcccctcaagtgccgagagtgtgggaagcagttcaccacctcagggaacctgaagcggcaccttcggatccacagcggggagaagccctacgtgtgcatccactgccagcgacagtttgcagaccccggcgctctgcagcggcacgtccgcattcacacaggtgagaagccatgccagtgtgtgatgtgcggtaaggccttcacccaggccagctccctcatcgcccacgtgcgccagcacaccggggagaagccctacgtctgcgagcgctgcggcaagagattcgtccagtccagccagttggccaatcatattcgccaccacgacaacatccgcccacacaagtgcagcgtgtgcagcaaggccttcgtgaacgtgggggacctgtccaagcacatcatcattcacactggagagaagccttacctgtgtgataagtgtgggcgtggcttcaaccgggtagacaacctgcgctcccacgtgaagaccgtgcaccagggcaaggcaggcatcaagatcctggagcccgaggagggcagtgaggtcagcgtggtcactgtggatgacatggtcacgctggctaccgaggcactggcagcgacagccgtcactcagctcacagtggtgccggtgggagctgcagtgacagccgatgagacggaagtcctgaaggccgagatcagcaaagctgtgaagcaagtgcaggaagaagaccccaacactcacatcctctacgcctgtgactcctgtggggacaagtttctggatgccaacagcctggctcagcatgtgcgaatccacacagcccaggcactggtcatgttccagacagacgcggacttctatcagcagtatgggccaggtggcacgtggcctgccgggcaggtgctgcaggctggggagctggtcttccgccctcgcgacggggctgagggccagcccgcactggcagagacctcccctacagctcctgaatgtcccccgcctgccgagtgagctggcggcccttctgactgtttatttaaggatggatggcaccctggaaccgggaagggtggcctgttccctagagagaataaattggattattttctaa

SEQ ID NO: 315048 - DNA, 1123 bp, Homo sapiens
cgccggaagttgcagccgggaagcctgcgaggtcggttccgcccgactctaacatggcggcgccctttgtctgctctggagtgccgtccccggccttctcgcggccgtgatgcacctccctctgcggtggggtccgggacatggcaggtaatgagccggacgaggggagccaagctggagtttacacaggcaaactgtcagaaaagagtagcctgggctgtctggaaatctgagccatggactttccccagcacagccagcatgtcttggaacagctgaaccagcagcggcagctggggcttctctgtgactgcacctttgtggtggacggtgttcactttaaggctcataaagcagtgctggcggcctgcagcgagtacttcaagatgctcttcgtggaccagaaggacgtggtgcacctggacatcagtaacgcggcaggcctggggcaggtgctggagtttatgtacacggccaagctgagcctgagccctgagaacgtggatgatgtgctggccgtggccactttcctccaaatgcaggacatcatcacggcctgccatgccctcaagtcacttgctgagccggctaccagccctgggggaaatgcggaggccttggccacagaaggaggggacaagagagccaaagaggagaaggtggccaccagcacgctgagcaggctggagcaggcaggacgcagcacacccataggccccagcagggacctcaaggaggagcgcggcggtcaggcccagagtgcggccagcggtgcagagcagacagagaaagccgatgcgccccgggagccgccgcctgtggagctcaagccagaccccacgagtggcatggctgctgcagaagctgaggccgctttgtccgagagctcggagcaagtggcctgccgggcaggtgctgcaggctggggagctggtcttccgccctcgcgacggggctgagggccagcccgcactggcagagacctcccctacagctcctgaatgtcccccgcctgccgagtgagctggcggcccttctgactgtttatttaaggatggatggcaccctggaaccgggaagggtggcctgttccctagagagaataaattggattattttctaa

SEQ ID NO: 315049 - DNA, 1225 bp, Homo sapiens
cgccggaagttgcagccgggaagcctgcgaggtcggttccgcccgactctaacatggcggcgccctttgtctgctctggagtgccgtccccggccttctcgcggccgtgatgcacctccctctgcggtggggtccgggacatggcaggtaatgagccggacgaggggagccaagctggagtttacacaggcaaactgtcagaaaagagtagcctgggctgtctggaaatctgagccatggactttccccagcacagccagcatgtcttggaacagctgaaccagcagcggcagctggggcttctctgtgactgcacctttgtggtggacggtgttcactttaaggctcataaagcagtgctggcggcctgcagcgagtacttcaagatgctcttcgtggaccagaaggacgtggtgcacctggacatcagtaacgcggcaggcctggggcaggtgctggagtttatgtacacggccaagctgagcctgagccctgagaacgtggatgatgtgctggccgtggccactttcctccaaatgcaggacatcatcacggcctgccatgccctcaagtcacttgctgagccggctaccagccctgggggaaatgcggaggccttggccacagaaggaggggacaagagagccaaagaggagaaggtggccaccagcacgctgagcaggctggagcaggcaggacgcagcacacccataggccccagcagggacctcaaggaggagcgcggcggtcaggcccagagtgcggccagcggtgagtcagatgccaaggacccagccggctgtcctgtcacctcccagcagcctgggcacagggtagtgagggctgccttggggcaggtagcacgggcacctgcacctcttgagcctgtgttacccagaatgacctattgtgtgttccagggggtctgtttcaaccagagcactggtcatgttccagacagacgcggacttctatcagcagtatgggccaggtggcacgtggcctgccgggcaggtgctgcaggctggggagctggtcttccgccctcgcgacggggctgagggccagcccgcactggcagagacctcccctacagctcctgaatgtcccccgcctgccgagtgagctggcggcccttctgactgtttatttaaggatggatggcaccctggaaccgggaagggtggcctgttccctagagagaataaattggattattttctaa

SEQ ID NO: 315050 - DNA, 360 bp, Homo sapiens
catgatgttactgttatatttggaagagaaaccaaggcaggggtacaatgaggacaactctgagcgccgaagtactgtaaggtggaacttttggatagctaggcgcatgcgtctgtctatgggcgctctcctagcgaggacgctgcgcatgcgccggaagttgcagccgggaagcctgcgaggtcggttccgcccgactctaacatggcggcgccctttgtctgctctggagtgccgtccccggccttctcgcggccgtgatgcacctccctctgcggtggggtccgggacatggcaggtgagtgtcaacaatcgcccggggccggggaagtcccgggagccggggcggaggcggcggag

SEQ ID NO: 315051 - DNA, 518 bp, Homo sapiens
tgctgggattacaggcgtgagccaccgcgcccggcccatatttttttaatgatagaaaatgaaactgaaattcagtttcagtttcatttaatataccatggtacacaatggtatataccatattttaaagctaaaattcagtattaatgtatttacagtgttgtgcaaccaccatctcactctcgtttcaaaactttcatcagcccataaaaacactccatatccattaaataatcaccaccactccctcattctctagtaacctctaatgggtattctgactatggatttgcctattctggatttatcatataaaagcagtcatacaatatgcgaccttttgtgtctttcagctggcatagtattttcaaatttcatccaagttgtagcatgtatcagtactttggttttttgtatggctaagtaatattccgtgtgtgtgtgtggcggatttcgccatccattcatttgttgatggacatttggttttgtttctaccatttggctattgtaatgat

SEQ ID NO: 315052 - DNA, 1042 bp, Homo sapiens
cgtggtaccggcgcatcacgtgggcgagttaggtgacgctgcggggcgggcggacagactgcgggacggacggtggacgctgggacgcgtttgtagctccggccccgccgttccgacccccgccgccgtcgccgccatgacggggctagcactgctctactccggggtcttcgtggccttctgggcctgcgcgctggccgtgggagtctgctacaccatttttgatttgggcttccgctttgatgtggcatggttcctgacggagacttcgcccttcatgtggtccaacctgggcattggcctagctatctccctgtctgtggttggggcagcctggggcatctatattaccggctcctccatcattggtggaggagtgaaggcccccaggatcaagaccaagaacctggtcagcatcatcttctgtgaggctgtggccatctacggcatcatcatggcaattgtcattagcaacatggctgagcctttcagtgccacagaccccaaggccatcggccatcggaactaccatgcaggctactccatgtttggggctggcctcaccgtaggcctgtctaacctcttctgtggagtctgcgtgggcatcgtgggcagtggggctgccctggccgatgctcagaaccccagcctctttgtaaagattctcatcgtggagatctttggcagcgccattggcctctttggggtcatcgtcgcaattcttcagacctccagagtgaagatgggtgactagatgatatgtgtgggtggggccgtgcctcacttttatttattgctggttttcctgggacagctggagctgtgtcccttagcctttcagaggcttggtgttcagggccctccctgcactcccctcttgctgcgtgttgatttggaggcactgcagtccaggccgagtcctcagtgcggggagcaggctgctgctgctgactctgtgcagctgcgcacctgtgtcccccacctccaccctcaacccatcttcctagtgtttgtgaaataaacttggtatttgtctgggtca

SEQ ID NO: 315053 - DNA, 825 bp, Homo sapiens
gagctgaactgctttcttctctgcttccacaacaggttcctgacggagacttcgcccttcatgtggtccaacctgggcattggcctagctatctccctgtctgtggttggggcagcctggggcatctatattaccggctcctccatcattggtggaggagtgaaggcccccaggatcaagaccaagaacctggtcagcatcatcttctgtgaggctgtggccatctacggcatcatcatggcaattgtcattagcaacatggctgagcctttcagtgccacagaccccaaggccatcggccatcggaactaccatgcaggctactccatgtttggggctggcctcaccgtaggcctgtctaacctcttctgtggagtctgcgtgggcatcgtgggcagtggggctgccctggccgatgctcagaaccccagcctctttgtaaagattctcatcgtggagatctttggcagcgccattggcctctttggggtcatcgtcgcaattcttcagacctccagagtgaagatgggtgactagatgatatgtgtgggtggggccgtgcctcacttttatttattgctggttttcctgggacagctggagctgtgtcccttagcctttcagaggcttggtgttcagggccctccctgcactcccctcttgctgcgtgttgatttggaggcactgcagtccaggccgagtcctcagtgcggggagcaggctgctgctgctgactctgtgcagctgcgcacctgtgtcccccacctccaccctcaacccatcttcctagtgtttgtgaaataaacttggtatttgtctgggtca

SEQ ID NO: 315054 - DNA, 1288 bp, Homo sapiens
  misc_feature (1118)..(1118): n is a, c, g, or t
cgtggtaccggcgcatcacgtgggcgagttaggtgacgctgcggggcgggcggacagactgcgggacggacggtggacgctgggacgcgtttgtagctccggccccgccgttccgacccccgccgccgtcgccgccatgacggggctagcactgctctactccggggtcttcgtggccttctgggcctgcgcgctggccgtgggagtctgctacaccatttttgatttgggcttccgctttgatgtggcatggttcctgacggagacttcgcccttcatgtggtccaacctgggcattggcctagctatctccctgtctgtggttggggcagcctggggcatctatattaccggctcctccatcattggtggaggagtgaaggcccccaggatcaagaccaagaacctggtcagcatcatcttctgtgaggctgtggccatctacggcatcatcatggcaattgtcattagcaacatggctgagcctttcagtgccacagaccccaaggccatcggccatcggaactaccatgcaggctactccatgtttggggctggcctcaccgtaggcctgtctaacctcttctgtggagtctgcgtgggcatcgtgggcagtggggctgccctggccgatgctcagaaccccagcctctttgtaaagattctcatcgtggagatctttggcagcgccattggcctctttggggtcatcgtcgcaattcttcagacctccagagtgaagatgggtgactagatgatatgtgtgggtggggccgtgcctcacttttatttattgctggttttcctgggacagctggagctgtgtcccttagcctttcagaggcttggtgttcagggccctccctgcactcccctcttgctgcgtgttgatttggaggcactgcagtccaggccgagtcctcagtgcggggagcaggctgctgctgctgactctgtgcagctgcgcacctgtgtcccccacctccaccctcaacccatcttcctagtgtttgtgaaataaacttggtatttgtctgggtcaaaaaaaaaaaaaaaaaaaaaaaaaaaaaaaaaaaaaaaaataaagaaaaaacacgaaacacaatagggactaaaangagacatattacaattaaaatctcggggggggccccggcacccaattggccctatagtggggcgaatccaatacactgcccgcagtttaacaccggttgggactgggacttgccgaattaacgaaaggccccaaccagaaggccttttccaaacagttgcgcaactttga

SEQ ID NO: 315055 - DNA, 1468 bp, Homo sapiens
cgtggtaccggcgcatcacgtgggcgagttaggtgacgctgcggggcgggcggacagactgcgggacggacggtggacgctgggacgcgtttgtagctccggccccgccgttccgacccccgccgccgtcgccgccatgacggggctagcactgctctactccggggtcttcgtggccttctgggcctgcgcgctggccgtgggagtctgctacaccatttttgatttgggcttccgctttgatgtggcatggttcctgacggagacttcgcccttcatgtggtccaacctgggcattggcctagctatctccctgtctgtggttggggcagcctggggcatctatattaccggctcctccatcattggtggaggagtgaaggcccccaggatcaagaccaagaacctggtcagcatcatcttctgtgaggctgtggccatctacggcatcatcatggcaattgtcattagcaacatggctgagcctttcagtgccacagaccccaaggccatcggccatcggaactaccatgcaggctactccatgtttggggctggcctcaccgtaggcctgtctaacctcttctgtggagtctgcgtgggcatcgtgggcagtggggctgccctggccgatgctcagaaccccagcctctttgtaaagattctcatcgtggagatctttggcagcgccattggcctctttggggtcatcgtcgcaattcttcagacctccagagtgaagatgggtgactagatgatatgtgtgggtggggccgtgcctcacttttatttattgctggttttcctgggacagctggagctgtgtcccttagcctttcagaggcttggtgttcagggccctccctgcactcccctcttgctgcgtgttgatttggaggcactgcagtccaggccgagtcctcagtgcggggagcaggctgctgctgctgactctgtgcagctgcgcacctgtgtcccccacctccaccctcaacccatcttcctagtgtttgtgaaataaacttggtatttgtctgggtcaaaaaaaaaaaaaaaaaaaaaaaaaaaacaactgtgtgtgtggggcgcgcgccgcgggcccccgcgaaaagagcctttaacagaacacatgcgcggggggcgcgcgcgggggccccgaggagggtaaagcggaacacggggcccaaatacgcggctctcccaagaggaagaaccggggcccagagaaacagaggggggagaaattctctccccattaaaaaaaggcccggggggccacccgcgaagagcgttccggaaaaaaaacccaaaagggagaatacggggagcgaccacaagaggggaactcaatcaacgggggagtccaaggcagaaaccccgaaaaatccaactataaacccggactgcggggcagcacaccacaaaccacgatacacacaccgaccacacaaccaacaccgaccacaaa

SEQ ID NO: 315056 - DNA, 1134 bp, Homo sapiens
  misc_feature (1048)..(1048): n is a, c, g, or t
cgtggtaccggcgcatcacgtgggcgagttaggtgacgctgcggggcgggcggacagactgcgggacggacggtggacgctgggacgcgtttgtagctccggccccgccgttccgacccccgccgccgtcgccgccatgacggggctagcactgctctactccggggtcttcgtggccttctgggcctgcgcgctggccgtgggagtctgctacaccatttttgatttgggcttccgctttgatgtggcatggttcctgacggagacttcgcccttcatgtggtccaacctgggcattggcctagctatctccctgtctgtggttggggcagcctggggcatctatattaccggctcctccatcattggtggaggagtgaaggcccccaggatcaagaccaagaacctggtcagcatcatcttctgtgaggctgtggccatctacggcatcatcatggcaattgtcattagcaacatggctgagcctttcagtgccacagaccccaaggccatcggccatcggaactaccatgcaggctactccatgtttggggctggcctcaccgtaggcctgtctaacctcttctgtggagtctgcgtgggcatcgtgggcagtggggctgccctggccgatgctcagaaccccagcctctttgtaaagattctcatcgtggagatctttggcagcgccattggcctctttggggtcatcgtcgcaattcttcagacctccagagtgaagatgggtgactagatgatatgtgtgggtggggccgtgcctcacttttatttattgctggttttcctgggacagctggagctgtgtcccttagcctttcagaggcttggtgttcagggccctccctgcactcccctcttgctgcgtgttgatttggaggcactgcagtccaggccgagtcctcagtgcggggagcaggctgctgctgctgactctgtgcagctgcgcacctgtgtcccccacctccaccctcaacccatcttcctagtgtttgtgaaataaacttggtatttgtctgggtcaaaaaanacaaaaaatatatattttatattttctatcttctatcactctatatctctcctctcttctccttttacctaaacaaaataatcacg

SEQ ID NO: 315057 - DNA, 1094 bp, Homo sapiens
cgtggtaccggcgcatcacgtgggcgagttaggtgacgctgcggggcgggcggacagactgcgggacggacggtggacgctgggacgcgtttgtagctccggccccgccgttccgacccccgccgccgtcgccgccatgacggggctagcactgctctactccggggtcttcgtggccttctgggcctgcgcgctggccgtgggagtctgctacaccatttttgatttgggcttccgctttgatgtggcatggttcctgacggagacttcgcccttcatgtggtccaacctgggcattggcctagctatctccctgtctgtggttggggcagcctggggcatctatattaccggctcctccatcattggtggaggagtgaaggcccccaggatcaagaccaagaacctggtcagcatcatcttctgtgaggctgtggccatctacggcatcatcatggcaattgtcattagcaacatggctgagcctttcagtgccacagaccccaaggccatcggccatcggaactaccatgcaggctactccatgtttggggctggcctcaccgtaggcctgtctaacctcttctgtggagtctgcgtgggcatcgtgggcagtggggctgccctggccgatgctcagaaccccagcctctttgtaaagattctcatcgtggagatctttggcagcgccattggcctctttggggtcatcgtcgcaattcttcagacctccagagtgaagatgggtgactagatgatatgtgtgggtggggccgtgcctcacttttatttattgctggttttcctgggacagctggagctgtgtcccttagcctttcagaggcttggtgttcagggccctccctgcactcccctcttgctgcgtgttgatttggaggcactgcagtccaggccgagtcctcagtgcggggagcaggctgctgctgctgactctgtgcagctgcgcacctgtgtcccccacctccaccctcaacccatcttcctagtgtttgtgaaataaacttggtatttgtctgggtcaaaaaaaaagtcgagcgccgcgaaatttagtagtagtagtaggtcgcggccgc

SEQ ID NO: 315058 - DNA, 1734 bp, Homo sapiens
cgtggtaccggcgcatcacgtgggcgagttaggtgacgctgcggggcgggcggacagactgcgggacggacggtggacgctgggacgcgtttgtagctccggccccgccgttccgacccccgccgccgtcgccgccatgacggggctagcactgctctactccggggtcttcgtggccttctgggcctgcgcgctggccgtgggtgaggccgggtcctggcgggcgggagcagcatcgcggccgagctggccgggtcggaactcggcggggaagtggcctgcggggaatactggccccccgcgcgctctgcacccgaggctctggggacttgcgcctgcgagggcctctgactccgacaaaggagacccggatttccagctgcttgaggaggggtgcgggcgggtaggggccgcgagggcagcactcccccgtcctgccactatcgctgtctcccctcgctcccacgtctcactgctgtcccccctttcttgctcctgaccggcccgctcggtcacaagccggctgctccggttcctcttttcccagtcgctttgccctcccccacccacagcttgttgggtaaacagcggaacggactgggccggcgggatctggctggagcgcttgctccctcggtcccgcctcggattcgggcttgcgggtggcgaccctgcctgcgcaggtgcttggtctgggaggtggttttagcgagggaatggcagaaaatggaggcctaagcagaggaatctgtctacacagctgtactgtcacctgggggcagcctgaggacgccccttcagggaggtggcccttcagctcggcagctactttaggttgaagaacttctctctaccgagcagcccgtaaccccctttttctccctcactgctgcaggagtctgctacaccatttttgatttgggcttccgctttgatgtggcatggttcctgacggagacttcgcccttcatgtggtccaacctgggcattggcctagctatctccctgtctgtggttggggcagcctggggcatctatattaccggctcctccatcattggtggaggagtgaaggcccccaggatcaagaccaagaacctggtcagcatcatcttctgtgaggctgtggccatctacggcatcatcatggcaattgtcattagcaacatggctgagcctttcagtgccacagaccccaaggccatcggccatcggaactaccatgcaggctactccatgtttggggctggcctcaccgtaggcctgtctaacctcttctgtggagtctgcgtgggcatcgtgggcagtggggctgccctggccgatgctcagaaccccagcctctttgtaaagattctcatcgtggagatctttggcagcgccattggcctctttggggtcatcgtcgcaattcttcagacctccagagtgaagatgggtgactagatgatatgtgtgggtggggccgtgcctcacttttatttattgctggttttcctgggacagctggagctgtgtcccttagcctttcagaggcttggtgttcagggccctccctgcactcccctcttgctgcgtgttgatttggaggcactgcagtccaggccgagtcctcagtgcggggagcaggctgctgctgctgactctgtgcagctgcgcacctgtgtcccccacctccaccctcaacccatcttcctagtgtttgtgaaataaacttggtatttgtctgggtca

SEQ ID NO: 315059 - DNA, 993 bp, Homo sapiens
cgtggtaccggcgcatcacgtgggcgagttaggtgacgctgcggggcgggcggacagactgcgggacggacggtggacgctgggacgcgtttgtagctccggccccgccgttccgacccccgccgccgtcgccgccatgacggggctagcactgctctactccggggtcttcgtggccttctgggcctgcgcgctggccgtgggttcctgacggagacttcgcccttcatgtggtccaacctgggcattggcctagctatctccctgtctgtggttggggcagcctggggcatctatattaccggctcctccatcattggtggaggagtgaaggcccccaggatcaagaccaagaacctggtcagcatcatcttctgtgaggctgtggccatctacggcatcatcatggcaattgtcattagcaacatggctgagcctttcagtgccacagaccccaaggccatcggccatcggaactaccatgcaggctactccatgtttggggctggcctcaccgtaggcctgtctaacctcttctgtggagtctgcgtgggcatcgtgggcagtggggctgccctggccgatgctcagaaccccagcctctttgtaaagattctcatcgtggagatctttggcagcgccattggcctctttggggtcatcgtcgcaattcttcagacctccagagtgaagatgggtgactagatgatatgtgtgggtggggccgtgcctcacttttatttattgctggttttcctgggacagctggagctgtgtcccttagcctttcagaggcttggtgttcagggccctccctgcactcccctcttgctgcgtgttgatttggaggcactgcagtccaggccgagtcctcagtgcggggagcaggctgctgctgctgactctgtgcagctgcgcacctgtgtcccccacctccaccctcaacccatcttcctagtgtttgtgaaataaacttggtatttgtctgggtca

SEQ ID NO: 315060 - DNA, 947 bp, Homo sapiens
cgtggtaccggcgcatcacgtgggcgagttaggtgacgctgcggggcgggcggacagactgcgggacggacggtggacgctgggacgcgtttgtagctccggccccgccgttccgacccccgccgccgtcgccgccatgacggggctagcactgctctactccggggtcttcgtggccttctgggcctgcgcgctggccgtgggttcctgacggagacttcgcccttcatgtggtccaacctgggcattggcctagctatctccccatcattggtggaggagtgaaggcccccaggatcaagaccaagaacctggtcagcatcatcttctgtgaggctgtggccatctacggcatcatcatggcaattgtcattagcaacatggctgagcctttcagtgccacagaccccaaggccatcggccatcggaactaccatgcaggctactccatgtttggggctggcctcaccgtaggcctgtctaacctcttctgtggagtctgcgtgggcatcgtgggcagtggggctgccctggccgatgctcagaaccccagcctctttgtaaagattctcatcgtggagatctttggcagcgccattggcctctttggggtcatcgtcgcaattcttcagacctccagagtgaagatgggtgactagatgatatgtgtgggtggggccgtgcctcacttttatttattgctggttttcctgggacagctggagctgtgtcccttagcctttcagaggcttggtgttcagggccctccctgcactcccctcttgctgcgtgttgatttggaggcactgcagtccaggccgagtcctcagtgcggggagcaggctgctgctgctgactctgtgcagctgcgcacctgtgtcccccacctccaccctcaacccatcttcctagtgtttgtgaaataaacttggtatttgtctgggtca

SEQ ID NO: 315061 - DNA, 1806 bp, Homo sapiens
cgtggtaccggcgcatcacgtgggcgagttaggtgacgctgcggggcgggcggacagactgcgggacggacggtggacgctgggacgcgtttgtagctccggccccgccgttccgacccccgccgccgtcgccgccatgacggggctagcactgctctactccggggtcttcgtggccttctgggcctgcgcgctggccgtgggagtctgctacaccatttttgatttgggcttccgctttgatgtggcatggttcctgacggagacttcgcccttcatgtggtccaacctgggcattggcctagctatctccctgtctgtggttggggcagcctggggcatctatattaccggctcctccatcattggtggaggagtgaaggcccccaggatcaagaccaagaacctggtcagcatcatcttctgtgaggctgtggccatctacggcatcatcatggcaattgtcattagcaacatggctgagcctttcagtgccacagaccccaaggccatcggccatcggaactaccatgcaggctactccatgtttggggctggcctcaccgtaggcctgtctaacctcttctgtggagtctgcgtgggcatcgtgggcagtggggctgccctggccgatgctcagaaccccagcctctttgtaaagattctcatcgtggagatctttggcagcgccattggcctctttggggtcatcgtcgcaattcttcaggtgatgaatccccttgggaagcctctgtgtccttgtccccaacctagccttaccctccttctggagaagctgaagtgctctccttctctacctataactatagattcccccaaacagcttccacctcctcatttccatcttctggttttctcctacagggggctctctatttttgtctctgatttggtgtcactgacaacagccctgttctttttcccccctttctaatgcgttgtatctgtatagcacttagtcctccctctttctgttctctcattttatctgccatgcttttcatgtctccagtctgtatttgtgatctagactagaatggaattttgtctgtctatatcagtctgtcatggtgtgtttgactgtctctcggagctatgtgtatctccctctcacatgcctgtcagtaggacaccattgtctaaattgtgtgtgtctagtctgtctgacagtgtgtgagtttgtgactaaggatcagcctgagggtctgagtgtgactgtgggtgcttgactgagttgattcttagtgactagctttatccatatgccacttctctccgtctgtcccacagcgtaactctgtggttgtctgtccctgtctgccttgtctgtcacagtgtgtccatcctggttagtcatatatctcttgtggtctgtccatccaaccatgtgctagatgtcatcttctatcatttgtcactgccttacctattcctctgtccctgcctgatttctcctgttctttttttgcaacctccagagtgaagatgggtgactagatgatatgtgtgggtggggccgtgcctcacttttatttattgctggttttcctgggacagctggagctgtgtcccttagcctttcagaggcttggtgttcagggccctccctgcactcccctcttgctgcgtgttgatttggaggcactgcagtccaggccgagtcctcagtgcggggagcaggctgctgctgctgactctgtgcagctgcgcacctgtgtcccccacctccaccctcaacccatcttcctagtgtttgtgaaataaacttggtatttgtctgggtca

SEQ ID NO: 315062 - DNA, 1074 bp, Homo sapiens
cgtggtaccggcgcatcacgtgggcgagttaggtgacgctgcggggcgggcggacagactgcgggacggacggtggacgctgggacgcgtttgtagctccggccccgccgttccgacccccgccgccgtcgccgccatgacggggctagcactgctctactccggggtcttcgtggccttctgggcctgcgcgctggccgtgggtgaggccgggtcctggcgggcgggagcagcatcgcggccgagctggccgggtcggaactcggcggggaagtggcctgcggggaatactggccccccgcgcgctctgcacccgaggctctggggacttgcgcctgcgagggcctctgactccgacaaaggagacccggatttccagctgcttgaggaggggtgcgggcgggtaggggccgcgagggcagcactcccccgtcctgccactatcgctgtctcccctcgctcccacgtctcactgctgtcccccctttcttgctcctgaccggcccgctcggtcacaagccggctgctccggttcctcttttcccagtcgctttgccctcccccacccacagcttgttgggtaaacagcggaacggactgggccggcgggatctggctggagcgcttgctccctcggtcccgcctcggattcgggcttgcgggtggcgaccctgcctgcgcaggtgcttggtctgggaggtggttttagcgagggaatggcagaaaatggaggcctaagcagaggaatctgtctacacagctgtactgtcacctgggggcagcctgaggacgccccttcagggaggtggcccttcagctcggcagctactttaggttgaagaacttctctctaccgagcagcccgtaaccccctttttctccctcactgctgcaggagtctgctacaccatttttgatttgggcttccgctttgatgtggcatggtaagggagggcagggggaggattccccttgaagcttcttccctgcagcctctcttcttttctctggtctgagtccctcccccacaccactgcctgcctgggacatggacctttgggaaatacgcggtca

SEQ ID NO: 315063 - DNA, 1038 bp, Homo sapiens
cgtggtaccggcgcatcacgtgggcgagttaggtgacgctgcggggcgggcggacagactgcgggacggacggtggacgctgggacgcgtttgtagctccggccccgccgttccgacccccgccgccgtcgccgccatgacggggctagcactgctctactccggggtcttcgtggccttctgggcctgcgcgctggccgtgggagtctgctacaccatttttgatttgggcttccgctttgatgtggcatggttcctgacggagacttcgcccttcatgtggtccaacctgggcattggcctagctatctccctgtctgtggttggggcagcctggggcatctatattaccggctcctccatcattggtggaggagtgaaggcccccaggatcaagaccaagaacctggtcagcatcatcttctgtgaggctgtggccatctacggcatcatcatggcaattgtcattagcaacatggctgagcctttcagtgccacagaccccaaggccatcggccatcggaactaccatgcaggctactccatgtttggggctggcctcaccgtaggcctgtctaacctcttctgtggagtctgcgtgggcatcgtgggcagtggggctgccctggccgatgctcagaaccccagcctctttgtaaagattctcatcgtggagatctttggcagcgccattggcctctttggggtcatcgtcgcaattcttcagacctccagagtgaagatgggtgactagatgatatgtgtgggtggggccgtgcctcacttttatttattgctggttttcctgggacagctggagctgtgtcccttagcctttcagaggcttggtgttcagggccctccctgcactcccctcttgctgcgtgttgatttggaggcactgcagtccaggccgagtcctcagtgcggggagcaggctgctgctgctgactctgtgcagctgcgcacctgtgtcccccacctagacaaataccaagtttatttcacaaacactaggaagatgggttgagggtggtc

SEQ ID NO: 315064 - DNA, 770 bp, Homo sapiens
gtactactactaaattcgcggcgtcgacgcgtagctatctccctgtctgtggttggggcagcctgggcatctatattaccggctcctccatcattggtggaggagtgaaggcccccaggatcaagaccaagaacctggtcagcatcatcttctgtgaggctgtggccatctacggcatcatcatggcaattgtcattagcaacatggctgagcctttcagtgccacagaccccaaggccatcggccatcggaactaccatgcaggctactccatgtttggggctggcctcaccgtaggcctgtctaacctcttctgtggagtctgcgtgggcatcgtgggcagtggggctgccctggccgatgctcagaaccccagcctctttgtaaagattctcatcgtggagatctttggcagcgccattggcctctttggggtcatcgtcgcaattcttcagacctccagagtgaagatgggtgactagatgatatgtgtgggtggggccgtgcctcacttttatttattgctggttttcctgggacagctggagctgtgtcccttagcctttcagaggcttggtgttcagggccctccctgcactcccctcttgctgcgtgttgatttggaggcactgcagtccaggccgagtcctcagtgcggggagcaggctgctgctgctgactctgtgcagctgcgcacctgtgtcccccacctccaccctcaacccatcttcctagtgtttgtgaaataaacttggtatttgtctgggtca

SEQ ID NO: 315065 - DNA, 922 bp, Homo sapiens
cgtggtaccggcgcatcacgtgggcgagttaggtgacgctgcggggcgggcggacagactgcgggacggacggtggacgctgggacgcgtttgtagctccggccccgccgttccgacccccgccgccgtcgccgccatgacggggctagcactgctctactccggggtcttcgtggccttctgggcctgcgcgctggccgtgggagtctgctacaccatttttgatttgggcttccgctttgatgtggcatggttcctgacggagacttcgcccttcatgtggtccaacctgggcattggcctagctatctccctgtctgtggttggggcagcctggggcatctatattaccggctcctccatcattggtggaggagtgaaggcccccaggatcaagaccaagaacctggtcagcatcatcttctgtgaggctgtggccatctacggcatcatcatggcaattgtcattagcaacatggctgagcctttcagtgccacagaccccaaggccatcggccatcggaactaccatgcaggctactccatgtttggggctggcctcaccgtaggcctgtctaacctcttctgtggagtctgcgtgggcatcacctccagagtgaagatgggtgactagatgatatgtgtgggtggggccgtgcctcacttttatttattgctggttttcctgggacagctggagctgtgtcccttagcctttcagaggcttggtgttcagggccctccctgcactcccctcttgctgcgtgttgatttggaggcactgcagtccaggccgagtcctcagtgcggggagcaggctgctgctgctgactctgtgcagctgcgcacctgtgtcccccacctccaccctcaacccatcttcctagtgtttgtgaaataaacttggtatttgtctgggtca

SEQ ID NO: 315066 - DNA, 1203 bp, Homo sapiens
tggagtcttccgaaaatgttcagacacatttaagaatttttattgagtaatacaatgttctaattgaggcatacacgttgttctaggagtctgtgaaattctaaagataaaagtttgattatgcttgttttgactttaatgaactattcacataattttaatacacagtgtctaacacgtatgaaagttgtgtaataccttataccttaacaatggagaattactaagcaattttggctactctgatattagcatttcctgaaactcctcaggctgatgtggcaaaggagaaatagcaatcttgagttctgaaaagctaggccgcattttggtcctgaaaaatcacttgctgtgaacttgggccagtttttgattttttaaatggcataacagttcgttgctacaagaggttacatcaggaaaatttcctaaggatttaagattttgttcatctattgagttcttttgggtgatttgtttaggaggaagtatctgctcctttttgagttgcttcaccaaagtacttgagtgagaaggcagaatataatgagaatgatcatgctggcaaggaagacatatatatgagatgggttatcctttacacctacgtcagctaaaaccgtctcctacgaacaaatccagcacttggcactttattcgacggtcctaaaaatagagtcctaaatttagaaggcaaggtgctacttttagctcctcttctcggaggaaaacagcacgcaccgcgccaggccaaggtccacggggatttgatttagcatttgggtaactggccgctaatggaactgaagacagctgggcctaacaagtgcccaggtgactcaggtaagcgaggaaaccagatcgaggttctcttgcgtgggacaggttaaactctgaccaaaccacagctgagccgggacgccttcctgtctaaagtccaaagtccggacgtggttggcagggcgcaccggcgcgtgccccgcaggccatttttctgactggaatgacggcggcggctggcttctcggggctgccggggtctcccggggtacgccgccgtcaggacttctgcagggcgcagacagcaggctccagcgaggacgacagcgcggagtatgaggccgaatctcatcctctagtcccaagcctctccactaccagggctgggtggcttcgccaggtagagcgccggcccctttaagc

SEQ ID NO: 315067 - DNA, 3660 bp, Homo sapiens
tgcccggcggaaaccaaaccgagggatggggtggcgaggacagggtacgtcgcaggcttgtgcgggtcgggttcggacctgcgctgcctcgggatgtaaagtataacaagagggtcgggatgggcagcgtaggcctgtgaggcctgcgggtgcccctgtcccccagctccccccgcagccggctccgcagtggtccactccggttgccgggtgcggattcgggttccggaccgaaggctgtgtgttctccgccgttcattgtggccccgacaggccggggttactgtggcgaccacgagagcagctttggcgctatggaggagcccggggctacccctcaaccgtatttggggctgctcctggaggagctacgcagggttgtggcagcactgcctgaaggtatgagaccagattctaatctttatggttttccatgggaattggtgatatgtgcagctgttgttggattttttgctgttctcttttttttgtggagaagttttagatcggttaggagtcggctttatgtgggacgagagaaaaagcttgctctaatgctttctggactaattgaagaaaaaagtaaactacttgaaaaatttagccttgttcaaaaagagtatgaaggctatgaagtagagtcatctttaaaggatgccagctttgagaaggaggcaacagaagcacaaagtttggaggcaacctgtgaaaagctgaacaggtccaattctgaacttgaggatgaaatactctgtctagaaaaagagttaaaagaagagaaatccaaacattctgaacaagatgaattgatggcggatatttcaaaaaggatacagtctctagaagatgagtcaaaatccctcaaatcacaagtagctgaagccaaaatgaccttcaagatatttcaaatgaatgaagaacgactgaagatagcaataaaagatgctttgaatgaaaattctcaacttcaggaaagccagaaacagcttttgcaagaagctgaagtatggaaagaacaagtgagtgaacttaataaacagaaagtaacatttgaagactccaaagtacatgcagaacaagttctaaatgataaagaaagtcacatcaagactctgactgaacgcttgttaaagatgaaagattgggctgctatgcttggagaagacataacggatgatgataacttggaattagaaatgaacagtgaatcggaaaatggtgcttacttagataatcctccaaaaggagctttgaagaaactgattcatgctgctaagttaaatgcttctttaaaaaccttagaaggagaaagaaaccaaatttatattcagttgtctgaagttgataaaacaaaggaagagcttacagagcatattaaaaatcttcagactcaacaagcatctttgcagtcagaaaacacacattttgaaaatgagaatcagaagcttcaacagaaacttaaagtaatgactgaattatatcaagaaaatgaaatgaaactccacaggaaattaacagtagaggaaaattatcggttagagaaagaagagaaactttctaaagtagatgaaaagatcagccatgccactgaagagctggagacctatagaaagcgagccaaagatcttgaagaagaattggagagaactattcattcttatcaagggcagattatttcccatgagaaaaaagcacatgataattggttggcagctcggaatgctgaaagaaacctcaatgatttaaggaaagaaaatgctcacaacagacaaaaattaactgaaacagagcttaaatttgaacttttagaaaaagatccttatgcactcgatgttccaaatacagcatttggcagagagcattccccatatggtccctcaccattgggttggccttcatctgaaacaagagcttttctctctcctccaactttgttggagggtccactcagactctcacctttgcttccagggggaggaggaagaggctcacgaggcccagggaatcctctggaccatcagattaccaatgaaagaggagaatcaagctgtgataggttaaccgatcctcatagggctccctctgacactgggtctctgtcacctccatgggaccaggaccgtaggatgatgtttcctccgccaggacaatcatatcctgattcagcccttcctccacaaaggcaagacagattttgttctaattctggtagactgtctggaccagcagaactcagaagttttaatatgccttctttggataaaatggatgggtcaatgccttcagaaatggaatccagtagaaatgataccaaagatgatcttggtaatttaaatgtgcctgattcatctctccctgctgaaaatgaagccactggccctggctttgttcctccacctcttgctccagtcagaggtccattgtttccagtggatgcaagaggcccattcttgagaagaggacctcctttccccccacctcctccaggagccatgtttggagcttctcgagattattttccaccaggggatttcccaggtccaccacctgctccatttgcaatgagaaatgtctatccaccgaggggttttcctccttaccttcccccaagacctggatttttccccccacccccacattctgaaggtagaagtgagttcccctcaggtttgattccaccttcaaatgagcctgctactgaacatccagaaccacagcaagaaacctgacaatatttttgctctcttcaaaagtaattttgactgatctcattttcagtttaagtaactgctgttacttaagtgattacacttttgctcaaattgaagcttaatggaattataattctcaggatagtattttgtaaataaagatgatttaaatatgaatcttatgagtaaattatttcaattttattttagacggtataactatttcaatttgattaatccactattatataaacaatagtgggagttttatatatgtaatctttcaggtggggaggctttaaattctgaagtctgtgtctttatgccaagaactgtatttactgtggttgtggacaaatgtgaaagtaactttatgcttaaataaattatagttgatttaaagatttgtttggcattgataataataaaatcagtagtttttctataactatggctctattaattaacttttttccttttaccaataactttgaggtgcaaaactcaaacttatgtgggtcttttgtgttcaattatgttatgacaaatgtgctctctttcttgtaaatagacatgagtggcccaaagcaacaaattaatacacttttaaaagtcaaaattgattatattttaaagataaccaggatattatctaatggtgaattgtagaattttgatcttcttattcactgagtttcttgcacggtttctttattgcttttttttccccgcctgttcttttgtaaggtatttactattttctgtggaggatattgagatgtactacaggataactgtagtgaatgatgtgtcatcattttgagctttggactcaatatctttagtgtttccctaaatcagatttgtaggtcatgttaagcttcttgcacattaatatgattatggaaggaaaggcagtgaagcataactaataaacatcataatactt

SEQ ID NO: 315068 - DNA, 1378 bp, Homo sapiens
tggagtcttccgaaaatgttcagacacatttaagaatttttattgagtaatacaatgttctaattgaggcatacacgttgttctaggagtctgtgaaattctaaagataaaagtttgattatgcttgttttgactttaatgaactattcacataattttaatacacagtgtctaacacgtatgaaagttgtgtaataccttataccttaacaatggagaattactaagcaattttggctactctgatattagcatttcctgaaactcctcaggctgatgtggcaaaggagaaatagcaatcttgagttctgaaaagctaggccgcattttggtcctgaaaaatcacttgctgtgaacttgggccagtttttgattttttaaatggcataacagttcgttgctacaagaggttacatcaggaaaatttcctaaggatttaagattttgttcatctattgagttcttttgggtgatttgtttaggaggaagtatctgctcctttttgagttgcttcaccaaagtacttgagtgagaaggcagaatataatgagaatgatcatgctggcaaggaagacatatatatgagatgggttatcctttacacctacgtcagctaaaaccgtctcctacgaacaaatccagcacttggcactttattcgacggtcctaaaaatagagtcctaaatttagaaggcaaggtgctacttttagctcctcttctcggaggaaaacagcacgcaccgcgccaggccaaggtccacggggatttgatttagcatttgggtaactggccgctaatggaactgaagacagctgggcctaacaagtgcccaggtgactcaggtaagcgaggaaaccagatcgaggttctcttgcgtgggacaggttaaactctgaccaaaccacagctgagccgggacgccttcctgtctaaagtccaaagtccggacgtggttggcagggcgcaccggcgcgtgccccgcaggccatttttctgactggaatgacggcggcggctggcttctcggggctgccggggtctcccggggtacgccgccgtcaggacttctgcagggcgcagacagcaggctccagcgaggctgcggaaggaaagccttgggtgtcggggctgggcctggcgtcggcccctgggtcgggggggtgggggttgcgccgagacgcctctaggagaagtctcgccgccgccgccaccgcggccgcccgaggcgggtgcccttgggacatagccctggtctttggggttgtgcggctcacacgacagcgcggagtatgaggccgaatctcatcctctagtcccaagcctctccactaccagggctgggtggcttcgccaggtagagcgccggcccctttaagc

SEQ ID NO: 315069 - DNA, 3774 bp, Homo sapiens
tggagtcttccgaaaatgttcagacacatttaagaatttttattgagtaatacaatgttctaattgaggcatacacgttgttctaggagtctgtgaaattctaaagataaaagtttgattatgcttgttttgactttaatgaactattcacataattttaatacacagtgtctaacacgtatgaaagttgtgtaataccttataccttaacaatggagaattactaagcaattttggctactctgatattagcatttcctgaaactcctcaggctgatgtggcaaaggagaaatagcaatcttgagttctgaaaagctaggccgcattttggtcctgaaaaatcacttgctgtgaacttgggccagtttttgattttttaaatggcataacagttcgttgctacaagaggttacatcaggaaaatttcctaaggatttaagattttgttcatctattgagttcttttgggtgatttgtttaggaggaagtatctgctcctttttgagttgcttcaccaaagtacttgagtgagaaggcagaatataatgagaatgatcatgctggcaaggaagacatatatatgagatgggttatcctttacacctacgtcagctaaaaccgtctcctacgaacaaatccagcacttggcactttattcgacggtcctaaaaatagagtcctaaatttagaaggcaaggtgctacttttagctcctcttctcggaggaaaacagcacgcaccgcgccaggccaaggtccacggggatttgatttagcatttgggtaactggccgctaatggaactgaagacagctgggcctaacaagtgcccaggtgactcaggtaagcgaggaaaccagatcgaggttctcttgcgtgggacaggttaaactctgaccaaaccacagctgagccgggacgccttcctgtctaaagtccaaagtccggacgtggttggcagggcgcaccggcgcgtgccccgcaggccatttttctgactggaatgacggcggcggctggcttctcggggctgccggggtctcccggggttgtggcagcactgcctgaaggtatgagaccagattctaatctttatggttttccatgggaattggtgatatgtgcagctgttgttggattttttgctgttctcttttttttgtggagaagttttagatcggttaggagtcggctttatgtgggacgagagaaaaagcttgctctaatgctttctggactaattgaagaaaaaagtaaactacttgaaaaatttagccttgttcaaaaagagtatgaaggctatgaagtagagtcatctttaaaggatgccagctttgagaaggaggcaacagaagcacaaagtttggaggcaacctgtgaaaagctgaacaggtccaattctgaacttgaggatgaaatactctgtctagaaaaagagttaaaagaagagaaatccaaacattctgaacaagatgaattgatggcggatatttcaaaaaggatacagtctctagaagatgagtcaaaatccctcaaatcacaagtagctgaagccaaaatgaccttcaagatatttcaaatgaatgaagaacgactgaagatagcaataaaagatgctttgaatgggaaagaacaagtgagtgaacttaataaacagaaagtaacatttgaagactccaaagtacatgcagaacaagttctaaatgataaagaaagtcacatcaagactctgactgaacgcttgttaaagatgaaagattgggctgctatgcttggagaagacataacggatgatgataacttggaattagaaatgaacagtgaatcggaaaatggtgcttacttagataatcctccaaaaggagctttgaagaaactgattcatgctgctaagttaaatgcttctttaaaaaccttagaaggagaaagaaaccaaatttatattcagttgtctgaagttgataaaacaaaggaagagcttacagagcatattaaaaatcttcagactcaacaagcatctttgcagtcagaaaacacacattttgaaaatgagaatcagaagcttcaacagaaacttaaagtaatgactgaattatatcaagaaaatgaaatgaaactccacaggaaattaacagtagaggaaaattatcggttagagaaagaagagaaactttctaaagtagatgaaaagatcagccatgccactgaagagctggagacctatagaaagcgagccaaagatcttgaagaagaattggagagaactattcattcttatcaagggcagattatttcccatgagaaaaaagcacatgataattggttggcagctcggaatgctgaaagaaacctcaatgatttaaggaaagaaaatgctcacaacagacaaaaattaactgaaacagagcttaaatttgaacttttagaaaaagatccttatgcactcgatgttccaaatacagcatttggcagagagcattccccatatggtccctcaccattgggttggccttcatctgaaacaagagcttttctctctcctccaactttgttggagggtccactcagactctcacctttgcttccagggggaggaggaagaggctcacgaggcccagggaatcctctggaccatcagattaccaatgaaagaggagaatcaagctgtgataggttaaccgatcctcatagggctccctctgacactgggtctctgtcacctccatgggaccaggaccgtaggatgatgtttcctccgccaggacaatcatatcctgattcagcccttcctccacaaaggcaagacagattttgttctaattctggtagactgtctggaccagcagaactcagaagttttaatatgccttctttggataaaatggatgggtcaatgccttcagaaatggaatccagtagaaatgataccaaagatgatcttggtaatttaaatgtgcctgattcatctctccctgctgaaaatgaagccactggccctggctttgttcctccacctcttgctccagtcagaggtccattgtttccagtggatgcaagaggcccattcttgagaagaggacctcctttccccccacctcctccaggagccatgtttggagcttctcgagattattttccaccaggggatttcccaggtccaccacctgctccatttgcaatgagaaatgtctatccaccgaggggttttcctccttaccttcccccaagacctggatttttccccccacccccacattctgaaggtagaagtgagttcccctcaggtttgattccaccttcaaatgagcctgctactgaacatccagaaccacagcaagaaacctgacaatatttttgctctcttcaaaagtaattttgactgatctcattttcagtttaagtaactgctgttacttaagtgattacacttttgctcaaattgaagcttaatggaattataattctcaggatagtattttgtaaataaagatgatttaaatatgaatcttatgagtaaattatttcaattttattttagacggtataactatttcaatttgattaatccactattatataaacaatagtgggagttttatatatgtaatctttcaggtggggaggctttaaattctgaagtctgtgtctttatgccaagaactgtatttactgtggttgtggacaaatgtgaaagtaactttatgcttaaataaattatagttgatttaaagatttgtttggcattgataataataaaatcagtagtttttctat

SEQ ID NO: 315070 - DNA, 2906 bp, Homo sapiens
gcaggatatattagaatctgaaatctttctcaaggatatgaggtgcctggtagaactttatttacatgttaggaaattttaacatgagcttttcaagaaatggaattgaaaagtccagaggaagaggttgtggcagcactgcctgaaggtatgagaccagattctaatctttatggttttccatgggaattggtgatatgtgcagctgttgttggattttttgctgttctcttttttttgtggagaagttttagatcggttaggagtcggctttatgtgggacgagagaaaaagcttgctctaatgctttctggactaattgaagaaaaaagtaaactacttgaaaaatttagccttgttcaaaaagagtatgaaggctatgaagtagagtcatctttaaaggatgccagctttgagaaggaggcaacagaagcacaaagtttggaggcaacctgtgaaaagctgaacaggtccaattctgaacttgaggatgaaatactctgtctagaaaaagagttaaaagaagagaaatccaaacattctgaacaagatgaattgatggcggatatttcaaaaaggatacagtctctagaagatgagtcaaaatccctcaaatcacaagtagctgaagccaaaatgaccttcaagatatttcaaatgaatgaagaacgactgaagatagcaataaaagatgctttgaatgaaaattctcaacttcaggaaagccagaaacagcttttgcaagaagctgaagtatggaaagaacaagtgagtgaacttaataaacagaaagtaacatttgaagactccaaagtacatgcagaacaagttctaaatgataaagaaagtcacatcaagactctgactgaacgcttgttaaagatgaaagattgggctgctatgcttggagaagacataacggatgatgataacttggaattagaaatgaacagtgaatcggaaaatggtgcttacttagataatcctccaaaaggagctttgaagaaactgattcatgctgctaagttaaatgcttctttaaaaaccttagaaggagaaagaaaccaaatttatattcagttgtctgaagttgataaaacaaaggaagagcttacagagcatattaaaaatcttcagactcaacaagcatctttgcagtcagaaaacacacattttgaaaatgagaatcagaagcttcaacagaaacttaaagtaatgactgaattatatcaagaaaatgaaatgaaactccacaggaaattaacagtagaggaaaattatcggttagagaaagaagagaaactttctaaagtagatgaaaagatcagccatgccactgaagagctggagacctatagaaagcgagccaaagatcttgaagaagaattggagagaactattcattcttatcaagggcagattatttcccatgagaaaaaagcacatgataattggttggcagctcggaatgctgaaagaaacctcaatgatttaaggaaagaaaatgctcacaacagacaaaaattaactgaaacagagcttaaatttgaacttttagaaaaagatccttatgcactcgatgttccaaatacagcatttggcagagagcattccccatatggtccctcaccattgggttggccttcatctgaaacaagagcttttctctctcctccaactttgttggagggtccactcagactctcacctttgcttccagggggaggaggaagaggctcacgaggcccagggaatcctctggaccatcagattaccaatgaaagaggagaatcaagctgtgataggttaaccgatcctcatagggctccctctgacactgggtctctgtcacctccatgggaccaggaccgtaggatgatgtttcctccgccaggacaatcatatcctgattcagcccttcctccacaaaggcaagacagattttgttctaattctggtagactgtctggaccagcagaactcagaagttttaatatgccttctttggataaaatggatgggtcaatgccttcagaaatggaatccagtagaaatgataccaaagatgatcttggtaatttaaatgtgcctgattcatctctccctgctgaaaatgaagccactggccctggctttgttcctccacctcttgctccagtcagaggtccattgtttccagtggatgcaagaggcccattcttgagaagaggacctcctttccccccacctcctccaggagccatgtttggagcttctcgagattattttccaccaggggatttcccaggtccaccacctgctccatttgcaatgagaaatgtctatccaccgaggggttttcctccttaccttcccccaagacctggatttttccccccacccccacattctgaaggtagaagtgagttcccctcaggtttgattccaccttcaaatgagcctgctactgaacatccagaaccacagcaagaaacctgacaatatttttgctctcttcaaaagtaattttgactgatctcattttcagtttaagtaactgctgttacttaagtgattacacttttgctcaaattgaagcttaatggaattataattctcaggatagtattttgtaaataaagatgatttaaatatgaatcttatgagtaaattatttcaattttattttagacggtataactatttcaatttgattaatccactattatataaacaatagtgggagttttatatatgtaatctttcaggtggggaggctttaaattctgaagtctgtgtctttatgccaagaactgtatttactgtggttgtggacaaatgtgaaagtaactttatgcttaaataaattatagttgatttaaagatttgtttggcattgataataataaaatcagtagtttttctat

SEQ ID NO: 315071 - DNA, 1038 bp, Homo sapiens
gttttctggcactaataaaatatttatgataactaaaatgtgatagctgatacattactgtggaaagctgtttgaatctttctctagagctttctaagactatcatggaatgctttctgtctagatgatttcttctaagcctgagattttcgggaaaatgattgcaaatttactgttttagtgactgccatatgtcaatttgttgtagaatttaaatgtgcctgattcatctctccctgctgaaaatgaagccactggccctggctttgttcctccacctcttgctccagtcagaggtccattgtttccagtggatgcaagaggcccattcttgagaagaggacctcctttccccccacctcctccaggagccatgtttggagcttctcgagattattttccaccaggggatttcccaggtccaccacctgctccatttgcaatgagaaatgtctatccaccgaggggttttcctccttaccttcccccaagacctggatttttccccccacccccacattctgaaggtagaagtgagttcccctcaggtttgattccaccttcaaatgagcctgctactgaacatccagaaccacagcaagaaacctgacaatatttttgctctcttcaaaagtaattttgactgatctcattttcagtttaagtaactgctgttacttaagtgattacacttttgctcaaattgaagcttaatggaattataattctcaggatagtattttgtaaataaagatgatttaaatatgaatcttatgagtaaattatttcaattttattttagacggtataactatttcaatttgattaatccactattatataaacaatagtgggagttttatatatgtaatctttcaggtggggaggctttaaattctgaagtctgtgtctttatgccaagaactgtatttactgtggttgtggacaaatgtgaaagtaactttatgcttaaataaattatagttgatttaaagatttgtttggcattgataataataaaatcagtagtttttctat

SEQ ID NO: 315072 - DNA, 3534 bp, Homo sapiens
tggagtcttccgaaaatgttcagacacatttaagaatttttattgagtaatacaatgttctaattgaggcatacacgttgttctaggagtctgtgaaattctaaagataaaagtttgattatgcttgttttgactttaatgaactattcacataattttaatacacagtgtctaacacgtatgaaagttgtgtaataccttataccttaacaatggagaattactaagcaattttggctactctgatattagcatttcctgaaactcctcaggctgatgtggcaaaggagaaatagcaatcttgagttctgaaaagctaggccgcattttggtcctgaaaaatcacttgctgtgaacttgggccagtttttgattttttaaatggcataacagttcgttgctacaagaggttacatcaggaaaatttcctaaggatttaagattttgttcatctattgagttcttttgggtgatttgtttaggaggaagtatctgctcctttttgagttgcttcaccaaagtacttgagtgagaaggcagaatataatgagaatgatcatgctggcaaggaagacatatatatgagatgggttatcctttacacctacgtcagctaaaaccgtctcctacgaacaaatccagcacttggcactttattcgacggtcctaaaaatagagtcctaaatttagaaggcaaggtgctacttttagctcctcttctcggaggaaaacagcacgcaccgcgccaggccaaggtccacggggatttgatttagcatttgggtaactggccgctaatggaactgaagacagctgggcctaacaagtgcccaggtgactcaggtaagcgaggaaaccagatcgaggttctcttgcgtgggacaggttaaactctgaccaaaccacagctgagccgggacgccttcctgtctaaagtccaaagtccggacgtggttggcagggcgcaccggcgcgtgccccgcaggccatttttctgactggaatgacggcggcggctggcttctcggggctgccggggtctcccggggttgtggcagcactgcctgaaggtatgagaccagattctaatctttatggttttccatgggaattggtgatatgtgcagctgttgttggattttttgctgttctcttttttttgtggagaagttttagatcggttaggagtcggctttatgtgggacgagagaaaaagcttgctctaatgctttctggactaattgaagaaaaaagtaaactacttgaaaaatttagccttgttcaaaaagagtatgaaggctatgaagtagagtcatctttaaaggatgccagctttgagaaggaggcaacagaagcacaaagtttggaggcaacctgtgaaaagctgaacaggtccaattctgaacttgaggatgaaatactctgtctagaaaaagagttaaaagaagagaaatccaaacattctgaacaagatgaattgatggcggatatttcaaaaaggatacagtctctagaagatgagtcaaaatccctcaaatcacaagtagctgaagccaaaatgaccttcaagatatttcaaatgaatgaagaacgactgaagatagcaataaaagatgctttgaatgaaaattctcaacttcaggaaagccagaaacagcttttgcaagaagctgaagtatggaaagaacaagtgagtgaacttaataaacagaaagtaacatttgaagactccaaagtacatgcagaacaagttctaaatgataaagaaagtcacatcaagactctgactgaacgcttgttaaagatgaaagattgggctgctatgcttggagaagacataacggatgatgataacttggaattagaaatgaacagtgaatcggaaaatggtgcttacttagataatcctccaaaaggagctttgaagaaactgattcatgctgctaagttaaatgcttctttaaaaaccttagaaggagaaagaaaccaaatttatattcagttgtctgaagttgataaaacaaaggaagagcttacagagcatattaaaaatcttcagactcaacaagcatctttgcagtcagaaaacacacattttgaaaatgagaatcagaagcttcaacagaaacttaaagtaatgactgaattatatcaagaaaatgaaatgaaactccacaggaaattaacagtagaggaaaattatcggttagagaaagaagagaaactttctaaagtagatgaaaagatcagccatgccactgaagagctggagacctatagaaagcgagccaaagatcttgaagaagaattggagagaactattcattcttatcaagggcagattatttcccatgagaaaaaagcacatgataattggttggcagctcggaatgctgaaagaaacctcaatgatttaaggaaagaaaatgctcacaacagacaaaaattaactgaaacagagcttaaatttgaacttttagaaaaagatccttatgcactcgatgttccaaatacagcatttggcagagagcattccccatatggtccctcaccattgggttggccttcatctgaaacaagagcttttctctctcctccaactttgttggagggtccactcagactctcacctttgcttccagggggaggaggaagaggctcacgaggcccagggaatcctctggaccatcagattaccaatgaaagaggagaatcaagctgtgataggttaaccgatcctcatagggctccctctgacactgggtctctgtcacctccatgggaccaggaccgtaggatgatgtttcctccgccaggacaatcatatcctgattcagcccttcctccacaaaggcaagacagattttgttctaattctggtagactgtctggaccagcagaactcagaagttttaatatgccttctttggataaaatggatgggtcaatgccttcagaaatggaatccagtagaaatgataccaaagatgatcttggtaatttaaatgtgcctgattcatctctccctgctgaaaatgaagccactggccctggctttgttcctccacctcttgctccagtcagaggtccattgtttccagtggatgcaagaggcccattcttgagaagaggacctcctttccccccacctcctccaggagccatgtttggcgttcctccccgttggagggaaggtagtggacaactctagaggcattgcggaggtcatgcttttttgacagacaatgcacgtggatttgttttgccatttaccaacagtgtgactttatgccagtttcctttctccttcagttttcatttgcaaagtgctagtatgatgataatgttatggttttgagaagaataaatgtgctaacatctgtaaaatgcatgtcacaatgccgggcacactacaagcagtcattcaacataaggtattatttttacttgagtaacagtagttacgaaaaatgtcctaggaatggatttgaaagctagatagtactttattctgggggcagggaagaccgccca

SEQ ID NO: 315073 - DNA, 654 bp, Homo sapiens
  misc_feature (45)..(46): n is a, c, g, or t
ggctaactctagaggatttacacggcacccctgctacacggcacnnctgctcatttgcatgagaaatgtctatccaccgaggggttttcctccttaccttcccccaagacctggatttttccccccacccccacattctgaaggtagaagtgagttcccctcaggtttgattccaccttcaaatgagcctgctactgaacatccagaaccacagcaagaaacctgacaatatttttgctctcttcaaaagtaattttgactgatctcattttcagtttaagtaactgctgttacttaagtgattacacttttgctcaaattgaagcttaatggaattataattctcaggatagtattttgtaaataaagatgatttaaatatgaatcttatgagtaaattatttcaattttattttagacggtataactatttcaatttgattaatccactattatataaacaatagtgggagttttatatatgtaatctttcaggtggggaggctttaaattctgaagtctgtgtctttatgccaagaactgtatttactgtggttgtggacaaatgtgaaagtaactttatgcttaaataaattatagttgatttaaagatttgtttggcattgataataataaaatcagtagtttttctat

SEQ ID NO: 315074 - DNA, 3028 bp, Homo sapiens
tgcccggcggaaaccaaaccgagggatggggtggcgaggacagggtacgtcgcaggcttgtgcgggtcgggttcggacctgcgctgcctcgggatgtaaagtataacaagagggtcgggatgggcagcgtaggcctgtgaggcctgcgggtgcccctgtcccccagctccccccgcagccggctccgcagtggtccactccggttgccgggtgcggattcgggttccggaccgaaggctgtgtgttctccgccgttcattgtggccccgacaggccggggttactgtggcgaccacgagagcagctttggcgctatggaggagcccggggctacccctcaaccgtatttggggctgctcctggaggagctacgcagggttgtggcagcactgcctgaaggtatgagaccagattctaatctttatggttttccatgggaattggtgatatgtgcagctgttgttggattttttgctgttctcttttttttgtggagaagttttagatcggttaggagtcggctttatgtgggacgagagaaaaagcttgctctaatgctttctggactaattgaagaaaaaagtaaactacttgaaaaatttagccttgttcaaaaagagtatgaaggctatgaagtagagtcatctttaaaggatgccagctttgagaaggaggcaacagaagcacaaagtttggaggcaacctgtgaaaagctgaacaggtccaattctgaacttgaggatgaaatactctgtctagaaaaagagttaaaagaagagaaatccaaacattctgaacaagatgaattgatggcggatatttcaaaaaggatacagtctctagaagatgagtcaaaatccctcaaatcacaagtagctgaagccaaaatgaccttcaagatatttcaaatgaatgaagaacgactgaagatagcaataaaagatgctttgaatgaaaattctcaacttcaggaaagccagaaacagcttttgcaagaagctgaagtatggaaagaacaagtgagtgaacttaataaacagaaagtaacatttgaagactccaaagtacatgcagaacaagttctaaatgataaagaaagtcacatcaagactctgactgaacgcttgttaaagatgaaagattgggctgctatgcttggagaagacataacggatgatgataacttggaattagaaatgaacagtgaatcggaaaatggtgcttacttagataatcctccaaaaggagctttgaagaaactgattcatgctgctaagttaaatgcttctttaaaaaccttagaaggagaaagaaaccaaatttatattcagttgtctgaagttgataaaacaaaggaagagcttacagagcatattaaaaatcttcagactcaacaagcatctttgcagtcagaaaacacacattttgaaaatgagaatcagaagcttcaacagaaacttaaagtaatgactgaattatatcaagaaaatgaaatgaaactccacaggaaattaacagtagaggaaaattatcggttagagaaagaagagaaactttctaaagtagatgaaaagatcagccatgccactgaagagctggagacctatagaaagcgagccaaagatcttgaagaagaattggagagaactattcattcttatcaagggcagattatttcccatgagaaaaaagcacatgataattggttggcagctcggaatgctgaaagaaacctcaatgatttaaggaaagaaaatgctcacaacagacaaaaattaactgaaacagagcttaaatttgaacttttagaaaaagatccttatgcactcgatgttccaaatacagcatttggcagaggctcacgaggcccagggaatcctctggaccatcagattaccaatgaaagaggagaatcaagctgtgataggttaaccgatcctcatagggctccctctgacactgggtctctgtcacctccatgggaccaggaccgtaggatgatgtttcctccgccaggacaatcatatcctgattcagcccttcctccacaaaggcaagacagattttgttctaattctggtagactgtctggaccagcagaactcagaagttttaatatgccttctttggataaaatggatgggtcaatgccttcagaaatggaatccagtagaaatgataccaaagatgatcttggtaatttaaatgtgcctgattcatctctccctgctgaaaatgaagccactggccctggctttgttcctccacctcttgctccagtcagaggtccattgtttccagtggatgcaagaggcccattcttgagaagaggacctcctttccccccacctcctccaggagccatgtttggagcttctcgagattattttccaccaggggatttcccaggtccaccacctgctccatttgcaatgagaaatgtctatccaccgaggggttttcctccttaccttcccccaagacctggatttttccccccacccccacattctgaaggtagaagtgagttcccctcaggtttgattccaccttcaaatgagcctgctactgaacatccagaaccacagcaagaaacctgacaatatttttgctctcttcaaaagtaattttgactgatctcattttcagtttaagtaactgctgttacttaagtgattacacttttgctcaaattgaagcttaatggaattataattctcaggatagtattttgtaaataaagatgatttaaatatgaatcttatgagtaaattatttcaattttattttagacggtataactatttcaatttgattaatccactattatataaacaatagtgggagttttatatatgtaatctttcaggtggggaggctttaaattctgaagtctgtgtctttatgccaagaactgtatttactgtggttgtggacaaatgtgaaagtaactttatgcttaaataaattatagttgatttaaagatttgtttggcattgataataataaaatcagtagtttttctat

SEQ ID NO: 315075 - DNA, 3828 bp, Homo sapiens
tggagtcttccgaaaatgttcagacacatttaagaatttttattgagtaatacaatgttctaattgaggcatacacgttgttctaggagtctgtgaaattctaaagataaaagtttgattatgcttgttttgactttaatgaactattcacataattttaatacacagtgtctaacacgtatgaaagttgtgtaataccttataccttaacaatggagaattactaagcaattttggctactctgatattagcatttcctgaaactcctcaggctgatgtggcaaaggagaaatagcaatcttgagttctgaaaagctaggccgcattttggtcctgaaaaatcacttgctgtgaacttgggccagtttttgattttttaaatggcataacagttcgttgctacaagaggttacatcaggaaaatttcctaaggatttaagattttgttcatctattgagttcttttgggtgatttgtttaggaggaagtatctgctcctttttgagttgcttcaccaaagtacttgagtgagaaggcagaatataatgagaatgatcatgctggcaaggaagacatatatatgagatgggttatcctttacacctacgtcagctaaaaccgtctcctacgaacaaatccagcacttggcactttattcgacggtcctaaaaatagagtcctaaatttagaaggcaaggtgctacttttagctcctcttctcggaggaaaacagcacgcaccgcgccaggccaaggtccacggggatttgatttagcatttgggtaactggccgctaatggaactgaagacagctgggcctaacaagtgcccaggtgactcaggtaagcgaggaaaccagatcgaggttctcttgcgtgggacaggttaaactctgaccaaaccacagctgagccgggacgccttcctgtctaaagtccaaagtccggacgtggttggcagggcgcaccggcgcgtgccccgcaggccatttttctgactggaatgacggcggcggctggcttctcggggctgccggggtctcccggggttgtggcagcactgcctgaaggtatgagaccagattctaatctttatggttttccatgggaattggtgatatgtgcagctgttgttggattttttgctgttctcttttttttgtggagaagttttagatcggttaggagtcggctttatgtgggacgagagaaaaagcttgctctaatgctttctggactaattgaagaaaaaagtaaactacttgaaaaatttagccttgttcaaaaagagtatgaaggctatgaagtagagtcatctttaaaggatgccagctttgagaaggaggcaacagaagcacaaagtttggaggcaacctgtgaaaagctgaacaggtccaattctgaacttgaggatgaaatactctgtctagaaaaagagttaaaagaagagaaatccaaacattctgaacaagatgaattgatggcggatatttcaaaaaggatacagtctctagaagatgagtcaaaatccctcaaatcacaagtagctgaagccaaaatgaccttcaagatatttcaaatgaatgaagaacgactgaagatagcaataaaagatgctttgaatgaaaattctcaacttcaggaaagccagaaacagcttttgcaagaagctgaagtatggaaagaacaagtgagtgaacttaataaacagaaagtaacatttgaagactccaaagtacatgcagaacaagttctaaatgataaagaaagtcacatcaagactctgactgaacgcttgttaaagatgaaagattgggctgctatgcttggagaagacataacggatgatgataacttggaattagaaatgaacagtgaatcggaaaatggtgcttacttagataatcctccaaaaggagctttgaagaaactgattcatgctgctaagttaaatgcttctttaaaaaccttagaaggagaaagaaaccaaatttatattcagttgtctgaagttgataaaacaaaggaagagcttacagagcatattaaaaatcttcagactcaacaagcatctttgcagtcagaaaacacacattttgaaaatgagaatcagaagcttcaacagaaacttaaagtaatgactgaattatatcaagaaaatgaaatgaaactccacaggaaattaacagtagaggaaaattatcggttagagaaagaagagaaactttctaaagtagatgaaaagatcagccatgccactgaagagctggagacctatagaaagcgagccaaagatcttgaagaagaattggagagaactattcattcttatcaagggcagattatttcccatgagaaaaaagcacatgataattggttggcagctcggaatgctgaaagaaacctcaatgatttaaggaaagaaaatgctcacaacagacaaaaattaactgaaacagagcttaaatttgaacttttagaaaaagatccttatgcactcgatgttccaaatacagcatttggcagagagcattccccatatggtccctcaccattgggttggccttcatctgaaacaagagcttttctctctcctccaactttgttggagggtccactcagactctcacctttgcttccagggggaggaggaagaggctcacgaggcccagggaatcctctggaccatcagattaccaatgaaagaggagaatcaagctgtgataggttaaccgatcctcatagggctccctctgacactgggtctctgtcacctccatgggaccaggaccgtaggatgatgtttcctccgccaggacaatcatatcctgattcagcccttcctccacaaaggcaagacagattttgttctaattctggtagactgtctggaccagcagaactcagaagttttaatatgccttctttggataaaatggatgggtcaatgccttcagaaatggaatccagtagaaatgataccaaagatgatcttggtaatttaaatgtgcctgattcatctctccctgctgaaaatgaagccactggccctggctttgttcctccacctcttgctccagtcagaggtccattgtttccagtggatgcaagaggcccattcttgagaagaggacctcctttccccccacctcctccaggagccatgtttggagcttctcgagattattttccaccaggggatttcccaggtccaccacctgctccatttgcaatgagaaatgtctatccaccgaggggttttcctccttaccttcccccaagacctggatttttccccccacccccacattctgaaggtagaagtgagttcccctcaggtttgattccaccttcaaatgagcctgctactgaacatccagaaccacagcaagaaacctgacaatatttttgctctcttcaaaagtaattttgactgatctcattttcagtttaagtaactgctgttacttaagtgattacacttttgctcaaattgaagcttaatggaattataattctcaggatagtattttgtaaataaagatgatttaaatatgaatcttatgagtaaattatttcaattttattttagacggtataactatttcaatttgattaatccactattatataaacaatagtgggagttttatatatgtaatctttcaggtggggaggctttaaattctgaagtctgtgtctttatgccaagaactgtatttactgtggttgtggacaaatgtgaaagtaactttatgcttaaataaattatagttgatttaaagatttgtttggcattgataataataaaatcagtagtttttctat

SEQ ID NO: 315076 - DNA, 4527 bp, Homo sapiens
tggagtcttccgaaaatgttcagacacatttaagaatttttattgagtaatacaatgttctaattgaggcatacacgttgttctaggagtctgtgaaattctaaagataaaagtttgattatgcttgttttgactttaatgaactattcacataattttaatacacagtgtctaacacgtatgaaagttgtgtaataccttataccttaacaatggagaattactaagcaattttggctactctgatattagcatttcctgaaactcctcaggctgatgtggcaaaggagaaatagcaatcttgagttctgaaaagctaggccgcattttggtcctgaaaaatcacttgctgtgaacttgggccagtttttgattttttaaatggcataacagttcgttgctacaagaggttacatcaggaaaatttcctaaggatttaagattttgttcatctattgagttcttttgggtgatttgtttaggaggaagtatctgctcctttttgagttgcttcaccaaagtacttgagtgagaaggcagaatataatgagaatgatcatgctggcaaggaagacatatatatgagatgggttatcctttacacctacgtcagctaaaaccgtctcctacgaacaaatccagcacttggcactttattcgacggtcctaaaaatagagtcctaaatttagaaggcaaggtgctacttttagctcctcttctcggaggaaaacagcacgcaccgcgccaggccaaggtccacggggatttgatttagcatttgggtaactggccgctaatggaactgaagacagctgggcctaacaagtgcccaggtgactcaggtaagcgaggaaaccagatcgaggttctcttgcgtgggacaggttaaactctgaccaaaccacagctgagccgggacgccttcctgtctaaagtccaaagtccggacgtggttggcagggcgcaccggcgcgtgccccgcaggccatttttctgactggaatgacggcggcggctggcttctcggggctgccggggtctcccggggttgtggcagcactgcctgaaggtatgagaccagattctaatctttatggttttccatgggaattggtgatatgtgcagctgttgttggattttttgctgttctcttttttttgtggagaagttttagatcggttaggagtcggctttatgtgggacgagagaaaaagcttgctctaatgctttctggactaattgaagaaaaaagtaaactacttgaaaaatttagccttgttcaaaaagagtatgaaggctatgaagtagagtcatctttaaaggatgccagctttgagaaggaggcaacagaagcacaaagtttggaggcaacctgtgaaaagctgaacaggtccaattctgaacttgaggatgaaatactctgtctagaaaaagagttaaaagaagagaaatccaaacattctgaacaagatgaattgatggcggatatttcaaaaaggatacagtctctagaagatgagtcaaaatccctcaaatcacaagtagctgaagccaaaatgaccttcaagatatttcaaatgaatgaagaacgactgaagatagcaataaaagatgctttgaatgaaaattctcaacttcaggaaagccagaaacagcttttgcaagaagctgaagtatggaaagaacaagtgagtgaacttaataaacagaaagtaacatttgaagactccaaagtacatgcagaacaagttctaaatgataaagaaagtcacatcaagactctgactgaacgcttgttaaagatgaaagattgggctgctatgcttggagaagacataacggatgatgataacttggaattagaaatgaacagtgaatcggaaaatggtgcttacttagataatcctccaaaaggagctttgaagaaactgattcatgctgctaagttaaatgcttctttaaaaaccttagaaggagaaagaaaccaaatttatattcagttgtctgaagttgataaaacaaaggaagagcttacagagcatattaaaaatcttcagactcaacaagcatctttgcagtcagaaaacacacattttgaaaatgagaatcagaagcttcaacagaaacttaaagtaatgactgaattatatcaagaaaatgaaatgaaactccacaggaaattaacagtagaggaaaattatcggttagagaaagaagagaaactttctaaagtagatgaaaagatcagccatgccactgaagagctggagacctatagaaagcgagccaaagatcttgaagaagaattggagagaactattcattcttatcaagggcagattatttcccatgagaaaaaagcacatgataattggttggcagctcggaatgctgaaagaaacctcaatgatttaaggaaagaaaatgctcacaacagacaaaaattaactgaaacagagcttaaatttgaacttttagaaaaagatccttatgcactcgatgttccaaatacagcatttggcagagagcattccccatatggtccctcaccattgggttggccttcatctgaaacaagagcttttctctctcctccaactttgttggagggtccactcagactctcacctttgcttccagggggaggaggaagaggctcacgaggcccagggaatcctctggaccatcagattaccaatgaaagaggagaatcaagctgtgataggttaaccgatcctcatagggctccctctgacactgggtctctgtcacctccatgggaccaggaccgtaggatgatgtttcctccgccaggacaatcatatcctgattcagcccttcctccacaaaggcaagacagattttgttctaattctggtagactgtctggaccagcagaactcagaagttttaatatgccttctttggataaaatggatgggtcaatgccttcagaaatggaatccagtagaaatgataccaaagatgatcttggtaatttaaatgtgcctgattcatctctccctgctgaaaatgaagccactggccctggctttgttcctccacctcttgctccagtcagaggtccattgtttccagtggatgcaagaggcccattcttgagaagaggacctcctttccccccacctcctccaggagccatgtttggagcttctcgagattattttccaccaggggatttcccaggtccaccacctgctccatttgcaatgagaaatgtctatccaccgaggggttttcctccttaccttcccccaagacctggatttttccccccacccccacattctgaaggtagaagtgagttcccctcaggtttgattccaccttcaaatgagcctgctactgaacatccagaaccacagcaagaaacctgacaatatttttgctctcttcaaaagtaattttgactgatctcattttcagtttaagtaactgctgttacttaagtgattacacttttgctcaaattgaagcttaatggaattataattctcaggatagtattttgtaaataaagatgatttaaatatgaatcttatgagtaaattatttcaattttattttagacggtataactatttcaatttgattaatccactattatataaacaatagtgggagttttatatatgtaatctttcaggtggggaggctttaaattctgaagtctgtgtctttatgccaagaactgtatttactgtggttgtggacaaatgtgaaagtaactttatgcttaaataaattatagttgatttaaagatttgtttggcattgataataataaaatcagtagtttttctataactatggctctattaattaacttttttccttttaccaataactttgaggtgcaaaactcaaacttatgtgggtcttttgtgttcaattatgttatgacaaatgtgctctctttcttgtaaatagacatgagtggcccaaagcaacaaattaatacacttttaaaagtcaaaattgattatattttaaagataaccaggatattatctaatggtgaattgtagaattttgatcttcttattcactgagtttcttgcacggtttctttattgcttttttttccccgcctgttcttttgtaaggtatttactattttctgtggaggatattgagatgtactacaggataactgtagtgaatgatgtgtcatcattttgagctttggactcaatatctttagtgtttccctaaatcagatttgtaggtcatgttaagcttcttgcacattaatatgattatggaaggaaaggcagtgaagcataactaataaacatcataatacttaacgttgcccagttggttgttttagtattagacttttttttcaatgccaaaagatagaagattaaatattcttgaataaagcagtgatatatattggaacacttcaccccagcatttccccaggtgttgtttggaacactgatcttgtgaagtatttttgctccctttctattctaaccctcacctcaaaaaaaaa

SEQ ID NO: 315077 - DNA, 3050 bp, Homo sapiens
tgcccggcggaaaccaaaccgagggatggggtggcgaggacagggtacgtcgcaggcttgtgcgggtcgggttcggacctgcgctgcctcgggatgtaaagtataacaagagggtcgggatgggcagcgtaggcctgtgaggcctgcgggtgcccctgtcccccagctccccccgcagccggctccgcagtggtccactccggttgccgggtgcggattcgggttccggaccgaaggctgtgtgttctccgccgttcattgtggccccgacaggccggggttactgtggcgaccacgagagcagctttggcgctatggaggagcccggggctacccctcaaccgtatttggggctgctcctggaggagctacgcagggtgagcccaggcgcgatgagtgttacgtgggagtcggctttatgtgggacgagagaaaaagcttgctctaatgctttctggactaattgaagaaaaaagtaaactacttgaaaaatttagccttgttcaaaaagagtatgaaggctatgaagtagagtcatctttaaaggatgccagctttgagaaggaggcaacagaagcacaaagtttggaggcaacctgtgaaaagctgaacaggtccaattctgaacttgaggatgaaatactctgtctagaaaaagagttaaaagaagagaaatccaaacattctgaacaagatgaattgatggcggatatttcaaaaaggatacagtctctagaagatgagtcaaaatccctcaaatcacaagtagctgaagccaaaatgaccttcaagatatttcaaatgaatgaagaacgactgaagatagcaataaaagatgctttgaatgaaaattctcaacttcaggaaagccagaaacagcttttgcaagaagctgaagtatggaaagaacaagtgagtgaacttaataaacagaaagtaacatttgaagactccaaagtacatgcagaacaagttctaaatgataaagaaagtcacatcaagactctgactgaacgcttgttaaagatgaaagattgggctgctatgcttggagaagacataacggatgatgataacttggaattagaaatgaacagtgaatcggaaaatggtgcttacttagataatcctccaaaaggagctttgaagaaactgattcatgctgctaagttaaatgcttctttaaaaaccttagaaggagaaagaaaccaaatttatattcagttgtctgaagttgataaaacaaaggaagagcttacagagcatattaaaaatcttcagactcaacaagcatctttgcagtcagaaaacacacattttgaaaatgagaatcagaagcttcaacagaaacttaaagtaatgactgaattatatcaagaaaatgaaatgaaactccacaggaaattaacagtagaggaaaattatcggttagagaaagaagagaaactttctaaagtagatgaaaagatcagccatgccactgaagagctggagacctatagaaagcgagccaaagatcttgaagaagaattggagagaactattcattcttatcaagggcagattatttcccatgagaaaaaagcacatgataattggttggcagctcggaatgctgaaagaaacctcaatgatttaaggaaagaaaatgctcacaacagacaaaaattaactgaaacagagcttaaatttgaacttttagaaaaagatccttatgcactcgatgttccaaatacagcatttggcagagagcattccccatatggtccctcaccattgggttggccttcatctgaaacaagagcttttctctctcctccaactttgttggagggtccactcagactctcacctttgcttccagggggaggaggaagaggctcacgaggcccagggaatcctctggaccatcagattaccaatgaaagaggagaatcaagctgtgataggttaaccgatcctcatagggctccctctgacactgggtctctgtcacctccatgggaccaggaccgtaggatgatgtttcctccgccaggacaatcatatcctgattcagcccttcctccacaaaggcaagacagattttgttctaattctggtagactgtctggaccagcagaactcagaagttttaatatgccttctttggataaaatggatgggtcaatgccttcagaaatggaatccagtagaaatgataccaaagatgatcttggtaatttaaatgtgcctgattcatctctccctgctgaaaatgaagccactggccctggctttgttcctccacctcttgctccagtcagaggtccattgtttccagtggatgcaagaggcccattcttgagaagaggacctcctttccccccacctcctccaggagccatgtttggagcttctcgagattattttccaccaggggatttcccaggtccaccacctgctccatttgcaatgagaaatgtctatccaccgaggggttttcctccttaccttcccccaagacctggatttttccccccacccccacattctgaaggtagaagtgagttcccctcaggtttgattccaccttcaaatgagcctgctactgaacatccagaaccacagcaagaaacctgacaatatttttgctctcttcaaaagtaattttgactgatctcattttcagtttaagtaactgctgttacttaagtgattacacttttgctcaaattgaagcttaatggaattataattctcaggatagtattttgtaaataaagatgatttaaatatgaatcttatgagtaaattatttcaattttattttagacggtataactatttcaatttgattaatccactattatataaacaatagtgggagttttatatatgtaatctttcaggtggggaggctttaaattctgaagtctgtgtctttatgccaagaactgtatttactgtggttgtggacaaatgtgaaagtaactttatgcttaaataaattatagttgatttaaagatttgtttggcattgataataataaaatcagtagtttttctat

SEQ ID NO: 315078 - DNA, 4473 bp, Homo sapiens
tggagtcttccgaaaatgttcagacacatttaagaatttttattgagtaatacaatgttctaattgaggcatacacgttgttctaggagtctgtgaaattctaaagataaaagtttgattatgcttgttttgactttaatgaactattcacataattttaatacacagtgtctaacacgtatgaaagttgtgtaataccttataccttaacaatggagaattactaagcaattttggctactctgatattagcatttcctgaaactcctcaggctgatgtggcaaaggagaaatagcaatcttgagttctgaaaagctaggccgcattttggtcctgaaaaatcacttgctgtgaacttgggccagtttttgattttttaaatggcataacagttcgttgctacaagaggttacatcaggaaaatttcctaaggatttaagattttgttcatctattgagttcttttgggtgatttgtttaggaggaagtatctgctcctttttgagttgcttcaccaaagtacttgagtgagaaggcagaatataatgagaatgatcatgctggcaaggaagacatatatatgagatgggttatcctttacacctacgtcagctaaaaccgtctcctacgaacaaatccagcacttggcactttattcgacggtcctaaaaatagagtcctaaatttagaaggcaaggtgctacttttagctcctcttctcggaggaaaacagcacgcaccgcgccaggccaaggtccacggggatttgatttagcatttgggtaactggccgctaatggaactgaagacagctgggcctaacaagtgcccaggtgactcaggtaagcgaggaaaccagatcgaggttctcttgcgtgggacaggttaaactctgaccaaaccacagctgagccgggacgccttcctgtctaaagtccaaagtccggacgtggttggcagggcgcaccggcgcgtgccccgcaggccatttttctgactggaatgacggcggcggctggcttctcggggctgccggggtctcccggggttgtggcagcactgcctgaaggtatgagaccagattctaatctttatggttttccatgggaattggtgatatgtgcagctgttgttggattttttgctgttctcttttttttgtggagaagttttagatcggttaggagtcggctttatgtgggacgagagaaaaagcttgctctaatgctttctggactaattgaagaaaaaagtaaactacttgaaaaatttagccttgttcaaaaagagtatgaaggctatgaagtagagtcatctttaaaggatgccagctttgagaaggaggcaacagaagcacaaagtttggaggcaacctgtgaaaagctgaacaggtccaattctgaacttgaggatgaaatactctgtctagaaaaagagttaaaagaagagaaatccaaacattctgaacaagatgaattgatggcggatatttcaaaaaggatacagtctctagaagatgagtcaaaatccctcaaatcacaagtagctgaagccaaaatgaccttcaagatatttcaaatgaatgaagaacgactgaagatagcaataaaagatgctttgaatgaaaattctcaacttcaggaaagccagaaacagcttttgcaagaagctgaagtatggaaagaacaagtgagtgaacttaataaacagaaagtaacatttgaagactccaaagtacatgcagaacaagttctaaatgataaagaaagtcacatcaagactctgactgaacgcttgttaaagatgaaagattgggctgctatgcttggagaagacataacggatgatgataacttggaattagaaatgaacagtgaatcggaaaatggtgcttacttagataatcctccaaaaggagctttgaagaaactgattcatgctgctaagttaaatgcttctttaaaaaccttagaaggagaaagaaaccaaatttatattcagttgtctgaagttgataaaacaaaggaagagcttacagagcatattaaaaatcttcagactcaacaagcatctttgcagtcagaaaacacacattttgaaaatgagaatcagaagcttcaacagaaacttaaagtaatgactgaattatatcaagaaaatgaaatgaaactccacaggaaattaacagtagaggaaaattatcggttagagaaagaagagaaactttctaaagtagatgaaaagatcagccatgccactgaagagctggagacctatagaaagcgagccaaagatcttgaagaagaattggagagaactattcattcttatcaagggcagattatttcccatgagaaaaaagcacatgataattggttggcagctcggaatgctgaaagaaacctcaatgatttaaggaaagaaaatgctcacaacagacaaaaattaactgaaacagagcttaaatttgaacttttagaaaaagatccttatgcactcgatgttccaaatacagcatttggcagagagcattccccatatggtccctcaccattgggttggccttcatctgaaacaagagcttttctctctcctccaactttgttggagggtccactcagactctcacctttgcttccagggggaggaggaagaggctcacgaggcccagggaatcctctggaccatcagattaccaatgaaagaggagaatcaagctgtgataggttaaccgatcctcatagggctccctctgacactgggtctctgtcacctccatgggaccaggaccgtaggatgatgtttcctccgccaggacaatcatatcctgattcagcccttcctccacaaaggcaagacagattttgttctaattctggtagactgtctggaccagcagaactcagaagttttaatatgccttctttggataaaatggatgggtcaatgccttcagaaatggaatccagtagaaatgataccaaagatgatcttggtaatttaaatgtgcctgattcatctctccctgctgaaaatgaagccactggccctggctttgttcctccacctcttgctccagtcagaggtccattgtttccagtggatgcaagaggcccattcttgagaagaggacctcctttccccccacctcctccaggagccatgtttggagcttctcgagattattttccaccaggggatttcccaggtccaccacctgctccatttgcaatgagaaatgtctatccaccgaggggttttcctccttaccttcccccaagacctggatttttccccccacccccacattctgaaggtagaagtgagttcccctcaggtttgattccaccttcaaatgagcctgctactgaacatccagaaccacagcaagaaacctgacaatatttttgctctcttctgattacacttttgctcaaattgaagcttaatggaattataattctcaggatagtattttgtaaataaagatgatttaaatatgaatcttatgagtaaattatttcaattttattttagacggtataactatttcaatttgattaatccactattatataaacaatagtgggagttttatatatgtaatctttcaggtggggaggctttaaattctgaagtctgtgtctttatgccaagaactgtatttactgtggttgtggacaaatgtgaaagtaactttatgcttaaataaattatagttgatttaaagatttgtttggcattgataataataaaatcagtagtttttctataactatggctctattaattaacttttttccttttaccaataactttgaggtgcaaaactcaaacttatgtgggtcttttgtgttcaattatgttatgacaaatgtgctctctttcttgtaaatagacatgagtggcccaaagcaacaaattaatacacttttaaaagtcaaaattgattatattttaaagataaccaggatattatctaatggtgaattgtagaattttgatcttcttattcactgagtttcttgcacggtttctttattgcttttttttccccgcctgttcttttgtaaggtatttactattttctgtggaggatattgagatgtactacaggataactgtagtgaatgatgtgtcatcattttgagctttggactcaatatctttagtgtttccctaaatcagatttgtaggtcatgttaagcttcttgcacattaatatgattatggaaggaaaggcagtgaagcataactaataaacatcataatacttaacgttgcccagttggttgttttagtattagacttttttttcaatgccaaaagatagaagattaaatattcttgaataaagcagtgatatatattggaacacttcaccccagcatttccccaggtgttgtttggaacactgatcttgtgaagtatttttgctccctttctattctaaccctcacctcaaaaaaaaa

SEQ ID NO: 315079 - DNA, 2565 bp, Homo sapiens
tggagtcttccgaaaatgttcagacacatttaagaatttttattgagtaatacaatgttctaattgaggcatacacgttgttctaggagtctgtgaaattctaaagataaaagtttgattatgcttgttttgactttaatgaactattcacataattttaatacacagtgtctaacacgtatgaaagttgtgtaataccttataccttaacaatggagaattactaagcaattttggctactctgatattagcatttcctgaaactcctcaggctgatgtggcaaaggagaaatagcaatcttgagttctgaaaagctaggccgcattttggtcctgaaaaatcacttgctgtgaacttgggccagtttttgattttttaaatggcataacagttcgttgctacaagaggttacatcaggaaaatttcctaaggatttaagattttgttcatctattgagttcttttgggtgatttgtttaggaggaagtatctgctcctttttgagttgcttcaccaaagtacttgagtgagaaggcagaatataatgagaatgatcatgctggcaaggaagacatatatatgagatgggttatcctttacacctacgtcagctaaaaccgtctcctacgaacaaatccagcacttggcactttattcgacggtcctaaaaatagagtcctaaatttagaaggcaaggtgctacttttagctcctcttctcggaggaaaacagcacgcaccgcgccaggccaaggtccacggggatttgatttagcatttgggtaactggccgctaatggaactgaagacagctgggcctaacaagtgcccaggtgactcaggtaagcgaggaaaccagatcgaggttctcttgcgtgggacaggttaaactctgaccaaaccacagctgagccgggacgccttcctgtctaaagtccaaagtccggacgtggttggcagggcgcaccggcgcgtgccccgcaggccatttttctgactggaatgacggcggcggctggcttctcggggctgccggggtctcccggggttgtggcagcactgcctgaaggtatgagaccagattctaatctttatggttttccatgggaattggtgatatgtgcagctgttgttggattttttgctgttctcttttttttgtggagaagttttagatcggttaggagtcggctttatgtgggacgagagaaaaagcttgctctaatgctttctggactaattgaagaaaaaagtaaactacttgaaaaatttagccttgttcaaaaagagtatgaaggctatgaagtagagtcatctttaaaggatgccagctttgagaaggaggcaacagaagcacaaagtttggaggcaacctgtgaaaagctgaacaggtccaattctgaacttgaggatgaaatactctgtctagaaaaagagttaaaagaagagaaatccaaacattctgaacaagatgaattgatggcggatatttcaaaaaggatacagtctctagaagatgagtcaaaatccctcaaatcacaagtagctgaagccaaaatgaccttcaagatatttcaaatgaatgaagaacgactgaagatagcaataaaagatgctttgaatgaaaattctcaacttcaggaaagccagaaacagcttttgcaagaagctgaagtatggaaagaacaagtgagtgaacttaataaacagaaagtaacatttgaagactccaaagtacatgcagaacaagttctaaatgataaagaaagtcacatcaagactctgactgaacgcttgttaaagatgaaagattgggctgctatgcttggagaagacataacggatgatgataacttggaattagaaatgaacagtgaatcggaaaatggtgcttacttagataatcctccaaaaggagctttgaagaaactgattcatgctgctaagttaaatgcttctttaaaaaccttagaaggagaaagaaaccaaatttatattcagttgtctgaagttgataaaacaaaggaagagcttacagagcatattaaaaatcttcagactcaacaagcatctttgcagtcagaaaacacacattttgaaaatgagaatcagaagcttcaacagaaacttaaagtaatgactgaattatatcaagaaaatgaaatgaaactccacaggaaattaacagtagaggaaaattatcggttagagaaagaagagaaactttctaaagtagatgaaaagatcagccatgccactgaagagctggagacctatagaaagcgagccaaagatcttgaagaagaattggagagaactattcattcttatcaagggcagattattttcccatgagaaaaaaggcccatgataatggggtggggtccggaatgctgaagaaactcatggatttggaaggaaattgttcccccgcaaattatcggacaaaggttattggcttgaagtctttgctcgtgtcccaaccatggggaagatccccagggcgccgggtgcctcggaaaaggtctctccccacggggggcgcaacacctctatgggggaac

SEQ ID NO: 315080 - DNA, 215 bp, Homo sapiens
cacatgtctgggaggcaatgacagaattcctccccagtcctctgtcttcagagcacagtacgtgcactaggacactggcatgggggaggtgcccctcggaagggcagcagggaccagatagtagcctgagctagaaagcccagaggtttacttggttggttggttgttcgtatgtttgtttgtttgcttgttttttggagatggagtctcactct

SEQ ID NO: 315081 - DNA, 563 bp, Homo sapiens
  misc_feature (28)..(31): n is a, c, g, or t
taacataaaaaataaatagtaaaattcnnnnttcaaacgaggcctggagaacaccttgcacgatgccaagcactggcatgacatggagctccagaacctgggcgctgtggtcggccggctggaggcggagctcagggaaatccgagcggaggcggagcagcagcaacaggagcgcgcgcatctgctggcccgcaagtgccagctgcagaaggacgtggcgtcctaccacgccctgctggacagggaggagagcggctgatggagaaacttcctctttttcatgaagaaaacacccttcctcaacagctgacccaagaagttgcttgaggagctttctcctgagctccagtccctgctggattccctggttaattcagcttgagctgaaaagcttcctggaagtggagaggatccttctgctttaatctgagtagtctgtagcttgagcaatctcccttgtcctccttcaaataaatgcttacatttacggacgcttacctaaagagacggttaaaccatcatgctcggtcactgactaaatgtgtgccctcgttggccttagg

SEQ ID NO: 315082 - DNA, 1571 bp, Homo sapiens
cacagaggcagaaggggtgatgagtgagaggcgagtggtagtggacttgcccaccagtgccagctccagcatgcccctccagaggcgcagggcgtccttcagggggccacggtcatcatcctccctggagagccccccagcctccaggaccaatgccatgagtggccttgtccgagcacccggggtctatgtaggaacagcacccagtgggtgcataggtggcttgggtgcccgtgtgacccgccgggccctcggcatcagcagtgtcttccttcagggcctgcggagctcaggcctggccaccgtgccggctccaggtttggagagggaccatggtgctgttgaggacctagggggctgcctggtggaatatatggccaaagtgcacgcccttgagcaagtcagtcaggagctggaaacacaactgcggatgcacctggagagcaaagccacacgctcgggaaactggggtgccctacgggcttcctgggccagcagctgccagcaggtgggtgaggcagtcttggaaaatgcccggctcatgctgcagacagaaactatccaggccggagcagatgactttaaagagagatatgaaaatgagcagccatttcgaaaggcagcagaagaggaaattaactctctgtataaagtcattgatgaggctaatttgactaaaatggacctggagagtcaaatagaaagtctgaaagaagaacttggctctctatcaagaaactatgaagaggatgtgaagctgctgcacaaacagttggcagggtgtgagctggaacaaatggatgctcccattggcactggtctggacgacatccttgagacgatcagaattcagtgggagagagatgttgaaaagaaccgggtggaggcaggagccctgctccaagctaagcaacaggcggaggtggcccacatgtcccagacccaggaggagaagctggcagctgccctcagggtggagttacacaacacttcgtgccaagtccagagcctccaggctgagacagaatccttacgtgccctgaaacgaggcctggagaacaccttgcacgatgccaagcactggcatgacatggagctccagaacctgggcgctgtggtcggccggctggaggcggagctcagggaaatccgagcggaggcggagcagcagcaacaggagcgcgcgcatctgctggcccgcaagtgccagctgcagaaggacgtggcgtcctaccacgccctgctggacagggaggagagcggctgatggagaaacttcctctttttcatgaagaaaacacccttcctcaacagctgacccaagaagttgcttgaggagctttctcctgagctccagtccctgctggattccctggttaattcagcttgagctgaaaagcttcctggaagtggagaggatccttctgctttaatctgagtagtctgtagcttgagcaatctcccttgtcctccttcaaataaatgcttacatttacggacgcttacctaaagagacggttaaaccatcatgctcggtcactgactaaatgtgtgccctcgttggccttagg

SEQ ID NO: 315083 - DNA, 516 bp, Homo sapiens
  misc_feature (28)..(31): n is a, c, g, or t
taacataaaaaataaatagtaaaattcnnnnttcaaacgaggcctggagaacaccttgcacgatgccaagcactggcatgacatggagctccagaacctgggcgctgtggtcggccggctggaggcggagctcagggaaatccgagcggaggcggagcagcagcaacaggagcgcgcgcatctgctggcccgcaagtgccagctgcagaaggacgtggcgtcctaccacgccctgctggacagggaggagagcggctgatggagaaacttcctctttttcatgaagaaaacacccttcctcaacagctgacccaagaagttgcttgaggagctttctcctgagctccagtccctgctggattccctggttaattcagcttgagctgaaaagcttcctggaagtggagaggatccttctgctttaatctgagtagtctgtagcttgagcaatctcccttgtcctccttcaaataaatgcttggcctcgttggcctcagcggtggagctctgcggctg

SEQ ID NO: 315084 - DNA, 1474 bp, Homo sapiens
cacagaggcagaaggggtgatgagtgagaggcgagtggtagtggacttgcccaccagtgccagctccagcatgcccctccagaggcgcagggcgtccttcagggggccacggtcatcatcctccctggagagccccccagcctccaggaccaatgccatgagtggccttgtccgagcacccggggtctatgtaggaacagcacccagtgggtgcataggtggcttgggtgcccgtgtgacccgccgggccctcggcatcagcagtgtcttccttcagggcctgcggagctcaggcctggccaccgtgccggctccaggtttggagagggaccatggtgctgttgaggacctagggggctgcctggtggaatatatggccaaagtgcacgcccttgagcaagtcagtcaggagctggaaacacaactgcggatgcacctggagagcaaagccacacgctcgggaaactggggtgccctacgggcttcctgggccagcagctgccagcaggtgggtgaggcagtcttggaaaatgcccggctcatgctgcagacagaaactatccaggccggagcagatgactttaaagagagatatgaaaatgagcagccatttcgaaaggcagcagaagaggaaattaactctctgtataaagtcattgatgaggctaatttgactaaaatggacctggagagtcaaatagaaagtctgaaagaagaacttggctctctatcaagaaactatgaagaggatgtgaagctgctgcacaaacagttggcagggtgtgagctggaacaaatggatgctcccattggcactggtctggacgacatccttgagacgatcagaattcagtgggagagagatgttgaaaagaaccgggtggaggcaggagccctgctccaagctaagcaacaggcggaggtggcccacatgtcccagacccaggaggagaagctggcagctgccctcagggtggagttacacaacacttcgtgccaagtccagagcctccaggctgagacagaatccttacgtgccctgaaacgaggcctggagaacaccttgcacgatgccaagcactggcatgacatggagctccagaacctgggcgctgtggtcggccggctggaggcggagctcagggaaatccgagcggaggcggagcagcagcaacaggagcgcgcgcatctgctggcccgcaagtgccagctgctgatggagaaacttcctctttttcatgaagaaaacacccttcctcaacagctgacccaagaagttgcttgaggagctttctcctgagctccagtccctgctggattccctggttaattcagcttgagctgaaaagcttcctggaagtggagaggatccttctgctttaatctgagtagtctgtagcttgagcaatctcccttgtcctccttcaaataaatgcttggcctcgttggcctcagcggtggagctctgcggctg

SEQ ID NO: 315085 - DNA, 316 bp, Homo sapiens
tctgctggctagaattctatgccatttatttccccccgtaactcatctaagatgtatattgttgttttcaggatgtgaagctgctgcacaaacagttggcagggtgtgagctggaacaaatggatgctcccattggcactggtctggacgacatccttgagacgatcagaattcagtgggagagagatgttgaaaagaaccgggtggaggcaggagccctgctccaagctaaggtgagaggcaggaccagcatcctccactctgccctatgcagaaggaggccacgctgagctgcaaactagtcaatgtgcagacg

SEQ ID NO: 315086 - DNA, 1524 bp, Homo sapiens
cacagaggcagaaggggtgatgagtgagaggcgagtggtagtggacttgcccaccagtgccagctccagcatgcccctccagaggcgcagggcgtccttcagggggccacggtcatcatcctccctggagagccccccagcctccaggaccaatgccatgagtggccttgtccgagcacccggggtctatgtaggaacagcacccagtgggtgcataggtggcttgggtgcccgtgtgacccgccgggccctcggcatcagcagtgtcttccttcagggcctgcggagctcaggcctggccaccgtgccggctccaggtttggagagggaccatggtgctgttgaggacctagggggctgcctggtggaatatatggccaaagtgcacgcccttgagcaagtcagtcaggagctggaaacacaactgcggatgcacctggagagcaaagccacacgctcgggaaactggggtgccctacgggcttcctgggccagcagctgccagcaggtgggtgaggcagtcttggaaaatgcccggctcatgctgcagacagaaactatccaggccggagcagatgactttaaagagagatatgaaaatgagcagccatttcgaaaggcagcagaagaggaaattaactctctgtataaagtcattgatgaggctaatttgactaaaatggacctggagagtcaaatagaaagtctgaaagaagaacttggctctctatcaagaaactatgaagaggatgtgaagctgctgcacaaacagttggcagggtgtgagctggaacaaatggatgctcccattggcactggtctggacgacatccttgagacgatcagaattcagtgggagagagatgttgaaaagaaccgggtggaggcaggagccctgctccaagctaagcaacaggcggaggtggcccacatgtcccagacccaggaggagaagctggcagctgccctcagggtggagttacacaacacttcgtgccaagtccagagcctccaggctgagacagaatccttacgtgccctgaaacgaggcctggagaacaccttgcacgatgccaagcactggcatgacatggagctccagaacctgggcgctgtggtcggccggctggaggcggagctcagggaaatccgagcggaggcggagcagcagcaacaggagcgcgcgcatctgctggcccgcaagtgccagctgcagaaggacgtggcgtcctaccacgccctgctggacagggaggagagcggctgatggagaaacttcctctttttcatgaagaaaacacccttcctcaacagctgacccaagaagttgcttgaggagctttctcctgagctccagtccctgctggattccctggttaattcagcttgagctgaaaagcttcctggaagtggagaggatccttctgctttaatctgagtagtctgtagcttgagcaatctcccttgtcctccttcaaataaatgcttggcctcgttggcctcagcggtggagctctgcggctg

SEQ ID NO: 315087 - DNA, 1472 bp, Homo sapiens
cacagaggcagaaggggtgatgagtgagaggcgagtggtagtggacttgcccaccagtgccagctccagcatgcccctccagaggcgcagggcgtccttcagggggccacggtcatcatcctccctggagagccccccagcctccaggaccaatgccatgagtggccttgtccgagcacccggggtctatgtaggaacagcacccagtgggtgcataggtggcttgggtgcccgtgtgacccgccgggccctcggcatcagcagtgtcttccttcagggcctgcggagctcaggcctggccaccgtgccggctccaggtttggagagggaccatggtgctgttgaggacctagggggctgcctggtggaatatatggccaaagtgcacgcccttgagcaagtcagtcaggagctggaaacacaactgcggatgcacctggagagcaaagccacacgctcgggaaactggggtgccctacgggcttcctgggccagcagctgccagcaggtgggtgaggcagtcttggaaaatgcccggctcatgctgcagacagaaactatccaggccggagcagatgactttaaagagagatatgaaaatgagcagccatttcgaaaggcagcagaagaggaaattaactctctgtataaagtcattgatgaggctaatttgactaaaatggacctggagagtcaaatagaaagtctgaaagaagaacttggctctctatcaagaaactatgaagaggatgtgaagctgctgcacaaacagttggcagggtgtgagctggaacaaatggatgctcccattggcactggtctggacgacatccttgagacgatcagaattcagtgggagagagatgttgaaaagaaccgggtggaggcaggagccctgctccaagctaagcaacaggcggaggtggcccacatgtcccagacccaggaggagaagctggcagctgccctcagggtggagttacacaacacttcgtgccaagtccagagcctccaggctgagacagaatccttacgtgccctgaaacgaggcctggagaacaccttgcacgatgccaagcactggcatgacatggagctccagaacctgggcgctgtggtcggccggctggaggcggagctcagggaaatccgagcggaggcggagcagcagcaacaggagcgcacgccctgctggacagggaggagagcggctgatggagaaacttcctctttttcatgaagaaaacacccttcctcaacagctgacccaagaagttgcttgaggagctttctcctgagctccagtccctgctggattccctggttaattcagcttgagctgaaaagcttcctggaagtggagaggatccttctgctttaatctgagtagtctgtagcttgagcaatctcccttgtcctccttcaaataaatgcttggcctcgttggcctcagcggtggagctctgcggctg

SEQ ID NO: 315088 - DNA, 466 bp, Homo sapiens
cggtcaagtagtcttgaaaagaatgaaaaataatctaaacgaggcctggagaacaccttgcacgatgccaagcactggcatgacatggagctccagaacctgggcgctgtggtcggccggctggaggcggagctcagggaaatccgagcggaggcggagcagcagcaacaggagcgcacgccctgctggacagggaggagagcggctgatggagaaacttcctctttttcatgaagaaaacacccttcctcaacagctgacccaagaagttgcttgaggagctttctcctgagctccagtccctgctggattccctggttaattcagcttgagctgaaaagcttcctggaagtggagaggatccttctgctttaatctgagtagtctgtagcttgagcaatctcccttgtcctccttcaaataaatgcttggcctcgttggcctcagcggtggagctctgcggctg

SEQ ID NO: 315089 - DNA, 853 bp, Homo sapiens
tcaccacgggaagatgggaagatcctgactttgggcagagcacctgagaggaccccaggatctaggtaccttctctgcgtgcagtttctcaaacaagtggagcttcctctccatccatggccctcggaggaggaaagtgcctgcatagcttggggccagctctggctactgtgaaaggacatttgatcctctctgctgttcagttgtgctctcttctcctggtgtggtctcttgcttcagggcttactttgtggttagctgagtccagtaaggtgaagagtcttctggattatttcagtggcaaaaagccttttatttccttctttagctttcgtaataacaggccgtgcttgtcttgcctaatacccttagaacatgctgtcatgttcttcaacttgcggtcatagagacacaattccgactcttcctgtgctgaacatcagctgaaataacatgccgtattgatccagttcatgagtgagaagtttagtctacacaagccttttctgtcttgctctttgcagaaggattgcgtcagcctaaaaagcggatctttttgtctccatccgctgccacaaagctgttgacggaggctatctgcccaagttggctgccttctctagctcttatcagtaaacttatctgcctcattgtgacatatctacaacagttgcttagccttattcaatcagtattggaagacaagtggaatcatctttcttctcataggaaattttttgaatggaaacttgccctcttaaatatgtaccgccaaaatttagccctgctgtcccacgcaaaggctgtacatgacctggatatcgtcatggggcatgtcctaactataatcatc

SEQ ID NO: 315090 - DNA, 770 bp, Homo sapiens
agggagtctcgctgtgtcgcgcagactggagtgcagtggtgcgatctgcacactgcaacctccacctcctgagatcaagcaattctcctgcctcaacctcacgggtagctgggattacagacgtgcatcaccacgcccagctaatttttgtatttttaatagagacaggttttcaccatgttggccaggttggtctcaaactcccgacctcaggtgatccacccgcctcggcctcccaaagtgctgggattacaggcatgagccaccgggcggtttccatgtgtgatctttaaaaggcagaaacaaataagcaaaaatcattactaaaggcccacgagggttgtttctatcttagaaaatgtgtaaagaaaagtgatacaacaataaatggtttgatttaatgagaagtcaaaaatcataagatctgttgaaaataacaaaatcacttctaaaaaagataatatgttttattgaaataaagccttagaagtcatctggttttaccttttacaaagaagaaagcagtctaagagaggccaaatgacttatcccaagctatacggctaggtagtagcagattcaaatttatactacccaggcttcctaattcttagcccagagctgtgtccaccctaccacccaccttttaattcagtgcgagctcaattattgctaacagttttattgttgaccttccatggactcgatagtcaaatcaagtcttccattacaataaatgggatttatttgtattttgcaacataaccttg

SEQ ID NO: 315091 - DNA, 4995 bp, Homo sapiens
caaagctctaagtatgctgggacagatactacaaatgaactttatgatgagcgaattaacctgatttatagtcctgtactttctctacgtgccatatccattattaaagaaatgagtctaagtaggaagtagagttaacctatagtttcatttcttgaatttcttattctctttcttcagtctttttcagttaacctacacacacacacacacacacacacacacacacacacatatgtttataagtgggatgggagaacgggtacggtgataattaaaagaggtaaggtttctcttgagatgaaaatgttctaaaattgtgatggcggatgcacacctctgaatatattaaaagccattgaaatgaaaaaagggtggggggaatccaaaagtgtagcagacccaaccttgagatttgcttgtttgggaatgaattttccaataacttgaaagttgtaaaaactcacacttctcagggttaggtgtcagaaagaaaaggaagtaatttattctttaataaagcaattgttaaatactctttagaactaccactgattgcaattttgcagtgtctactcatagtgtctatataggtaccatgaaaaagatgtacttgtgaaactgttctcatgttacttcagaaaaattttgcttctaagtgtgtattctatgtctggttaaatgttcattgaattttatttaatcattaatctcaacagcattaaacagtcaataacataaatgacagtcttctctttgtactcctccctgtacaacatcacagagctccatctgtatacacgaaagtcacatgaaaatagaactcagtgttttgtattacatagtctattcagtacatttagaagtattttgcctccaatattcaaccacagtaaaagactcagtgagaacgcgtggtggcgctgcaggttaagatgacggaaaatacaactgcctacgcagctccaggatccagcaaaccgtttcccaaagcctggaagcaaaagaatagctgagccagagcgaacgtgagtgtgaaacctctttaagacaccgttgggctgcttggttctgacattctggactgcaaaacagttctactaggatcctggggatacatgaagcttctgtgaaccaacttttcaagaaaaagcaatggagattggatggatgcacaatcggagacaaaggcaagtccttgttttctttgttttgctgagcttgtctggggcgggcgccgagttggggtcctattccgtagtggaagaaacggagagaggctcttttgtggcaaatctaggaaaagacctggggttggggttgacagagatgtccacccgcaaggccaggatcatttcccaggggaacaaacagcatttgcagctcaaggctcaaactggggatttgctcataaatgagaagctagatcgagaggagctatgcggtcccactgagccttgcatactacatttccaagtgttaatggaaaaccctttagaaatatttcaggctgaactgagggtgatagatataaatgaccattctcccatgttcactgaaaaggaaatgattctaaaaataccggaaaacagtcctctaggaactgagttccctctgaatcatgctttggacttggacgtaggaagcaataatgttcaaaactataaaatcagcccaagctctcatttccgggttctaatccatgaattcagagatggcaggaaataccctgagctagtgttggataaagagctggatcgggaggaggagcctcaactaagattaaccctgacagcgctggatggtggctctccaccgcgatctggaactgctcaggtccgtattgaagtggtggacatcaatgataacgctcctgagtttgagcagcccatctacaaagtgcagattccagagaacagtcctcttggctccctggttgccaccgtctccgccagggatttagacggcggagccaatggaaaaatatcatacacactctttcagccttcggaggatattagtaaaactttggaggtaaatcctatgacaggggaagttcgactgagaaagcaagtagatttcgaaatggttacgtcttatgaagtgcgcatcaaagccacagatgggggaggtctttcaggaaagtgcactcttctcctgcaggtggtggacgtgaatgacaatcccccacaggtgaccatgtctgcactcaccagccccatcccagagaactcgcctgagatagtagttgctgttttcagcgtttcagatcctgactccggaaacaatgggaagacgatttcctccatccaggaagaccttccctttcttctaaaaccttcagtcaagaacttttacaccttggtaacggagagagcactcgacagagaagcaagagctgaatataatatcaccctcaccgtcacagatatggggactccaaggctgaaaacggagcacaacataacagtgcagatatcagatgtcaatgataacgcccccactttcacccaaacctcctacaccctgttcgtccgcgagaacaacagccccgccctgcacatcggcagcgtcagcgccacagacagagactcaggcaccaacgcccaggtcacctactcgctgctgccgccccaggacccgcacctgcccctcgcctccctggtctccatcaacgcagacaacggccacctgttcgccctcaggtcgctggactacgaggccctgcgggagttcgagttccgcgtgagcgccacagaccgcggctccccggctttgagcagcgaggcgctggtgcgcgtgctggtgctggacgccaacgacaactcgcccttcgtgctgtacccgctgcagaacggctccgcgccctgcactgagctggtgccccgggcggccgagccgggctacctggtgaccaaggtggtggcggtggacggcgactcgggccagaatgcctggctgtcgtaccagctgctcaaggccacggagcccgggctgttcggtgtgtgggcgcacaatggcgaggtgcgcaccgccaggctgctgagcgagcgcgacgcagccaagcagaggctggtggtgctggtcaaggacaatggcgagcctccgcgctcggccaccgccacgctgcacgtgctcctggtggacggcttctcccagcccttcctgccgctcccagaggcggcccccggccagacccaggccaactcgctcactgtctacctggtggtggcgttggcctcggtgtcgtcgctcttcctcttttcggtgctcctgttcgtggcggtgcggctgtgcaggaggagcagggcggcctcggtgggccgctgctcgatgcctgagggcccctttccagggcgtctggtggacgtaagcggcaccgggaccctgtcccagagctaccaatacgaggtgtgtctgacaggaggctcagaaacaagtgagttcaagttcctgaagccgattatccccaacttctctccttagggcactaggaaagaaatagattaaaattccacccttcacaatagctttggatttaattattgataggaacccatttgataaattccttaacttcttatgattgtcttgttgattaaattgttcatgctcaccaccaccaataaggtatttttctctgattgttagttcaaattatattgttaattccagtttcccttttcctcatatttaccccgaagaggtgttgcatatagaatcccaattaacaaaatatactttatcttcaaagttgatgtcatttaaaatttttccgtctttatattttatttacttcctattcattttttgctccatttttcatgttacttctcagtttcctagaacttcaagtattaaaataacctgttgcatgtattaggcatatttcctatgttacatttcttttgtctattttcctttcaaaattggtatttttgttgggctcaattttcattataatacttttcttaaagtttctttctttcttttcttttctttctttttttttttttcctttttgagacagggtcttactcttgtcacccaggctggagtgcagtggcacaatcttggctcactgcaacctctgcctcctgggctcaacggatccttccacctcagcctcccaagtagcttggactataggtgcatgccaccatgcctggctaatcttttgcagcgatgggattttgccaagttgcccaggctgatcttgaactcctgggctcaagccatcctccctcctcagcctcccaaaattctgggattacaggcataagccaatgtgcccatccaaagttttatttatttatttttttgagatggagtctcgtaaagttacctttaaaaaaaaagttctattttccctgtattggtatctccttaaataaaataaaatattcctattgtaagtgatatgagaaatctttaaccagccttatctaaaaataaaaagagaagccattgtaagacattcagtatgtgtaaatgtgtttgtgtttgtagacaaaaggcaaaggtattatgtaaaaatatttaataatttattctttctattactgaattaaaaaatcagaggtccctgttatatttttaatggctaacaactcaatctcattaagttggaaaaaaaacttatcaaagagacatttacatggtttggcttttatattcatcatagtatacattggcggtatctagccctttctctgtaaaatatccctatgtttaatctgtatttcttgcttattatatgtaaagttgagcttctttctagatattaggcctttgaataaaattctatgtgagtcagatttaataatttgttttcactttcaatagtgttaggataggtgttagtttgatctgttctttacctccgcttatttggttcagagaaattagggcctactagatttccactaaaagggacttgaaaataaaggtcagtcccttctttaattctgcaagttactttaaagctaatctaag

SEQ ID NO: 315092 - DNA, 2007 bp, Homo sapiens
  misc_feature (76)..(76): n is a, c, g, or t
  misc_feature (92)..(92): n is a, c, g, or t
  misc_feature (121)..(121): n is a, c, g, or t
gcacgaggcggcccccggccgcctctgggagcggcaggaagggctgggagaagccgtccaccaggagcacgtgcancgtggcggtggccgancgcggaggctcgccattgtccttgaccancaccaccagcctctgcttggctgcgtcgcgctcgctcagcagcctggcggtgcgcacctcgccattgtgcgcccacacaccgaacagcccaggccaactcgctcactgtctacctggtggtggcgttggcctcggtgtcgtcgctcttcctcttttcggtgctcctgttcgtggcggtgcggctgtgcaggaggagcagggcggcctcggtgggccgctgctcgatgcctgagggcccctttccagggcgtctggtggacgtaagcggcaccgggaccctgtcccagagctaccaatacgaggtgtgtctgacaggaggctcagaaacaagtgagttcaagttcctgaagccgattatccccaacttctctccttagggcactaggaaagaaatagattaaaattccacccttcacaatagctttggatttaattattgataggaacccatttgataaattccttaacttcttatgattgtcttgttgattaaattgttcatgctcaccaccaccaataaggtatttttctctgattgttagttcaaattatattgttaattccagtttcccttttcctcatatttaccccgaagaggtgttgcatatagaatcccaattaacaaaatatactttatcttcaaagttgatgtcatttaaaatttttccgtctttatattttatttacttcctattcattttttgctccatttttcatgttacttctcagtttcctagaacttcaagtattaaaataacctgttgcatgtattaggcatatttcctatgttacatttcttttgtctattttcctttcaaaattggtatttttgttgggctcaattttcattataatacttttcttaaagtttctttctttcttttcttttctttctttttttttttttcctttttgagacagggtcttactcttgtcacccaggctggagtgcagtggcacaatcttggctcactgcaacctctgcctcctgggctcaacggatccttccacctcagcctcccaagtagcttggactataggtgcatgccaccatgcctggctaatcttttgcagcgatgggattttgccaagttgcccaggctgatcttgaactcctgggctcaagccatcctccctcctcagcctcccaaaattctgggattacaggcataagccaatgtgcccatccaaagttttatttatttatttttttgagatggagtctcgtaaagttacctttaaaaaaaaagttctattttccctgtattggtatctccttaaataaaataaaatattcctattgtaagtgatatgagaaatctttaaccagccttatctaaaaataaaaagagaagccattgtaagacattcagtatgtgtaaatgtgtttgtgtttgtagacaaaaggcaaaggtattatgtaaaaatatttaataatttattctttctattactgaattaaaaaatcagaggtccctgttatatttttaatggctaacaactcaatctcattaagttggaaaaaaaacttatcaaagagacatttacatggtttggcttttatattcatcatagtatacattggcggtatctagccctttctctgtaaaatatccctatgtttaatctgtatttcttgcttattatatgtaaagttgagcttctttctagatattaggcctttgaataaaattctatgtgagtcagatttaataatttgttttcactttcaatagtgttaggataggtgttagtttgatctgttctttacctccgcttatttggttcagagaaattagggcctactagatttccactaaaagggacttgaaaataaaggtcagtcccttctttaattctgcaagttactttaaagctaatctaag

SEQ ID NO: 315093 - DNA, 708 bp, Homo sapiens
cacggtggaagggctggggccacggggcagagaagaaaggttatctctgcttgttggacaaacagaggggagattataaaacatacccggcagtggacaccatgcattctgcaagccaccctggggtgcagctgagctagacatgggacggcgagacgcccagctcctggcagcgctcctcgtcctggggctatgtgccctggcggggagtgagaaaccctccccctgccagtgctccaggctgagcccccataacaggacgaactgcggcttccctggaatcaccagtgaccagtgttttgacaatggatgctgtttcgactccagtgtcactggggtcccctggtgtttccaccccctcccaaagcaagagtcggatcagtgcgtcatggaggtctcagaccgaagaaactgtggctacccgggcatcagccccgaggaatgcgcctctcggaagtgctgcttctccaacttcatctttgaagtgccctggtgcttcttcccgaagtctgtggaagactgccattactaagagaggctggttccagaggatgcatctggctcaccgggtgttccgaaaccaaagaagaaacttcgccttatcagcttcatatttcatgaaatcctgggttttcttaaccatcttttcctcattttcaatggtttaacatataatttctttaaataaaacccttaaaatctgctaaa

SEQ ID NO: 315094 - DNA, 388 bp, Homo sapiens
atccgtaaatatctcacctcacgacccaccccacctcccatctattctatgagtcggatcagtgcgtcatggaggtctcagaccgaagaaactgtggctacccgggcatcagccccgaggaatgcgcctctcggaagtgctgcttctccaacttcatctttgaagtgccctggtgcttcttcccgaagtctgtggaagactgccattactaagagaggctggttccagaggatgcatctggctcaccgggtgttccgaaaccaaagaagaaacttcgccttatcagcttcatatttcatgaaatcctgggttttcttaaccatcttttcctcattttcaatggtttaacatataatttctttaaataaaacccttaaaatctgctaaa

SEQ ID NO: 315095 - DNA, 1054 bp, Homo sapiens
cacggtggaagggctggggccacggggcagagaagaaaggttatctctgcttgttggacaaacagaggggagattataaaacatacccggcagtggacaccatgcattctgcaagccaccctggggtgcagctgagctagacatgggacggcgagacgcccagctcctggcagcgctcctcgtcctggggctatgtgccctggcggggagtgagaaaccctccccctgccagtgctccaggctgagcccccataacaggacgaactgcggcttccctggaatcaccagtgaccagtgttttgacaatggatgctgtttcgactccagtgtcactggggtcccctggtgtttccaccccctcccaaagcaagagtcggatcagtgcgtcatggaggtctcagaccgaagaaactgtggctacccgggcatcagccccgaggaatgcgcctctcggaagtgctgcttctccaacttcatctttgaagtgccctggtgcttcttcccgaagtctgtggaagactgccattactaagagaggctggttccagaggatgcatctggctcaccgggtgttccgaaaccaaagaagaaacttcgccttatcagcttcatatttcatgaaatcctgggttttcttaaccatcttttcctcattttcaatggtttaacatataatttctttaaataaaacccttaaaatctgctaaaaaaaaacacaccaagacaaaaaacacacacaaaaaaaaaaacaacaaaaaaaaaaaacacacccgcaccgaaacgccgacaacacaaagcgagggcgggcccacacatacaccccgcgtggggccacccatacttagtgcaacacccatttttgtaagacagggggccacaaatggccgagcgtgttattaagcggcggagcgggcgcgcgtggtattatacccaacctgtggacagtccacacagtgttaaggagcgacacatcgtggtgagggggcccactactcgcgtaggggtaggcaaacacggtgggagaacacaaccccaaaaggagatttcaccggcg

SEQ ID NO: 315096 - DNA, 396 bp, Homo sapiens
  misc_feature (62)..(62): n is a, c, g, or t
  misc_feature (77)..(77): n is a, c, g, or t
ctctcttccgccgttggtttcgcgcccccccccccgtcaaccaagaaaaaaaaaaaggttgntggtgactcgcgcgncgctgaggggtcaaacacgaaactgtggctacccgggcatcagccccgaggaatgcgcctctcggaagtgctgcttctccaacttcatctttgaagtgccctggtgcttcttcccgaagtctgtggaagactgccattactaagagaggctggttccagaggatgcatctggctcaccgggtgttccgaaaccaaagaagaaacttcgccttatcagcttcatatttcatgaaatcctgggttttcttaaccatcttttcctcattttcaatggtttaacatataatttctttaaataaaacccttaaaatctgctaaa

SEQ ID NO: 315097 - DNA, 505 bp, Homo sapiens
ccaacatctttttcatcaggagctgacaaggcaaaaaacccccttcctctcagaacaatggcatgccaccatgcttttgtagtaacaaacactgaaaagtactcaacttctcctttcctttctcctcaaggaaataaccatcgactgactaataccgccccactccaaaggcacacacatcatgtcacgcatttgagctaaagaccataattcaactgaaagattaggagggaatattggaaaaggatggattagacatggaatctacaacctatcaagaagggaaaagtgagatcatactctctttttgaaccaaaatacaaaaacaaaaacatgtgcagtatatcatagttgagaacttggtctctggtatcatcgcccaaattcaaatggcagactagacctagagctgcacagccttggaaagtctacaagcctcagtcctctcatctgtcaaatgggagtattatagctaggttaaataatgcatgaaaagtgcttcaca

SEQ ID NO: 315098 - DNA, 649 bp, Homo sapiens
tacaacaacccaggtacttaagttttaaaagttttttttaaaacacttgtcaccatattttgaaaaatactaacatttggattactagttataaaagtgtaatttctactgtgtcataatcagccatgcagctggagacttgccctctttgtacagcaaagttgtgaaaaaaagtatttgcactacatttatttaaacattaggaaaaaaagccaacccatgcttttctttgccgagatgtagggctgtattattggctagtgagaagcctgggaacactaggactttgtgtgggctgattgcaggtatcagatccgggattatacaggtactgttggaagtatcttggggattttcctgataagaacagtagtgattgcataaaaaggacaggatgtaaagtgaaatcagtaaaatatcttagtagacagagggtgctgaaattttaacaaatgtgtaaaaagttcttcctatgcattaattttccagatacccttaaaatgtttaaggaatgtaattcaaaatactgtttaaaagagacatgtgaccatcattctcccagcgaatgtgaatcatttagtgtgctactcaaaattaggtgtaaatgtatatgtacactataagaataaaaatcgataccatttcttta

SEQ ID NO: 315099 - DNA, 433 bp, Homo sapiens
ctcttagggtcaatataaatactggctattgttttcattggtggcagcatcaccatcaccttagctacttgttcaacttttgggaacatcttctggtaccgccatctctgactgtctttaaagactgatctgctgatgagattaatgttggctaggctaatgctagaaaactcctcatatgatgaagatgtttaccgatttttcttgttggctatcagtggaatgggttatcagttttccatgtatgttttatttaaaattttctgttagcccaccaaacccagccaccaattttactttaggtaaacttttattttcaagcttttgttggtgttgcaagtgtaaatctgttttataaaatgttctataaatataaccactattccttgtaagctatttaaaataaattttaaagtctttcaagtaaacacca

SEQ ID NO: 315100 - DNA, 283 bp, Homo sapiens
tatactgtgtaccaagaatgtagtaacactttccttttctttttacagggaattgatgttgatgctgaaaattgtgcagtgtgtattgaaaatttcaaagtaaaggatattattagaattctgccatgcaagtatgttctttttacatattgagatgttaaaaattacttgacaagttttaggtgtctgacaaaatagttatttgttttttatgataatgaagatcttgtaatttgtgatcatctcttctttttagaaaagcagcttggattttaaatataat

SEQ ID NO: 315101 - DNA, 3138 bp, Homo sapiens
ttcgtccactccgccaggtgcgcgtgcgcagcggccccgaccccgcctcagtcttccaggcggcggtgggtgtccgcttctctctgctcttcgactgcaccgcactcgcgcgtgaccctgactccccctagtcagctcagcggtgctgccatggcgtggcggcggcgcgaagccagcgtcggggctcgcggcgtgttggctctggcgttgctcgccctggccctgtgcgtgcccggggcccggggccgggctctcgagtggttctcggccgtggtaaacatcgagtacgtggacccgcagaccaacctgacggtgtggagcgtctcggagagtggccgcttcggcgacagctcgcccaaggagggcgcgcatggcctggtgggcgtcccgtgggcgcccggcggagacctcgagggctgcgcgcccgacacgcgcttcttcgtgcccgagcccggcggccgaggggccgcgccctgggtcgccctggtggctcgtgggggctgcaccttcaaggacaaggtgctggtggcggcgcggaggaacgcctcggccgtcgtcctctacaatgaggagcgctacgggaacatcaccttgcccatgtctcacgcgggaacaggaaatatagtggtcattatgattagctatccaaaaggaagagaaattttggagctggtgcaaaaaggaattccagtaacgatgaccataggggttggcacccggcatgtacaggagttcatcagcggtcagtctgtggtgtttgtggccattgccttcatcaccatgatgattatctcgttagcctggctaatattttactatatacagcgtttcctatatactggctctcagattggaagtcagagccatagaaaagaaactaagaaagttattggccagcttctacttcatactgtaaagcatggagaaaagggaattgatgttgatgctgaaaattgtgcagtgtgtattgaaaatttcaaagtaaaggatattattagaattctgccatgcaagcatatttttcatagaatatgcattgacccatggcttttggatcaccgaacatgtccaatgtgtaaacttgatgtcatcaaagccctaggatattggggagagcctggggatgtacaggagatgcctgctccagaatctcctcctggaagggatccagctgcaaatttgagtctagctttaccagatgatgacggaagtgatgagagcagtccaccatcagcctcccctgctgaatctgagccacagtgtgatcccagctttaaaggagatgcaggagaaaatacggcattgctagaagccggcaggagtgactctcggcatggaggacccatctcctagcacacgtgcccactgaagtggcaccaacagaagtttggcttgaactaaaggacattttattttttttactttagcacataatttgtatatttgaaaataatgtatattattttacctattagattctgatttgatatacaaaggactaagatattttcttcttgaagagacttttcgattagtcctcatatatttatctactaaaatagagtgtttaccatgaacagtgtgttgcttcagactattacaaagacaactggggcaggtactctaatataaaggacaggtggtgtttctaaataattggctgctatggttctgtaaaaaccagttaattctatttttcaaggtttttggcaaagcacatcaatgttagactagttgaagtggaattgtataattcaattcgataattgatctcatgggctttccctggaggaaaggttttttttgttgttttttttttaagaacttgaaacttgtaaactgagatgtctgtagcttttttgcccatctgtagtgtatgtgaagatttcaaaacctgagagcactttttctttgtttagaattatgagaaaggcactagatgactttaggatttgcatttttccctttattgcctcatttcttgtgacgccttgttggggagggaaatctgtttattttttcctacaaataaaaagctaagattctatatcgcacatgagcattaagttcttcattgccttgttaaggaaaatgagtaggcagactcagaatctgttatattgatttcagttacaatttaatctttacaattaaaagggcgaaagatgtagaattttagtttttgttgttgactcgaaataaccagttttcttgattagagtttaagcagatttaataccatgaccttgcttaaccgtttcttcttttttacttgcttgctgttcttttgggtcaaaggagcaggctaatgcaaagcttttggagactgctaagtgttaaaaagtgattaaacacacactctgctattttttcacttcttggaggtagaagtcgagtatgaggcagttattttttagagtgtggaattatagtctttccttgctcctagttattctgtatatctttactttgtaggtaaaaataaatgtttatttaaaacaatttttaaaattataaatttatttttatagccatatgtaggatataaagatttatatagattattttctcaagctacttaatgctttaattctagctactcatcatgaaatagtaaacagttttactgaaataaactctacagacagatgcagtatgaggagctattgaagtagaaaatgtatttcgctttgcacactgagttggttttagcagacaacctcaagtaggtttccataacagccattacctttgaaatctaccttctgtagtttattataaataggaaaatacatcctgattctgtagcaagtagattgtttgctctttgtctttaagaaatactaggagggccgggcgcggtggctcacgcctgtaatcccagcactttgggaggccgaggcgggcggatcacgaggtcaggagatcgagaccatcccggctaaaacggtgaaaccccgtctctactaaaaatacaaaaaattagccgggcgtagtggcgggcgcctgtagtcccagctacttgggaggctgaggcaggagaatggcgtgaacccggaaggcagagcttgcagtgagccgagatcccgccactgcactccagcctgggcgacagagcgagactccgtctcaaaaaaa

SEQ ID NO: 315102 - DNA, 3113 bp, Homo sapiens
  misc_feature (16)..(16): n is a, c, g, or t
tagaggtggtaccccnggggttaggatattgtcgaccacgccgtcggtccgcttctctctgctcttcgactgcaccgcactcgcgcgtgaccctgactccccctagtcagctcagcggtgctgccatggcgtggcggcggcgcgaagccagcgtcggggctcgcggcgtgttggctctggcgttgctcgccctggccctgtgcgtgcccggggcccggggccgggctctcgagtggttctcggccgtggtaaacatcgagtacgtggacccgcagaccaacctgacggtgtggagcgtctcggagagtggccgcttcggcgacagctcgcccaaggagggcgcgcatggcctggtgggcgtcccgtgggcgcccggcggagacctcgagggctgcgcgcccgacacgcgcttcttcgtgcccgagcccggcggccgaggggccgcgccctgggtcgccctggtggctcgtgggggctgcaccttcaaggacaaggtgctggtggcggcgcggaggaacgcctcggccgtcgtcctctacaatgaggagcgctacgggaacatcaccttgcccatgtctcacgcgggaacaggaaatatagtggtcattatgattagctatccaaaaggaagagaaattttggagctggtgcaaaaaggaattccagtaacgatgaccataggggttggcacccggcatgtacaggagttcatcagcggtcagtctgtggtgtttgtggccattgccttcatcaccatgatgattatctcgttagcctggctaatattttactatatacagcgtttcctatatactggctctcagattggaagtcagagccatagaaaagaaactaagaaagttattggccagcttctacttcatactgtaaagcatggagaaaagggaattgatgttgatgctgaaaattgtgcagtgtgtattgaaaatttcaaagtaaaggatattattagaattctgccatgcaagcatatttttcatagaatatgcattgacccatggcttttggatcaccgaacatgtccaatgtgtaaacttgatgtcatcaaagccctaggatattggggagagcctggggatgtacaggagatgcctgctccagaatctcctcctggaagggatccagctgcaaatttgagtctagctttaccagatgatgacggaagtgatgagagcagtccaccatcagcctcccctgctgaatctgagccacagtgtgatcccagctttaaaggagatgcaggagaaaatacggcattgctagaagccggcaggagtgactctcggcatggaggacccatctcctagcacacgtgcccactgaagtggcaccaacagaagtttggcttgaactaaaggacattttattttttttactttagcacataatttgtatatttgaaaataatgtatattattttacctattagattctgatttgatatacaaaggactaagatattttcttcttgaagagacttttcgattagtcctcatatatttatctactaaaatagagtgtttaccatgaacagtgtgttgcttcagactattacaaagacaactggggcaggtactctaatataaaggacaggtggtgtttctaaataattggctgctatggttctgtaaaaaccagttaattctatttttcaaggtttttggcaaagcacatcaatgttagactagttgaagtggaattgtataattcaattcgataattgatctcatgggctttccctggaggaaaggttttttttgttgttttttttttaagaacttgaaacttgtaaactgagatgtctgtagcttttttgcccatctgtagtgtatgtgaagatttcaaaacctgagagcactttttctttgtttagaattatgagaaaggcactagatgactttaggatttgcatttttccctttattgcctcatttcttgtgacgccttgttggggagggaaatctgtttattttttcctacaaataaaaagctaagattctatatcgcacatgagcattaagttcttcattgccttgttaaggaaaatgagtaggcagactcagaatctgttatattgatttcagttacaatttaatctttacaattaaaagggcgaaagatgtagaattttagtttttgttgttgactcgaaataaccagttttcttgattagagtttaagcagatttaataccatgaccttgcttaaccgtttcttcttttttacttgcttgctgttcttttgggtcaaaggagcaggctaatgcaaagcttttggagactgctaagtgttaaaaagtgattaaacacacactctgctattttttcacttcttggaggtagaagtcgagtatgaggcagttattttttagagtgtggaattatagtctttccttgctcctagttattctgtatatctttactttgtaggtaaaaataaatgtttatttaaaacaatttttaaaattataaatttatttttatagccatatgtaggatataaagatttatatagattattttctcaagctacttaatgctttaattctagctactcatcatgaaatagtaaacagttttactgaaataaactctacagacagatgcagtatgaggagctattgaagtagaaaatgtatttcgctttgcacactgagttggttttagcagacaacctcaagtaggtttccataacagccattacctttgaaatctaccttctgtagtttattataaataggaaaatacatcctgattctgtagcaagtagattgtttgctctttgtctttaagaaatactaggagggccgggcgcggtggctcacgcctgtaatcccagcactttgggaggccgaggcgggcggatcacgaggtcaggagatcgagaccatcccggctaaaacggtgaaaccccgtctctactaaaaatacaaaaaattagccgggcgtagtggcgggcgcctgtagtcccagctacttgggaggctgaggcaggagaatggcgtgaacccggaaggcagagcttgcagtgagccgagatcccgccactgcactccagcctgggcgacagagcgagactccgtctcaaaaaaa

SEQ ID NO: 315103 - DNA, 2358 bp, Homo sapiens
ttcgtccactccgccaggtgcgcgtgcgcagcggccccgaccccgcctcagtcttccaggcggcggtgggtgtccgcttctctctgctcttcgactgcaccgcactcgcgcgtgaccctgactccccctagtcagctcagcggtgctgccatggcgtggcggcggcgcgaagccagcgtcggggctcgcggcgtgttggctctggcgttgctcgccctggccctgtgcgtgcccggggcccggggccgggctctcgagtggttctcggccgtggtaaacatcgagtacgtggacccgcagaccaacctgacggtgtggagcgtctcggagagtggccgcttcggcgacagctcgcccaaggagggcgcgcatggcctggtgggcgtcccgtgggcgcccggcggagacctcgagggctgcgcgcccgacacgcgcttcttcgtgcccgagcccggcggccgaggggccgcgccctgggtcgccctggtggctcgtgggggctgcaccttcaaggacaaggtgctggtggcggcgcggaggaacgcctcggccgtcgtcctctacaatgaggagcgctacgggaacatcaccttgcccatgtctcacgcgggaacaggaaatatagtggtcattatgattagctatccaaaaggaagagaaattttggagctggtgcaaaaaggaattccagtaacgatgaccataggggttggcacccggcatgtacaggagttcatcagcggtcagtctgtggtgtttgtggccattgccttcatcaccatgatgattatctcgttagcctggctaatattttactatatacagcgtttcctatatactggctctcagattggaagtcagagccatagaaaagaaactaagaaagttattggccagcttctacttcatactgtaaagcatggagaaaagggaattgatgttgatgctgaaaattgtgcagtgtgtattgaaaatttcaaagtaaaggatattattagaattctgccatgcaagcatatttttcatagaatatgcattgacccatggcttttggatcaccgaacatgtccaatgtgtaaacttgatgtcatcaaagccctaggatattggggagagcctggggatgtacaggagatgcctgctccagaatctcctcctggaagggatccagctgcaaatttgagtctagctttaccagatgatgacggaagtgatgagagcagtccaccatcagcctcccctgctgaatctgagccacagtgtgatcccagctttaaaggagatgcaggagaaaatacggcattgctagaagccggcaggagtgactctcggcatggaggacccatctcctagcacacgtgcccactgaagtggcaccaacagaagtttggcttgaactaaaggacattttattttttttactttagcacataatttgtatatttgaaaataatgtatattattttacctattagattctgatttgatatacaaaggactaagatattttcttcttgaagagacttttcgattagtcctcatatatttatctactaaaatagagtgtttaccatgaacagtgtgttgcttcagactattacaaagacaactggggcaggtactctaatataaaggacaggtggtgtttctaaataattggctgctatggttctgtaaaaaccagttaattctatttttcaaggtttttggcaaagcacatcaatgttagactagttgaagtggaattgtataattcaattcgataattgatctcatgggctttccctggaggaaaggttttttttgttgttttttttttaagaacttgaaacttgtaaactgagatgtctgtagcttttttgcccatctgtagtgtatgtgaagatttcaaaacctgagagcactttttctttgtttagaattatgagaaaggcactagatgactttaggatttgcatttttccctttattgcctcatttcttgtgacgccttgttggggagggaaatctgtttattttttcctacaaataaaaagctaagattctatatcaaaaaaaaaaaaaaaaaaacaaaaaaaacaaattgtttggtgggcgggccttgggccctgtgagaaaaggtttttaaacacaattcggttggggcgcgcggggcccgagagtaggcgataggtcgaacagtgggccataagggtgttcctagggaaaccggggcaaaacacatgcgcctgtgatttcacccagataaaaaaaccccgggggggaccccggggctttttggacaaatccaaagaggggttccaaggggcataccggggttctacacacggggttccagagggccgattttatttccag

SEQ ID NO: 315104 - DNA, 3098 bp, Homo sapiens
  misc_feature (7)..(8): n is a, c, g, or t
  misc_feature (15)..(15): n is a, c, g, or t
gcggccnnctactantaaattcgcggccgctcgactattcctagaagttacatttgaccataatcttgattttcgcttatattatttaagtattcaacatgactttttggaagtaactttttaattggactatgttaaattttttgttttgtgggaaattagatacctttaagtctgggttaccttttgcacatttgtttcctgcaggaaccctcttagtcccttgccagacccaaaggagtgatgaatggaagggggggcctctctgtctccatcatggagccgtagtaaagccatttatctctctcagtgacagcaaagagaagggccgtcagagagccagtggcttcccaaggcaggccttttgagcgtccacttatttctgtcattgtggaaagttgactgttctgtcttgaggactaggaagaggcctttaccttttaggtacttgaatagatgagcatgtggtacccctatcctcagcttcttactttcttgacaatatttaagcataagaagtggttgcttcttcagacaaattaaaatcagtactcttggtgaaacacctcttaaagttacatatggctgttctgcatattaagatttgaatggcttttgttgttagggggcttttttatgaagttggtgcaaaagtaatcgcagttttgccattaaaagttattttcagtatagtcatttgactttgcctttcaaatgaaatgttttctgtatgcttatgtgtattatatttgtgacttttaagaaaaatagtgatttaatttaaatttttcaataactgtattaatattttcctacccaagagccatagaaaagaaactaagaaagttattggccagcttctacttcatactgtaaagcatggagaaaagggaattgatgttgatgctgaaaattgtgcagtgtgtattgaaaatttcaaagtaaaggatattattagaattctgccatgcaagcatatttttcatagaatatgcattgacccatggcttttggatcaccgaacatgtccaatgtgtaaacttgatgtcatcaaagccctaggatattggggagagcctggggatgtacaggagatgcctgctccagaatctcctcctggaagggatccagctgcaaatttgagtctagctttaccagatgatgacggaagtgatgagagcagtccaccatcagcctcccctgctgaatctgagccacagtgtgatcccagctttaaaggagatgcaggagaaaatacggcattgctagaagccggcaggagtgactctcggcatggaggacccatctcctagcacacgtgcccactgaagtggcaccaacagaagtttggcttgaactaaaggacattttattttttttactttagcacataatttgtatatttgaaaataatgtatattattttacctattagattctgatttgatatacaaaggactaagatattttcttcttgaagagacttttcgattagtcctcatatatttatctactaaaatagagtgtttaccatgaacagtgtgttgcttcagactattacaaagacaactggggcaggtactctaatataaaggacaggtggtgtttctaaataattggctgctatggttctgtaaaaaccagttaattctatttttcaaggtttttggcaaagcacatcaatgttagactagttgaagtggaattgtataattcaattcgataattgatctcatgggctttccctggaggaaaggttttttttgttgttttttttttaagaacttgaaacttgtaaactgagatgtctgtagcttttttgcccatctgtagtgtatgtgaagatttcaaaacctgagagcactttttctttgtttagaattatgagaaaggcactagatgactttaggatttgcatttttccctttattgcctcatttcttgtgacgccttgttggggagggaaatctgtttattttttcctacaaataaaaagctaagattctatatcgcacatgagcattaagttcttcattgccttgttaaggaaaatgagtaggcagactcagaatctgttatattgatttcagttacaatttaatctttacaattaaaagggcgaaagatgtagaattttagtttttgttgttgactcgaaataaccagttttcttgattagagtttaagcagatttaataccatgaccttgcttaaccgtttcttcttttttacttgcttgctgttcttttgggtcaaaggagcaggctaatgcaaagcttttggagactgctaagtgttaaaaagtgattaaacacacactctgctattttttcacttcttggaggtagaagtcgagtatgaggcagttattttttagagtgtggaattatagtctttccttgctcctagttattctgtatatctttactttgtaggtaaaaataaatgtttatttaaaacaatttttaaaattataaatttatttttatagccatatgtaggatataaagatttatatagattattttctcaagctacttaatgctttaattctagctactcatcatgaaatagtaaacagttttactgaaataaactctacagacagatgcagtatgaggagctattgaagtagaaaatgtatttcgctttgcacactgagttggttttagcagacaacctcaagtaggtttccataacagccattacctttgaaatctaccttctgtagtttattataaataggaaaatacatcctgattctgtagcaagtagattgtttgctctttgtctttaagaaatactaggagggccgggcgcggtggctcacgcctgtaatcccagcactttgggaggccgaggcgggcggatcacgaggtcaggagatcgagaccatcccggctaaaacggtgaaaccccgtctctactaaaaatacaaaaaattagccgggcgtagtggcgggcgcctgtagtcccagctacttgggaggctgaggcaggagaatggcgtgaacccggaaggcagagcttgcagtgagccgagatcccgccactgcactccagcctgggcgacagagcgagactccgtctcaaaaaaa

SEQ ID NO: 315105 - DNA, 3442 bp, Homo sapiens
ttcgtccactccgccaggtgcgcgtgcgcagcggccccgaccccgcctcagtcttccaggcggcggtgggtgtccgcttctctctgctcttcgactgcaccgcactcgcgcgtgaccctgactccccctagtcagctcagcggtgctgccatggcgtggcggcggcgcgaagccagcgtcggggctcgcggcgtgttggctctggcgttgctcgccctggccctgtgcgtgcccggggcccggggccgggctctcgagtggttctcggccgtggtaaacatcgagtacgtggacccgcagaccaacctgacggtgtggagcgtctcggagagtggccgcttcggcgacagctcgcccaaggagggcgcgcatggcctggtgggcgtcccgtgggcgcccggcggagacctcgagggctgcgcgcccgacacgcgcttcttcgtgcccgagcccggcggccgaggggccgcgccctgggtcgccctggtggctcgtgggggctgcaccttcaaggacaaggtgctggtggcggcgcggaggaacgcctcggccgtcgtcctctacaatgaggagcgctacgggaacatcaccttgcccatgtctcacgcgggaacaggaaatatagtggtcattatgattagctatccaaaaggaagagaaattttggagctggtgcaaaaaggaattccagtaacgatgaccataggggttggcacccggcatgtacaggagttcatcagcggtcagtctgtggtgtttgtggccattgccttcatcaccatgatgattatctcgttagcctggctaatattttactatatacagcgtttcctatatactggctctcagattggaagtcagagccatagaaaagaaactaagaaagttattggccagcttctacttcatactgtaaagcatggagaaaagggaattgatgttgatgctgaaaattgtgcagtgtgtattgaaaatttcaaagtaaaggatattattagaattctgccatgcaagcatatttttcatagaatatgcattgacccatggcttttggatcaccgaacatgtccaatgtgtaaacttgatgtcatcaaagccctaggatattggggagagcctggggatgtacaggagatgcctgctccagaatctcctcctggaagggatccagctgcaaatttgagtctagctttaccagatgatgacggaagtgatgagagcagtccaccatcagcctcccctgctgaatctgagccacagtgtgatcccagctttaaaggagatgcaggagaaaatacggcattgctagagctgacttttaaaaagaaggctgtgagctttgcagatgctgctgccgcccagggccccctgcttccagccatggtcaaccccaccatgtttttccacattgctgtcgatggcgagcccttgggctgtgtctccttcgaggtaaggggcctggaaagcaagaagtgactgctcatctaatccataaaactatgttaacagattggagctgtttgcagacaaggttccaaagacagcagaaaatttccatgctctgagcactggagaaaaaggatttggttataagggttcctgctttcacagaattattccagggtttacgtgtcagagtggtgacttcacacgccatacagcattggtggcaagtccatctgcagggagaaatttgatgacaagaacttcatcctgaagcatacgggtcctggcatcttgtccatggcaaatgctggacccagcgtgaacgtttcccagttttttatctgccctgccaagatgccaagacagagtggttggattgcaagcatgtggtctttggcaaggtgaaagatggcatgaatattgtggaggtcatggagcacttggggtccaagaatggcaagatcagcaatcagcaagaagatcaccattgctgactggacaactgcaataaatttgacgggtgtttctcttaaaaaaaaaaaaaatactgtgacagaccaaggtaaattgtttttgataattacagaagtgtgatttcttaatcagcagctgtcaaacatagtgttccttaatttaaaagcttgaacactaaattataaattggagaggttggaataattacggtcatatctctagaaacacaagtctttagtagcaaaaaagaaattagcaagagaagaaaactgttcagtactttgaaaggaaaaagttttcagtgatagtttttttagatgaaaattaacatgataaagaagtgacaggccaggtgtggtggttgacgcttttaacaccaacaatttgggaggccaagatgggaggatctcttgagcccaggaattcaagactagcctaggcaacaaggcaaaactcatctctactaaaaatttaaaaaattagccaggtgtggtggcatctgcctgtagtcccagctgcttgggaagctgaggtgggaggatcgcttgagcccaagaggttgaggctgcagtgagctgtgatcacaccactgtactccagcctgggcaagagtgagaccctgtcaaaaaaaaaaaaaaaaaagaaacaaatattacaagagtttttgctgaaagttttaagttgataagatgcagagaattgggggaatgtataataaatcaggtttcattgttatattatttaccacatgaatcaccttcctcctaaccattataggagccatgtgttcacatgtcatgtggaccagtatttaactgtggaaaccgcgggtggcatggagaaggaggcagtgtccgtgactgtgctgctctccgcagccccctgcctgctgtcctgtttcctcggctcctcggtgtctggactggcgttctgggtttcccagcagaaaactaaagggccagagaggtgtaaaaacacacaccacttggcaggtgatttgaagatattaaagctagaaattggaactagaaaatcaaaagaattcaaggcatcttaacgtgacagttgaactcatttgattatacttaaaaaagtttattgcagttattgactctcaatttttttttttttttttgagtgcagtggtgccattgttgctcactgcagcctcaatcttccaggctcaagaaatcctcccacctcagcttccagagtagctgggactacaggtgcatgccacaccctgataatttttttttccccaatataaacgaggtcttgctatgtcctccagtctggtcttgaactcaagtgatccacccaccttggcctcccaaagtgctgggattacaggcgtgagccaccaaacccagccaccaattttactttaggtaaacttttattttcaagcttttgttggtgttgcaagtgtaaatctgttttataaaatgttctataaatataaccactattccttgtaagctatttaaaataaattttaaagtctttcaagtaaacacca

SEQ ID NO: 315106 - DNA, 3050 bp, Homo sapiens
  misc_feature (3050)..(3050): n is a, c, g, or t
ttcgtccactccgccaggtgcgcgtgcgcagcggccccgaccccgcctcagtcttccaggcggcggtgggtgtccgcttctctctgctcttcgactgcaccgcactcgcgcgtgaccctgactccccctagtcagctcagcggtgctgccatggcgtggcggcggcgcgaagccagcgtcggggctcgcggcgtgttggctctggcgttgctcgccctggccctgtgcgtgcccggggcccggggccgggctctcgagtggttctcggccgtggtaaacatcgagtacgtggacccgcagaccaacctgacggtgtggagcgtctcggagagtggccgcttcggcgacagctcgcccaaggagggcgcgcatggcctggtgggcgtcccgtgggcgcccggcggagacctcgagggctgcgcgcccgacacgcgcttcttcgtgcccgagcccggcggccgaggggccgcgccctgggtcgccctggtggctcgtgggggctgcaccttcaaggacaaggtgctggtggcggcgcggaggaacgcctcggccgtcgtcctctacaatgaggagcgctacgggaacatcaccttgcccatgtctcacgcgggaacaggaaatatagtggtcattatgattagctatccaaaaggaagagaaattttggagctggtgcaaaaaggaattccagtaacgatgaccataggggttggcacccggcatgtacaggagttcatcagcggtcagtctgtggtgtttgtggccattgccttcatcaccatgatgattatctcgttagcctggctaatattttactatatacagcgtttcctatatactggctctcagattggaagtcagagccatagaaaagaaactaagaaagttattggccagcttctacttcatactgtaaagcatggagaaaagggaattgatgttgatgctgaaaattgtgcagtgtgtattgaaaatttcaaagtaaaggatattattagaattctgccatgcaagcatatttttcatagaatatgcattgacccatggcttttggatcaccgaacatgtccaatgtgtaaacttgatgtcatcaaagccctaggatattggggagagcctggggatgtacaggagatgcctgctccagaatctcctcctggaagggatccagctgcaaatttgagtctagctttaccagatgatgacggaagtgatgagagcagtccaccatcagcctcccctgctgaatctgagccacagtgtgatcccagctttaaaggagatgcaggagaaaatacggcattgctagagctgacttttaaaaagaaggctgtgagctttgcagatgctgctgccgcccagggccccctgcttccagccatggtcaaccccaccatgtttttccacattgctgtcgatggcgagcccttgggctgtgtctccttcgaggtaaggggcctggaaagcaagaagtgactgctcatctaatccataaaactatgttaacagattggagctgtttgcagacaaggttccaaagacagcagaaaatttccatgctctgagcactggagaaaaaggatttggttataagggttcctgctttcacagaattattccagggtttacgtgtcagagtggtgacttcacacgccatacagcattggtggcaagtccatctgcagggagaaatttgatgacaagaacttcatcctgaagcatacgggtcctggcatcttgtccatggcaaatgctggacccagcgtgaacgtttcccagttttttatctgccctgccaagatgccaagacagagtggttggattgcaagcatgtggtctttggcaaggtgaaagatggcatgaatattgtggaggtcatggagcacttggggtccaagaatggcaagatcagcaatcagcaagaagatcaccattgctgactggacaactgcaataaatttgacgggtgtttctcttaaaaaaaaaaaaaatactgtgacagaccaaggtaaattgtttttgataattacagaagtgtgatttcttaatcagcagctgtcaaacatagtgttccttaatttaaaagcttgaacactaaattataaattggagaggttggaataattacggtcatatctctagaaacacaagtctttagtagcaaaaaagaaattagcaagagaagaaaactgttcagtactttgaaaggaaaaagttttcagtgatagtttttttagatgaaaattaacatgataaagaagtgacaggccaggtgtggtggttgacgcttttaacaccaacaatttgggaggccaaggtgggaggatcgcttgagcccaagaggttgaggctgcagtgagctgtgatcacaccactgtactccagcctgggcaagagtgagaccctgtcaaaaaaaaaaaaaaaaaagaaacaaatattacaagagtttttgctgaaagttttaagttgataagatgcagagaattgggggaatgtataataaatcaggtttcattgttatattatttaccacatgaatcaccttcctcctaaccattataggagccatgtgttcacatgtcatgtggaccagtatttaactgtggaaaccgcgggtggcatggagaaggaggcagtgtccgtgactgtgctgctctccgcagccccctgcctgctgtcctgtttcctcggctcctcggtgtctggactggcgttctgggtttcccagcagaaaactaaagggccagagaggtgtaaaaacacacaccacttggcaggtgatttgaagatattaaagctagaaattggaactagaaaatcaaaagaattcaaggcatcttaacgtgacagttgaactcatttgattatacttaaaaaagttttcagtgatagtttttttagatgaaaattaacatgataaagaagtgacaggccaggtgtggtggttgacgcttttaacaccaacaatttgggaggccaagatgggaggatctcttgagcccaggaattcaagactagcctaggcaacaaggcaaaacccatcactaagn

SEQ ID NO: 315107 - DNA, 2183 bp, Homo sapiens
agctcggtactccatcaaccctaaatgtattatgaacactgtggtattgcctagagaagtcagtttatatttaggtgaaaaaagaagagtgcccaaatggtcattcacaatgaaatttatttattcaattagagacagtgtctcactctgtcatccaggctggagttgcagtgagccaagatggtgccattgcattccagcctgggcaacaagaacaagactccgtctcaaaaaaaatttttttttctgtttaccatcttgaattatctccaagtgagtaagtgtgtttgcatagttgaagctcggaatatgctgccctcttctgatggagtagcttatgttgctctcttgcagaagccggcaggagtgactctcggcatggaggacccatctcctagcacacgtgcccactgaagtggcaccaacagaagtttggcttgaactaaaggacattttattttttttactttagcacataatttgtatatttgaaaataatgtatattattttacctattagattctgatttgatatacaaaggactaagatattttcttcttgaagagacttttcgattagtcctcatatatttatctactaaaatagagtgtttaccatgaacagtgtgttgcttcagactattacaaagacaactggggcaggtactctaatataaaggacaggtggtgtttctaaataattggctgctatggttctgtaaaaaccagttaattctatttttcaaggtttttggcaaagcacatcaatgttagactagttgaagtggaattgtataattcaattcgataattgatctcatgggctttccctggaggaaaggttttttttgttgttttttttttaagaacttgaaacttgtaaactgagatgtctgtagcttttttgcccatctgtagtgtatgtgaagatttcaaaacctgagagcactttttctttgtttagaattatgagaaaggcactagatgactttaggatttgcatttttccctttattgcctcatttcttgtgacgccttgttggggagggaaatctgtttattttttcctacaaataaaaagctaagattctatatcgcacatgagcattaagttcttcattgccttgttaaggaaaatgagtaggcagactcagaatctgttatattgatttcagttacaatttaatctttacaattaaaagggcgaaagatgtagaattttagtttttgttgttgactcgaaataaccagttttcttgattagagtttaagcagatttaataccatgaccttgcttaaccgtttcttcttttttacttgcttgctgttcttttgggtcaaaggagcaggctaatgcaaagcttttggagactgctaagtgttaaaaagtgattaaacacacactctgctattttttcacttcttggaggtagaagtcgagtatgaggcagttattttttagagtgtggaattatagtctttccttgctcctagttattctgtatatctttactttgtaggtaaaaataaatgtttatttaaaacaatttttaaaattataaatttatttttatagccatatgtaggatataaagatttatatagattattttctcaagctacttaatgctttaattctagctactcatcatgaaatagtaaacagttttactgaaataaactctacagacagatgcagtatgaggagctattgaagtagaaaatgtatttcgctttgcacactgagttggttttagcagacaacctcaagtaggtttccataacagccattacctttgaaatctaccttctgtagtttattataaataggaaaatacatcctgattctgtagcaagtagattgtttgctctttgtctttaagaaatactaggagggccgggcgcggtggctcacgcctgtaatcccagcactttgggaggccgaggcgggcggatcacgaggtcaggagatcgagaccatcccggctaaaacggtgaaaccccgtctctactaaaaatacaaaaaattagccgggcgtagtggcgggcgcctgtagtcccagctacttgggaggctgaggcaggagaatggcgtgaacccggaaggcagagcttgcagtgagccgagatcccgccactgcactccagcctgggcgacagagcgagactccgtctcaaaaaaa

SEQ ID NO: 315108 - DNA, 1659 bp, Homo sapiens
ttcgtccactccgccaggtgcgcgtgcgcagcggccccgaccccgcctcagtcttccaggcggcggtgggtgtccgcttctctctgctcttcgactgcaccgcactcgcgcgtgaccctgactccccctagtcagctcagcggtgctgccatggcgtggcggcggcgcgaagccagcgtcggggctcgcggcgtgttggctctggcgttgctcgccctggccctgtgcgtgcccggggcccggggccgggctctcgagtggttctcggccgtggtaaacatcgagtacgtggacccgcagaccaacctgacggtgtggagcgtctcggagagtggccgcttcggcgacagctcgcccaaggagggcgcgcatggcctggtgggcgtcccgtgggcgcccggcggagacctcgagggctgcgcgcccgacacgcgcttcttcgtgcccgagcccggcggccgaggggccgcgccctgggtcgccctggtggctcgtgggggctgcaccttcaaggacaaggtgctggtggcggcgcggaggaacgcctcggccgtcgtcctctacaatgaggagcgctacgggaacatcaccttgcccatgtctcacgcgggaacaggaaatatagtggtcattatgattagctatccaaaaggaagagaaattttggagctggtgcaaaaaggaattccagtaacgatgaccataggggttggcacccggcatgtacaggagttcatcagcggtcagtctgtggtgtttgtggccattgccttcatcaccatgatgattatctcgttagcctggctaatattttactatatacagcgtttcctatatactggctctcagattggaagtcagagccatagaaaagaaactaagaaagttattggccagcttctacttcatactgtaaagcatggagaaaagggaattgatgttgatgctgaaaattgtgcagtgtgtattgaaaatttcaaagtaaaggatattattagaattctgccatgcaagcatatttttcatagaatatgcattgacccatggcttttggatcaccgaacatgtccaatgtgtaaacttgatgtcatcaaagccctaggatattggggagagcctggggatgtacaggagatgcctgctccagaatctcctcctggaagggatccagctgcaaatttgagtctagctttaccagatgatgacggaagtgatgagagcagtccaccatcagcctcccctgctgaatctgagccacagtgtgatcccagctttaaaggagatgcaggagaaaatacggcattgctaggtgagcggtgtgcaaattataaaacaatagaatgtggccaggagtggtggctcacacctgtaatctcagtgctttgggagtttaaggtgggaggattgctcgagtttgagctatcgaagagtaagtaaccagaaatttgagaacagcctgggcagcatggtgagaccccatctctacaaaaacttcacagattagccaggtatggtggcattctcctgtagtcccagctactcagaatgctgaggcaggagagtggcttgtgaccaagagttcaggctgcagtgagctatgatcctgtcactgtactccagcctgagcctgggtgacagagcaagaccctgtctctttaa

SEQ ID NO: 315109 - DNA, 2038 bp, Homo sapiens
  misc_feature (2038)..(2038): n is a, c, g, or t
attctcttgaacctgggaggcggaggttgcggtgagccgagatcgtgccattgcactccagcctgggcaacaagagcaaaactccatctcaaaaagaaaaaagaaagaaagaaatgctaggggaaaatgttttaactagtcattcttcccagtagctaatgaagctgacttttaaaaagaaggctgtgagctttgcagatgctgctgccgcccagggccccctgcttccagccatggtcaaccccaccatgtttttccacattgctgtcgatggcgagcccttgggctgtgtctccttcgaggtaaggggcctggaaagcaagaagtgactgctcatctaatccataaaactatgttaacagattggagctgtttgcagacaaggttccaaagacagcagaaaatttccatgctctgagcactggagaaaaaggatttggttataagggttcctgctttcacagaattattccagggtttacgtgtcagagtggtgacttcacacgccatacagcattggtggcaagtccatctgcagggagaaatttgatgacaagaacttcatcctgaagcatacgggtcctggcatcttgtccatggcaaatgctggacccagcgtgaacgtttcccagttttttatctgccctgccaagatgccaagacagagtggttggattgcaagcatgtggtctttggcaaggtgaaagatggcatgaatattgtggaggtcatggagcacttggggtccaagaatggcaagatcagcaatcagcaagaagatcaccattgctgactggacaactgcaataaatttgacgggtgtttctcttaaaaaaaaaaaaaatactgtgacagaccaaggtaaattgtttttgataattacagaagtgtgatttcttaatcagcagctgtcaaacatagtgttccttaatttaaaagcttgaacactaaattataaattggagaggttggaataattacggtcatatctctagaaacacaagtctttagtagcaaaaaagaaattagcaagagaagaaaactgttcagtactttgaaaggaaaaagttttcagtgatagtttttttagatgaaaattaacatgataaagaagtgacaggccaggtgtggtggttgacgcttttaacaccaacaatttgggaggccaagatgggaggatctcttgagcccaggaattcaagactagcctaggcaacaaggcaaaactcatctctactaaaaatttaaaaaattagccaggtgtggtggcatctgcctgtagtcccagctgcttgggaagctgaggtgggaggatcgcttgagcccaagaggttgaggctgcagtgagctgtgatcacaccactgtactccagcctgggcaagagtgagaccctgtcaaaaaaaaaaaaaaaaaagaaacaaatattacaagagtttttgctgaaagttttaagttgataagatgcagagaattgggggaatgtataataaatcaggtttcattgttatattatttaccacatgaatcaccttcctcctaaccattataggagccatgtgttcacatgtcatgtggaccagtatttaactgtggaaaccgcgggtggcatggagaaggaggcagtgtccgtgactgtgctgctctccgcagccccctgcctgctgtcctgtttcctcggctcctcggtgtctggactggcgttctgggtttcccagcagaaaactaaagggccagagaggtgtaaaaacacacaccacttggcaggtgatttgaagatattaaagctagaaattggaactagaaaatcaaaagaattcaaggcatcttaacgtgacagttgaactcatttgattatacttaaaaaagttttcagtgatagtttttttagatgaaaattaacatgataaagaagtgacaggccaggtgtggtggttgacgcttttaacaccaacaatttgggaggccaagatgggaggatctcttgagcccaggaattcaagactagcctaggcaacaaggcaaaacccatcactaagn

SEQ ID NO: 315110 - DNA, 2013 bp, Homo sapiens
ttcgtccactccgccaggtgcgcgtgcgcagcggccccgaccccgcctcagtcttccaggcggcggtgggtgtccgcttctctctgctcttcgactgcaccgcactcgcgcgtgaccctgactccccctagtcagctcagcggtgctgccatggcgtggcggcggcgcgaagccagcgtcggggctcgcggcgtgttggctctggcgttgctcgccctggccctgtgcgtgcccggggcccggggccgggctctcgagtggttctcggccgtggtaaacatcgagtacgtggacccgcagaccaacctgacggtgtggagcgtctcggagagtggccgcttcggcgacagctcgcccaaggagggcgcgcatggcctggtgggcgtcccgtgggcgcccggcggagacctcgagggctgcgcgcccgacacgcgcttcttcgtgcccgagcccggcggccgaggggccgcgccctgggtcgccctggtggctcgtgggggctgcaccttcaaggacaaggtgctggtggcggcgcggaggaacgcctcggccgtcgtcctctacaatgaggagcgctacgggaacatcaccttgcccatgtctcacgcgggaacaggaaatatagtggtcattatgattagctatccaaaaggaagagaaattttggagctggtgcaaaaaggaattccagtaacgatgaccataggggttggcacccggcatgtacaggagttcatcagcggtcagtctgtggtgtttgtggccattgccttcatcaccatgatgattatctcgttagcctggctaatattttactatatacagcgtttcctatatactggctctcagattggaagtcaggtaatgacggataactctgaattttgctttttaaaagataattcataaatatgccgcatatatattcctagaagttacatttgaccataatcttgattttcgcttatattatttaagtattcaacatgactttttggaagtaactttttaattggactatgttaaattttttgttttgtgggaaattagatacctttaagtctgggttaccttttgcacatttgtttcctgcaggaaccctcttagtcccttgccagacccaaaggagtgatgaatggaagggggggcctctctgtctccatcatggagccgtagtaaagccatttatctctctcagtgacagcaaagagaagggccgtcagagagccagtggcttcccaaggcaggccttttgagcgtccacttatttctgtcattgtggaaagttgactgttctgtcttgaggactaggaagaggcctttaccttttaggtacttgaatagatgagcatgtggtacccctatcctcagcttcttactttcttgacaatatttaagcataagaagtggttgcttcttcagacaaattaaaatcagtactcttggtgaaacacctcttaaagttacatatggctgttctgcatattaagatttgaatggcttttgttgttagggggcttttttatgaagttggtgcaaaagtaatcgcagttttgccattaaaagttattttcagtatagtcatttgactttgcctttcaaatgaaatgttttctgtatgcttatgtgtattatatttgtgacttttaagaaaaatagtgatttaatttaaatttttcaataactgtattaatattttcctacccaagagccatagaaaagaaactaagaaagttattggccagcttctacttcatactgtaaagcatggagaaaagggaattgatgttgatgctgaaaattgtgcagtgtgtattgaaaatttcaaagtaaaggatattattagaattctgccatgcaagtatgttctttttacatattgagatgttaaaaattacttgacaagttttaggtgtctgacaaaatagttatttgttttttatgataatgaagatcttgtaatttgtgatcatctcttctttttagaaaagcagcttggattttaaatataat

SEQ ID NO: 315111 - DNA, 1984 bp, Homo sapiens
  misc_feature (1984)..(1984): n is a, c, g, or t
attctcttgaacctgggaggcggaggttgcggtgagccgagatcgtgccattgcactccagcctgggcaacaagagcaaaactccatctcaaaaagaaaaaagaaagaaagaaatgctaggggaaaatgttttaactagtcattcttcccagtagctaatgaagctgacttttaaaaagaaggctgtgagctttgcagatgctgctgccgcccagggccccctgcttccagccatggtcaaccccaccatgtttttccacattgctgtcgatggcgagcccttgggctgtgtctccttcgaggtaaggggcctggaaagcaagaagtgactgctcatctaatccataaaactatgttaacagattggagctgtttgcagacaaggttccaaagacagcagaaaatttccatgctctgagcactggagagtgtcagagtggtgacttcacacgccatacagcattggtggcaagtccatctgcagggagaaatttgatgacaagaacttcatcctgaagcatacgggtcctggcatcttgtccatggcaaatgctggacccagcgtgaacgtttcccagttttttatctgccctgccaagatgccaagacagagtggttggattgcaagcatgtggtctttggcaaggtgaaagatggcatgaatattgtggaggtcatggagcacttggggtccaagaatggcaagatcagcaatcagcaagaagatcaccattgctgactggacaactgcaataaatttgacgggtgtttctcttaaaaaaaaaaaaaatactgtgacagaccaaggtaaattgtttttgataattacagaagtgtgatttcttaatcagcagctgtcaaacatagtgttccttaatttaaaagcttgaacactaaattataaattggagaggttggaataattacggtcatatctctagaaacacaagtctttagtagcaaaaaagaaattagcaagagaagaaaactgttcagtactttgaaaggaaaaagttttcagtgatagtttttttagatgaaaattaacatgataaagaagtgacaggccaggtgtggtggttgacgcttttaacaccaacaatttgggaggccaagatgggaggatctcttgagcccaggaattcaagactagcctaggcaacaaggcaaaactcatctctactaaaaatttaaaaaattagccaggtgtggtggcatctgcctgtagtcccagctgcttgggaagctgaggtgggaggatcgcttgagcccaagaggttgaggctgcagtgagctgtgatcacaccactgtactccagcctgggcaagagtgagaccctgtcaaaaaaaaaaaaaaaaaagaaacaaatattacaagagtttttgctgaaagttttaagttgataagatgcagagaattgggggaatgtataataaatcaggtttcattgttatattatttaccacatgaatcaccttcctcctaaccattataggagccatgtgttcacatgtcatgtggaccagtatttaactgtggaaaccgcgggtggcatggagaaggaggcagtgtccgtgactgtgctgctctccgcagccccctgcctgctgtcctgtttcctcggctcctcggtgtctggactggcgttctgggtttcccagcagaaaactaaagggccagagaggtgtaaaaacacacaccacttggcaggtgatttgaagatattaaagctagaaattggaactagaaaatcaaaagaattcaaggcatcttaacgtgacagttgaactcatttgattatacttaaaaaagttttcagtgatagtttttttagatgaaaattaacatgataaagaagtgacaggccaggtgtggtggttgacgcttttaacaccaacaatttgggaggccaagatgggaggatctcttgagcccaggaattcaagactagcctaggcaacaaggcaaaacccatcactaagn

SEQ ID NO: 315112 - DNA, 1302 bp, Homo sapiens
tacaacaacccaggtacttaagttttaaaagttttttttaaaacacttgtcaccatattttgaaaaatactaacatttggattactagttataaaagtgtaatttctactgtgtcataatcagccatgcagctggagacttgccctctttgtacagcaaagttgtgaaaaaaagtatttgcactacatttatttaaacattaggaaaaaaagccaacccatgcttttctttgccgagatgtagggctgtattattggctagtgagaagcctgggaacactaggactttgtgtgggctgattgcaggtatcagatccgggattatacaggtactgttggaagtatcttggggattttcctgataagaacagtagtgattgcataaaaaggacaggatgtaaagtgaaatcagtaaaatatcttagtagacagagggtgctgaaattttaacaaatgtgtaaaaagttcttcctatgcattaattttccagatacccttaaaatgtttaaggaatgtaattcaaaatactgtttaaaagagacatgtgaccatcattctcccagcgaatgtgaatcatttagtgtgctactcaaaattaggtgtaaatgtatatgtacactataagaataaaaatcgataccatttctttaaagctttctaaaataaacttaattatttctaatagttacattttaggctctcaaactatttttcttttgaaataactgctttctaccctaagatgttactcattgctgtcttctttttaacaggtgatttgaagatattaaagctagaaattggaactagaaaatcaaaagaattcaaggcatcttaacgtgacagttgaactcatttgattatacttaaaaaagtttattgcagttattgactctcaatttttttttttttttttgagtgcagtggtgccattgttgctcactgcagcctcaatcttccaggctcaagaaatcctcccacctcagcttccagagtagctgggactacaggtgcatgccacaccctgataatttttttttccccaatataaacgaggtcttgctatgtcctccagtctggtcttgaactcaagtgatccacccaccttggcctcccaaagtgctgggattacaggcgtgagccaccaaacccagccaccaattttactttaggtaaacttttattttcaagcttttgttggtgttgcaagtgtaaatctgttttataaaatgttctataaatataaccactattccttgtaagctatttaaaataaattttaaagtctttcaagtaaacacca

SEQ ID NO: 315113 - DNA, 333 bp, Homo sapiens
attgatgtgctttttgccagattcattgtacagaagtacgtaatattgtgtgtgaattacgagccagatgatacataagctttgatcatgttttaagctttgatcatgttttttcttctgttctaattctcaagggagagcctggggatgtacaggagatgcctgctccagaatctcctcctggaagggatccagctgcaaatttgagtctagctttaccagatgatgacggaagtgatgagagcagtccaccatcagcctcccctgctgaatctgagccacagtgtgatcccagctttaaaggagatgcaggagaaaatacggcattgctag

SEQ ID NO: 315114 - DNA, 731 bp, Homo sapiens
aacatggtgaaacctcatctctactaaaaatgcaaaaagtagctgaatgtggtggcgggtgcctgtaatcccagctacccaggaggctgaggcaggagaatcgcttgaacccgggaggctggagttgcagtgagccaagatggtgccattgcattccagcctgggcaacaagaacaagactccgtctcaaaaaaaatttttttttctgtttaccatcttgaattatctccaagtgagtaagtgtgtttgcatagttgaagctcggaatatgctgccctcttctgatggagtagcttatgttgctctcttgcagaagccggcaggagtgactctcggcatggaggacccatctcctagcacacgtgcccactgaagtggcaccaacagaagtttggcttgaactaaaggacattttattttttttactttagcacataatttgtatatttgaaaataatgtatattattttacctattagattctgatttgatatacaaaggactaagatattttcttcttgaagagacttttcgattagtcctcatatatttatctactaaaatagagtgtttaccatgaacagtgtgttgcttcagactattacaaagacaactggggcaggtactctaatataaaggacaggtggtgtttctaaataattggctgctatggttctgtaaaaaccagttaattctatttttcaaggtttttggcaaagcacatcaatgtt

SEQ ID NO: 315115 - DNA, 231 bp, Homo sapiens
agaacttgaaacttgtaaactgagatgtctgtagcttttttgcccatctgtagtgtatgtgaagatttcaaaacctgagagcactttttctttgtttagaattatgagaaaggcactagatgactttaggatttgcatttttccctttattgcctcatttcttgtgacgccttgttggggagggaaatctgtttattttttcctacaaataaaaagctaagattctatatc

SEQ ID NO: 315116 - DNA, 584 bp, Homo sapiens
  misc_feature (7)..(8): n is a, c, g, or t
  misc_feature (15)..(15): n is a, c, g, or t
gcggccnnctactantaaattcgcggccgctcgacggagagcctggggatgtacaggagatgcctgctccagaatctcctcctggaagggatccagctgcaaatttgagtctagctttaccagatgatgacggaagtgatgagagcagtccaccatcagcctcccctgctgaatctgagccacagtgtgatcccagctttaaaggagatgcaggagaaaatacggcattgctaggtgagcggtgtgcaaattataaaacaatagaatgtggccaggagtggtggctcacacctgtaatctcagtgctttgggagtttaaggtgggaggattgctcgagtttgagctatcgaagagtaagtaaccagaaatttgagaacagcctgggcagcatggtgagaccccatctctacaaaaacttcacagattagccaggtatggtggcattctcctgtagtcccagctactcagaatgctgaggcaggagagtggcttgtgaccaagagttcaggctgcagtgagctatgatcctgtcactgtactccagcctgagcctgggtgacagagcaagaccctgtctctttaa

SEQ ID NO: 315117 - DNA, 2051 bp, Homo sapiens
ttcgtccactccgccaggtgcgcgtgcgcagcggccccgaccccgcctcagtcttccaggcggcggtgggtgtccgcttctctctgctcttcgactgcaccgcactcgcgcgtgaccctgactccccctagtcagctcagcggtgctgccatggcgtggcggcggcgcgaagccagcgtcggggctcgcggcgtgttggctctggcgttgctcgccctggccctgtgcgtgcccggggcccggggccgggctctcgagtggttctcggccgtggtaaacatcgagtacgtggacccgcagaccaacctgacggtgtggagcgtctcggagagtggccgcttcggcgacagctcgcccaaggagggcgcgcatggcctggtgggcgtcccgtgggcgcccggcggagacctcgagggctgcgcgcccgacacgcgcttcttcgtgcccgagcccggcggccgaggggccgcgccctgggtcgccctggtggctcgtgggggctgcaccttcaaggacaaggtgctggtggcggcgcggaggaacgcctcggccgtcgtcctctacaatgaggagcgctacgggaacatcaccttgcccatgtctcacgcgggaacaggaaatatagtggtcattatgattagctatccaaaaggaagagaaattttggagctggtgcaaaaaggaattccagtaacgatgaccataggggttggcacccggcatgtacaggagttcatcagcggtcagtctgtggtgtttgtggccattgccttcatcaccatgatgattatctcgttagcctggctaatattttactatatacagcgtttcctatatactggctctcagattggaagtcagagccatagaaaagaaactaagaaagttattggccagcttctacttcatactgtaaagcatggagaaaagggaattgatgttgatgctgaaaattgtgcagtgtgtattgaaaatttcaaagtaaaggatattattagaattctgccatgcaagcatatttttcatagaatatgcattgacccatggcttttggatcaccgaacatgtccaatgtgtaaacttgatgtcatcaaagccctaggatattggggagagcctggggatgtacaggagatgcctgctccagaatctcctcctggaagggatccagctgcaaatttgagtctagctttaccagatgatgacggaagtgatgagagcagtccaccatcagcctcccctgctgaatctgagccacagtgtgatcccagctttaaaggagatgcaggagaaaatacggcattgctagaagccggcaggagtgactctcggcatggaggacccatctcctagcacacgtgcccactgaagtggcaccaacagaagtttggcttgaactaaaggacattttattttttttactttagcacataatttgtatatttgaaaataatgtatattattttacctattagattctgatttgatatacaaaggactaagatattttcttcttgaagagacttttcgattagtcctcatatatttatctactaaaatagagtgtttaccatgaacagtgtgttgcttcagactattacaaagacaactggggcaggtactctaatataaaggacaggtggtgtttctaaataattggctgctatggttctgtaaaaaccagttaattctatttttcaaggtttttggcaaagcacatcaatgttagactagttgaagtggaattgtataattcaattcgataattgatctcatgggctttccctggaggaaaggttttttttgttgttttttttttaagaacttgaaacttgtaaactgagatgtctgtagcttttttgcccatctgtagtgtatgtgaagatttcaaaacctgagagcactttttctttgtttagaattatgagaaaggcactagatgactttaggatttgcatttttccctttattgcctcatttcttgtgacgccttgttggggagggaaatctgtttattttttcctacaaataaaaagctaagattctatatc

SEQ ID NO: 315118 - DNA, 3986 bp, Homo sapiens
ttcgtccactccgccaggtgcgcgtgcgcagcggccccgaccccgcctcagtcttccaggcggcggtgggtgtccgcttctctctgctcttcgactgcaccgcactcgcgcgtgaccctgactccccctagtcagctcagcggtgctgccatggcgtggcggcggcgcgaagccagcgtcggggctcgcggcgtgttggctctggcgttgctcgccctggccctgtgcgtgcccggggcccggggccgggctctcgagtggttctcggccgtggtaaacatcgagtacgtggacccgcagaccaacctgacggtgtggagcgtctcggagagtggccgcttcggcgacagctcgcccaaggagggcgcgcatggcctggtgggcgtcccgtgggcgcccggcggagacctcgagggctgcgcgcccgacacgcgcttcttcgtgcccgagcccggcggccgaggggccgcgccctgggtcgccctggtggctcgtgggggctgcaccttcaaggacaaggtgctggtggcggcgcggaggaacgcctcggccgtcgtcctctacaatgaggagcgctacgggaacatcaccttgcccatgtctcacgcgggaacaggaaatatagtggtcattatgattagctatccaaaaggaagagaaattttggagctggtgcaaaaaggaattccagtaacgatgaccataggggttggcacccggcatgtacaggagttcatcagcggtcagtctgtggtgtttgtggccattgccttcatcaccatgatgattatctcgttagcctggctaatattttactatatacagcgtttcctatatactggctctcagattggaagtcaggtaatgacggataactctgaattttgctttttaaaagataattcataaatatgccgcatatatattcctagaagttacatttgaccataatcttgattttcgcttatattatttaagtattcaacatgactttttggaagtaactttttaattggactatgttaaattttttgttttgtgggaaattagatacctttaagtctgggttaccttttgcacatttgtttcctgcaggaaccctcttagtcccttgccagacccaaaggagtgatgaatggaagggggggcctctctgtctccatcatggagccgtagtaaagccatttatctctctcagtgacagcaaagagaagggccgtcagagagccagtggcttcccaaggcaggccttttgagcgtccacttatttctgtcattgtggaaagttgactgttctgtcttgaggactaggaagaggcctttaccttttaggtacttgaatagatgagcatgtggtacccctatcctcagcttcttactttcttgacaatatttaagcataagaagtggttgcttcttcagacaaattaaaatcagtactcttggtgaaacacctcttaaagttacatatggctgttctgcatattaagatttgaatggcttttgttgttagggggcttttttatgaagttggtgcaaaagtaatcgcagttttgccattaaaagttattttcagtatagtcatttgactttgcctttcaaatgaaatgttttctgtatgcttatgtgtattatatttgtgacttttaagaaaaatagtgatttaatttaaatttttcaataactgtattaatattttcctacccaagagccatagaaaagaaactaagaaagttattggccagcttctacttcatactgtaaagcatggagaaaagggaattgatgttgatgctgaaaattgtgcagtgtgtattgaaaatttcaaagtaaaggatattattagaattctgccatgcaagcatatttttcatagaatatgcattgacccatggcttttggatcaccgaacatgtccaatgtgtaaacttgatgtcatcaaagccctaggatattggggagagcctggggatgtacaggagatgcctgctccagaatctcctcctggaagggatccagctgcaaatttgagtctagctttaccagatgatgacggaagtgatgagagcagtccaccatcagcctcccctgctgaatctgagccacagtgtgatcccagctttaaaggagatgcaggagaaaatacggcattgctagaagccggcaggagtgactctcggcatggaggacccatctcctagcacacgtgcccactgaagtggcaccaacagaagtttggcttgaactaaaggacattttattttttttactttagcacataatttgtatatttgaaaataatgtatattattttacctattagattctgatttgatatacaaaggactaagatattttcttcttgaagagacttttcgattagtcctcatatatttatctactaaaatagagtgtttaccatgaacagtgtgttgcttcagactattacaaagacaactggggcaggtactctaatataaaggacaggtggtgtttctaaataattggctgctatggttctgtaaaaaccagttaattctatttttcaaggtttttggcaaagcacatcaatgttagactagttgaagtggaattgtataattcaattcgataattgatctcatgggctttccctggaggaaaggttttttttgttgttttttttttaagaacttgaaacttgtaaactgagatgtctgtagcttttttgcccatctgtagtgtatgtgaagatttcaaaacctgagagcactttttctttgtttagaattatgagaaaggcactagatgactttaggatttgcatttttccctttattgcctcatttcttgtgacgccttgttggggagggaaatctgtttattttttcctacaaataaaaagctaagattctatatcgcacatgagcattaagttcttcattgccttgttaaggaaaatgagtaggcagactcagaatctgttatattgatttcagttacaatttaatctttacaattaaaagggcgaaagatgtagaattttagtttttgttgttgactcgaaataaccagttttcttgattagagtttaagcagatttaataccatgaccttgcttaaccgtttcttcttttttacttgcttgctgttcttttgggtcaaaggagcaggctaatgcaaagcttttggagactgctaagtgttaaaaagtgattaaacacacactctgctattttttcacttcttggaggtagaagtcgagtatgaggcagttattttttagagtgtggaattatagtctttccttgctcctagttattctgtatatctttactttgtaggtaaaaataaatgtttatttaaaacaatttttaaaattataaatttatttttatagccatatgtaggatataaagatttatatagattattttctcaagctacttaatgctttaattctagctactcatcatgaaatagtaaacagttttactgaaataaactctacagacagatgcagtatgaggagctattgaagtagaaaatgtatttcgctttgcacactgagttggttttagcagacaacctcaagtaggtttccataacagccattacctttgaaatctaccttctgtagtttattataaataggaaaatacatcctgattctgtagcaagtagattgtttgctctttgtctttaagaaatactaggagggccgggcgcggtggctcacgcctgtaatcccagcactttgggaggccgaggcgggcggatcacgaggtcaggagatcgagaccatcccggctaaaacggtgaaaccccgtctctactaaaaatacaaaaaattagccgggcgtagtggcgggcgcctgtagtcccagctacttgggaggctgaggcaggagaatggcgtgaacccggaaggcagagcttgcagtgagccgagatcccgccactgcactccagcctgggcgacagagcgagactccgtctcaaaaaaa

SEQ ID NO: 315119 - DNA, 3185 bp, Homo sapiens
  misc_feature (3185)..(3185): n is a, c, g, or t
ttcgtccactccgccaggtgcgcgtgcgcagcggccccgaccccgcctcagtcttccaggcggcggtgggtgtccgcttctctctgctcttcgactgcaccgcactcgcgcgtgaccctgactccccctagtcagctcagcggtgctgccatggcgtggcggcggcgcgaagccagcgtcggggctcgcggcgtgttggctctggcgttgctcgccctggccctgtgcgtgcccggggcccggggccgggctctcgagtggttctcggccgtggtaaacatcgagtacgtggacccgcagaccaacctgacggtgtggagcgtctcggagagtggccgcttcggcgacagctcgcccaaggagggcgcgcatggcctggtgggcgtcccgtgggcgcccggcggagacctcgagggctgcgcgcccgacacgcgcttcttcgtgcccgagcccggcggccgaggggccgcgccctgggtcgccctggtggctcgtgggggctgcaccttcaaggacaaggtgctggtggcggcgcggaggaacgcctcggccgtcgtcctctacaatgaggagcgctacgggaacatcaccttgcccatgtctcacgcgggaacaggaaatatagtggtcattatgattagctatccaaaaggaagagaaattttggagctggtgcaaaaaggaattccagtaacgatgaccataggggttggcacccggcatgtacaggagttcatcagcggtcagtctgtggtgtttgtggccattgccttcatcaccatgatgattatctcgttagcctggctaatattttactatatacagcgtttcctatatactggctctcagattggaagtcagagccatagaaaagaaactaagaaagttattggccagcttctacttcatactgtaaagcatggagaaaagggaattgatgttgatgctgaaaattgtgcagtgtgtattgaaaatttcaaagtaaaggatattattagaattctgccatgcaagcatatttttcatagaatatgcattgacccatggcttttggatcaccgaacatgtccaatgtgtaaacttgatgtcatcaaagccctaggatattggggagagcctggggatgtacaggagatgcctgctccagaatctcctcctggaagggatccagctgcaaatttgagtctagctttaccagatgatgacggaagtgatgagagcagtccaccatcagcctcccctgctgaatctgagccacagtgtgatcccagctttaaaggagatgcaggagaaaatacggcattgctagagctgacttttaaaaagaaggctgtgagctttgcagatgctgctgccgcccagggccccctgcttccagccatggtcaaccccaccatgtttttccacattgctgtcgatggcgagcccttgggctgtgtctccttcgaggtaaggggcctggaaagcaagaagtgactgctcatctaatccataaaactatgttaacagattggagctgtttgcagacaaggttccaaagacagcagaaaatttccatgctctgagcactggagaaaaaggatttggttataagggttcctgctttcacagaattattccagggtttacgtgtcagagtggtgacttcacacgccatacagcattggtggcaagtccatctgcagggagaaatttgatgacaagaacttcatcctgaagcatacgggtcctggcatcttgtccatggcaaatgctggacccagcgtgaacgtttcccagttttttatctgccctgccaagatgccaagacagagtggttggattgcaagcatgtggtctttggcaaggtgaaagatggcatgaatattgtggaggtcatggagcacttggggtccaagaatggcaagatcagcaatcagcaagaagatcaccattgctgactggacaactgcaataaatttgacgggtgtttctcttaaaaaaaaaaaaaatactgtgacagaccaaggtaaattgtttttgataattacagaagtgtgatttcttaatcagcagctgtcaaacatagtgttccttaatttaaaagcttgaacactaaattataaattggagaggttggaataattacggtcatatctctagaaacacaagtctttagtagcaaaaaagaaattagcaagagaagaaaactgttcagtactttgaaaggaaaaagttttcagtgatagtttttttagatgaaaattaacatgataaagaagtgacaggccaggtgtggtggttgacgcttttaacaccaacaatttgggaggccaagatgggaggatctcttgagcccaggaattcaagactagcctaggcaacaaggcaaaactcatctctactaaaaatttaaaaaattagccaggtgtggtggcatctgcctgtagtcccagctgcttgggaagctgaggtgggaggatcgcttgagcccaagaggttgaggctgcagtgagctgtgatcacaccactgtactccagcctgggcaagagtgagaccctgtcaaaaaaaaaaaaaaaaaagaaacaaatattacaagagtttttgctgaaagttttaagttgataagatgcagagaattgggggaatgtataataaatcaggtttcattgttatattatttaccacatgaatcaccttcctcctaaccattataggagccatgtgttcacatgtcatgtggaccagtatttaactgtggaaaccgcgggtggcatggagaaggaggcagtgtccgtgactgtgctgctctccgcagccccctgcctgctgtcctgtttcctcggctcctcggtgtctggactggcgttctgggtttcccagcagaaaactaaagggccagagaggtgtaaaaacacacaccacttggcaggtgatttgaagatattaaagctagaaattggaactagaaaatcaaaagaattcaaggcatcttaacgtgacagttgaactcatttgattatacttaaaaaagttttcagtgatagtttttttagatgaaaattaacatgataaagaagtgacaggccaggtgtggtggttgacgcttttaacaccaacaatttgggaggccaagatgggaggatctcttgagcccaggaattcaagactagcctaggcaacaaggcaaaacccatcactaagn

SEQ ID NO: 315120 - DNA, 3456 bp, Homo sapiens
ttcgtccactccgccaggtgcgcgtgcgcagcggccccgaccccgcctcagtcttccaggcggcggtgggtgtccgcttctctctgctcttcgactgcaccgcactcgcgcgtgaccctgactccccctagtcagctcagcggtgctgccatggcgtggcggcggcgcgaagccagcgtcggggctcgcggcgtgttggctctggcgttgctcgccctggccctgtgcgtgcccggggcccggggccgggctctcgagtggttctcggccgtggtaaacatcgagtacgtggacccgcagaccaacctgacggtgtggagcgtctcggagagtggccgcttcggcgacagctcgcccaaggagggcgcgcatggcctggtgggcgtcccgtgggcgcccggcggagacctcgagggctgcgcgcccgacacgcgcttcttcgtgcccgagcccggcggccgaggggccgcgccctgggtcgccctggtggctcgtgggggctgcaccttcaaggacaaggtgctggtggcggcgcggaggaacgcctcggccgtcgtcctctacaatgaggagcgctacgggaacatcaccttgcccatgtctcacgcgggaacaggaaatatagtggtcattatgattagctatccaaaaggaagagaaattttggagctggtgcaaaaaggaattccagtaacgatgaccataggggttggcacccggcatgtacaggagttcatcagcggtcagtctgtggtgtttgtggccattgccttcatcaccatgatgattatctcgttagcctggctaatattttactatatacagcgtttcctatatactggctctcagattggaagtcagagccatagaaaagaaactaagaaagttattggccagcttctacttcatactgtaaagcatggagaaaagggaattgatgttgatgctgaaaattgtgcagtgtgtattgaaaatttcaaagtaaaggatattattagaattctgccatgcaagcatatttttcatagaatatgcattgacccatggcttttggatcaccgaacatgtccaatgtgtaaacttgatgtcatcaaagccctaggatattggggagagcctggggatgtacaggagatgcctgctccagaatctcctcctggaagggatccagctgcaaatttgagtctagctttaccagatgatgacggaagtgatgagagcagtccaccatcagcctcccctgctgaatctgagccacagtgtgatcccagctttaaaggagatgcaggagaaaatacggcattgctagagctgacttttaaaaagaaggctgtgagctttgcagatgctgctgccgcccagggccccctgcttccagccatggtcaaccccaccatgtttttccacattgctgtcgatggcgagcccttgggctgtgtctccttcgaggtaaggggcctggaaagcaagaagtgactgctcatctaatccataaaactatgttaacagattggagctgtttgcagacaaggttccaaagacagcagaaaatttccatgctctgagcactggagaaaaaggatttggttataagggttcctgctttcacagaattattccagggtttacgtgtcagagtggtgacttcacacgccatacagcattggtggcaagtccatctgcagggagaaatttgatgacaagaacttcatcctgaagcatacgggtcctggcatcttgtccatggcaaatgctggacccagcgtgaacgtttcccagttttttatctgccctgccaagatgccaagacagagtggttggattgcaagcatgtggtctttggcaaggtgaaagatggcatgaatattgtggaggtcatggagcacttggggtccaagaatggcaagatcagcaatcagcaagaagatcaccattgctgactggacaactgcaataaatttgacgggtgtttctcttaaaaaaaaaaaaaatactgtgacagaccaaggtaaattgtttttgataattacagaagtgtgatttcttaatcagcagctgtcaaacatagtgttccttaatttaaaagcttgaacactaaattataaattggagaggttggaataattacggtcatatctctagaaacacaagtctttagtagcaaaaaagaaattagcaagagaagaaaactgttcagtactttgaaaggaaaaagttttcagtgatagtttttttagatgaaaattaacatgataaagaagtgacaggccaggtgtggtggttgacgcttttaacaccaacaatttgggaggccaagatgggaggatctcttgagcccaggaattcaagactagcctaggcaacaaggcaaaactcatctctactaaaaatttaaaaaattagccaggtgtggtggcatctgcctgtagtcccagctgcttgggaagctgaggtgggaggatcgcttgagcccaagaggttgaggctgcagtgagctgtgatcacaccactgtactccagcctgggcaagagtgagaccctgtcaaaaaaaaaaaaaaaaaagaaacaaatattacaagagtttttgctgaaagttttaagttgataagatgcagagaattgggggaatgtataataaatcaggtttcattgttatattatttaccacatgaatcaccttcctcctaaccattataggagccatgtgttcacatgtcatgtggaccagtatttaactgtggaaaccgcgggtggcatggagaaggaggcagtgtccgtgactgtgctgctctccgcagccccctgcctgctgtcctgtttcctcggctcctcggtgtctggactggcgttctgggtttcccagcagaaaactaaagggccagagaggtgtaaaaacacacaccacttggcaggtaataatttccccgcatgctatctttttagggatcctgaacacacagcctttcccagaagactgctccctccagctactgaggaatgatgacaagaaaaggccgaattgcagtgtctccatcagcagtttgctctccatgggcacacgatgacaaaatatcctgaagcgaaccactagtctgacctcagtagcaggattggaagcttcatgccatgggagctgtcaagaaaggcatcccaaagagaactgaaatttaaaaataataatagaccttcaggaataggtgattgtccccatatactggggatgaaatacccaatgtaaccaaattccccagtaagatcacttagtttggcaatagtcttttcttttgagcatgttgaagtttatttgctcaatgaaggctgaaattataagtcagtatatatgtattactaagtagaacttgaggtaattatatgttttagtcaaaagcagtttctgtgggcttggtataaaccctactttgtgatttgctaaagcacaggatgttgactcaaacc

SEQ ID NO: 315121 - DNA, 2211 bp, Homo sapiens
ttcgtccactccgccaggtgcgcgtgcgcagcggccccgaccccgcctcagtcttccaggcggcggtgggtgtccgcttctctctgctcttcgactgcaccgcactcgcgcgtgaccctgactccccctagtcagctcagcggtgctgccatggcgtggcggcggcgcgaagccagcgtcggggctcgcggcgtgttggctctggcgttgctcgccctggccctgtgcgtgcccggggcccggggccgggctctcgagtggttctcggccgtggtaaacatcgagtacgtggacccgcagaccaacctgacggtgtggagcgtctcggagagtggccgcttcggcgacagctcgcccaaggagggcgcgcatggcctggtgggcgtcccgtgggcgcccggcggagacctcgagggctgcgcgcccgacacgcgcttcttcgtgcccgagcccggcggccgaggggccgcgccctgggtcgccctggtggctcgtgggggctgcaccttcaaggacaaggtgctggtggcggcgcggaggaacgcctcggccgtcgtcctctacaatgaggagcgctacgggaacatcaccttgcccatgtctcacgcgggaacaggaaatatagtggtcattatgattagctatccaaaaggaagagaaattttggagctggtgcaaaaaggaattccagtaacgatgaccataggggttggcacccggcatgtacaggagttcatcagcggtcagtctgtggtgtttgtggccattgccttcatcaccatgatgattatctcgttagcctggctaatattttactatatacagcgtttcctatatactggctctcagattggaagtcaggtaatgacggataactctgaattttgctttttaaaagataattcataaatatgccgcatatatattcctagaagttacatttgaccataatcttgattttcgcttatattatttaagtattcaacatgactttttggaagtaactttttaattggactatgttaaattttttgttttgtgggaaattagatacctttaagtctgggttaccttttgcacatttgtttcctgcaggaaccctcttagtcccttgccagacccaaaggagtgatgaatggaagggggggcctctctgtctccatcatggagccgtagtaaagccatttatctctctcagtgacagcaaagagaagggccgtcagagagccagtggcttcccaaggcaggccttttgagcgtccacttatttctgtcattgtggaaagttgactgttctgtcttgaggactaggaagaggcctttaccttttaggtacttgaatagatgagcatgtggtacccctatcctcagcttcttactttcttgacaatatttaagcataagaagtggttgcttcttcagacaaattaaaatcagtactcttggtgaaacacctcttaaagttacatatggctgttctgcatattaagatttgaatggcttttgttgttagggggcttttttatgaagttggtgcaaaagtaatcgcagttttgccattaaaagttattttcagtatagtcatttgactttgcctttcaaatgaaatgttttctgtatgcttatgtgtattatatttgtgacttttaagaaaaatagtgatttaatttaaatttttcaataactgtattaatattttcctacccaagagccatagaaaagaaactaagaaagttattggccagcttctacttcatactgtaaagcatggagaaaaggtaatattttcatggtttttcttttgttttgtggtttagagtagagaatatgctgtacgtgtttattttaaagaaggatgggcagaaatattttgtcattgagaagggccttctagacctgcattaatatggtagccactagtcgcatatagcaatttgcatttaaatgaatttaatttaaaattgagcccctcactggtgacacttcaagcactttgggagccacagtggctggttgctgccctcctggacagctcttacattcccagcagtgacgaaagtggtactggttagaaccagataactataaagacatacagtcttcacagacccttgatagcttcagttcatttctgttaaatctgagactatgtgtccactcccttggagtcctttagttacagggagaaaatgttggcatttctggaggggg

SEQ ID NO: 315122 - DNA, 230 bp, Homo sapiens
tgctcaaaattcatccctgtgtgacctcaagtaagccacataactttgtgatcctgcagtttcatcatatttaacaggaaaaaacttgacagattttcattctgccacagaatgtcaggtctcccagacaccagaaaatacattgacttaaaaagcctttgatacatctcaaagcagtatccctacgcagtatagttggaagatggtgggcgctgtagagagggatgctt

SEQ ID NO: 315123 - DNA, 3140 bp, Homo sapiens
ctatgtgctgggccctgtgttcactcccagaaatgcaaaggtcagcaattctcatggttaaggacctcacactcatgtaggagagacaggcctattatgatgaactataatgcaataagagccaaacatcctagagaaagtcactttgcttctctgagccaccttttctcaactctaaggtgtgagcagcgttgggtatatttagttatgatggtacttgtagatgctcacatttccagttccaaactcgcccgtactttttatgtgcttcaaaatattggacacatttctgcttaatatatgatttctgtatccacaaaccgctgtttgctatgctgagtcaatttagaagttaatttccaatctagtctcaactgcaatgcatttaaaataggtaaaacaagtaaatgagtttgggacattttgagattaatgttactgcccacttgactgtcaatttcaaatggctcctaatgcaaccaaaattataaccaatgtagcatgtgtaggaaaggtatttttaattatttaaaatcattgtgtatattacagcagtatgaggaatgcctggctaaagaggattttttaaaagatgaagaatggttttgcttgtattatataggcttactgagtttgtgagcagcataaaaacaatcattccttaattcttcattgtggaactgaaatatttctgtaatgcattttttaaaaggagactcctagacacagctgtaatagtgggaatagaaatgtagagcttttctcataacacaaaaccagaaaataattttcagcactttgacttactctatgtaataaggaaaaaaattgtttccacaaagttgaactatgtagtaatatttggtaacatatggcatggccactttatatcacagaatgtgtgtcaagttgcaaagcatacttgggccatagtagacactaagaattaaaactcttaaatcagtgaaacaaaaactaatgggcagcattctctctgtttggaatgggatcagtatacaattaatacaatttaattttacacattccctaagacaccatttttaagttacagtcacatgagtgtttgtataaatttaagtcaatgcttttagcctaggcaaagctaaatacaaggtttttggggttttcttttttcagctttattattgaagtattacaaacttaacatcagataccaatgtgtaaaaagtactattgggtccttaagggctctatcagggagttgaaatttcatacgctttaccaggttacttgtaaaaaatgaacagctgtaagacatttcaaaaccattgcagacacattgttaaaatgcagccatttgataatgaaagcagaaaccttaagttttacctaattattgcactaaatgtaaatgataacataaaattaagtgtgcattttaaacagattctatttcccacttactgcttagcatagaaaaagagctatggttagaggagtgaccagcaagatttatttcagatggaaaaggggtgagaaagtggaagcaccttactgttagagcatgttgcatctatttagtgctactgaacaattcagtagttatttctgaactttgctgcaaagtgctctttagttaaagcacattaagaagggtcactgcttaattgctttgtaaaatgaagcaatggtattttttatccgatatagtgtaatttaaaagttttcctacaaagtgagtttatattgttgcctaaactatgttatgtaagcaaagggtttggaaaggcgggagggagtctagattcggcgagagtgtgcgtttgtgtgtgtgaatgtatgaaaagtttccccattgggttattcttaagatgtgtttattgtaaagttttctacgttttgcccacagtaaatgtacaacttcgcaattgtaggatttaattgattgaattccaaatttatactgtctcttcccttctgcagagacattatgccactgtaaggtgcatgtacagaaaatacctctgaggttgacttgttaaataactgatgaatgttatttcacactgaatctcaaagcagtcatttgttttgcgggttaggggaaagttttgttttttgctggtgttttttgttgtttttaattaggcacactaagagtggctaaatttgggggaattggtggataggaaagaccttgaaaagtgatgtgtagatgaaaacacaaggtatggatgttggttacagagttcagttttaacaagggaaatttggggatttttttttttttacttgcatgttctatgggtagctatcaaagggtgtaacaaattattccagcttttcccaatactaattatattggttttaaaaagtctgcataatcactaggtggcattttcccttcatttgtgaaccaagaggggtaaatgatgctacccatacagtgacttctgagttctttaactttgacagaatctccattgtttcattgaatttctcattgtattatatgtctttccaagtgtgcaaactataatatgtagttaatgaaaaatggaaggctgcagattattttgcatgaataattaattgcccattagggctaaggagactgacatgatttttatcggttctgggtaaatgaaaattttaatggaaaactcattcaccatttactagctttgtgcaatattataaaaggtagaagcaaaacactagcacattgtgctttgcttggcttgtaaggatggctttagtaccattacattaaatggacagtgtgcacagtgtattgtaaatgccaactcttgcaaatttacaatacttaaatatgttcaattaacatcctaaagtattaaaagtacagaggaaaaactaagcaagcatttatagcaataccatgaaatctccagtaatcgttttgactgttgccttttgctctttagtgcagcttttctgcattgtaattgtattgctttgtatttcatgttttttacactcatgacttcagagttaagtacttgtacaccaagtattgcaatcacctttctcttgttgtacatgcaatgtaacaacctacagttttggtgcttttaacaatattcctctttttctttaataaaggatatttatttgaattaaaaaaaaactgattt

SEQ ID NO: 315124 - DNA, 2521 bp, Homo sapiens
gagtttgcggggtggtacagaagcgatagcacgattggatcagttagaagctgattattatgatctgcaacttcagttgtatgaagtacagtttgaaatcttgaagtgtgaagagttactattgacagcgcaactagaaagcatcaaaagacttatatcagaaaataattttcagcactttgacttactctatgtaataaggaaaaaaattgtttccacaaagttgaactatgtagtaatatttggtaacatatggcatggccactttatatcacagaatgtgtgtcaagttgcaaagcatacttgggccatagtagacactaagaattaaaactcttaaatcagtgaaacaaaaactaatgggcagcattctctctgtttggaatgggatcagtatacaattaatacaatttaattttacacattccctaagacaccatttttaagttacagtcacatgagtgtttgtataaatttaagtcaatgcttttagcctaggcaaagctaaatacaaggtttttggggttttcttttttcagctttattattgaagtattacaaacttaacatcagataccaatgtgtaaaaagtactattgggtccttaagggctctatcagggagttgaaatttcatacgctttaccaggttacttgtaaaaaatgaacagctgtaagacatttcaaaaccattgcagacacattgttaaaatgcagccatttgataatgaaagcagaaaccttaagttttacctaattattgcactaaatgtaaatgataacataaaattaagtgtgcattttaaacagattctatttcccacttactgcttagcatagaaaaagagctatggttagaggagtgaccagcaagatttatttcagatggaaaaggggtgagaaagtggaagcaccttactgttagagcatgttgcatctatttagtgctactgaacaattcagtagttatttctgaactttgctgcaaagtgctctttagttaaagcacattaagaagggtcactgcttaattgctttgtaaaatgaagcaatggtattttttatccgatatagtgtaatttaaaagttttcctacaaagtgagtttatattgttgcctaaactatgttatgtaagcaaagggtttggaaaggcgggagggagtctagattcggcgagagtgtgcgtttgtgtgtgtgaatgtatgaaaagtttccccattgggttattcttaagatgtgtttattgtaaagttttctacgttttgcccacagtaaatgtacaacttcgcaattgtaggatttaattgattgaattccaaatttatactgtctcttcccttctgcagagacattatgccactgtaaggtgcatgtacagaaaatacctctgaggttgacttgttaaataactgatgaatgttatttcacactgaatctcaaagcagtcatttgttttgcgggttaggggaaagttttgttttttgctggtgttttttgttgtttttaattaggcacactaagagtggctaaatttgggggaattggtggataggaaagaccttgaaaagtgatgtgtagatgaaaacacaaggtatggatgttggttacagagttcagttttaacaagggaaatttggggatttttttttttttacttgcatgttctatgggtagctatcaaagggtgtaacaaattattccagcttttcccaatactaattatattggttttaaaaagtctgcataatcactaggtggcattttcccttcatttgtgaaccaagaggggtaaatgatgctacccatacagtgacttctgagttctttaactttgacagaatctccattgtttcattgaatttctcattgtattatatgtctttccaagtgtgcaaactataatatgtagttaatgaaaaatggaaggctgcagattattttgcatgaataattaattgcccattagggctaaggagactgacatgatttttatcggttctgggtaaatgaaaattttaatggaaaactcattcaccatttactagctttgtgcaatattataaaaggtagaagcaaaacactagcacattgtgctttgcttggcttgtaaggatggctttagtaccattacattaaatggacagtgtgcacagtgtattgtaaatgccaactcttgcaaatttacaatacttaaatatgttcaattaacatcctaaagtattaaaagtacagaggaaaaactaagcaagcatttatagcaataccatgaaatctccagtaatcgttttgactgttgccttttgctctttagtgcagcttttctgcattgtaattgtattgctttgtatttcatgttttttacactcatgacttcagagttaagtacttgtacaccaagtattgcaatcacctttctcttgttgtacatgcaatgtaacaacctacagttttggtgcttttaacaatattcctctttttctttaataaaggatatttatttgaattaaaaaaaaactgattt

SEQ ID NO: 315125 - DNA, 3087 bp, Homo sapiens
ctatgtgctgggccctgtgttcactcccagaaatgcaaaggtcagcaattctcatggttaaggacctcacactcatgtaggagagacaggcctattatgatgaactataatgcaataagagccaaacatcctagagaaagtcactttgcttctctgagccaccttttctcaactctaaggtgtgagcagcgttgggtatatttagttatgatggtacttgtagatgctcacatttccagttccaaactcgcccgtactttttatgtgcttcaaaatattggacacatttctgcttaatatatgatttctgtatccacaaaccgctgtttgctatgctgagtcaatttagaagttaatttccaatctagtctcaactgcaatgcatttaaaataggtaaaacaagtaaatgagtttgggacattttgagattaatgttactgcccacttgactgtcaatttcaaatggctcctaatgcaaccaaaattataaccaatgtagcatgtgtaggaaaggtatttttaattatttaaaatcattgtgtatattacagcagtatgaggaatgcctggctaaagaggattttttaaaagatgaagaatggttttgcttgtattatataggcttactgagtttgtgagcagcataaaaacaatcattccttaattcttcattgtggaactgaaatatttctgtaatgcattttttaaaaggagactcctagacacagctgtaatagtgggaatagaaatgtagagcttttctcataacacaaaaccagaaaataattttcagcactttgacttactctatgtaataaggaaaaaaattgtttccacaaagttgaactatgtagtaatatttggtaacatatggcatggccactttatatcacagaatgtgtgtcaagttgcaaagcatacttgggccatagtagacactaagaattaaaactcttaaatcagtgaaacaaaaactaatgggcagcattctctctgtttggaatgggatcagtatacaattaatacaatttaattttacacattccctaagacaccatttttaagttacagtcacatgagtgtttgtataaatttaagtcaatgcttttagcctaggcaaagctaaatacaaggtttttggggttttcttttttcagctttattattgaagtattacaaacttaacatcagataccaatgtgtaaaaagtactattgggtccttaagggctctatcagggagttgaaatttcatacgctttaccaggttacttgtaaaaaatgaacagctgtaagacatttcaaaaccattgcagacacattgttaaaatgcagccatttgataatgaaagcagaaaccttaagttttacctaattattgcactaaatgtaaatgataacataaaattaagtgtgcattttaaacagattctatttcccacttactgcttagcatagaaaaagagctatggttagaggagtgaccagcaagatttatttcagatggaaaaggggtgagaaagtggaagcaccttactgttagagcatgttgcatctatttagtgctactgaacaattcagtagttatttctgaactttgctgcaaagtgctctttagttaaagcacattaagaagggtcactgcttaattgctttgtaaaatgaagcaatggtattttttatccgatatagtgtaatttaaaagttttcctacaaagtgagtttatattgttgcctaaactatgttatgtaagcaaagggtttggaaaggcgggagggagtctagattcggcgagagtgtgcgtttgtgtgtgtgaatgtatgagttttgcccacagtaaatgtacaacttcgcaattgtaggatttaattgattgaattccaaatttatactgtctcttcccttctgcagagacattatgccactgtaaggtgcatgtacagaaaatacctctgaggttgacttgttaaataactgatgaatgttatttcacactgaatctcaaagcagtcatttgttttgcgggttaggggaaagttttgttttttgctggtgttttttgttgtttttaattaggcacactaagagtggctaaatttgggggaattggtggataggaaagaccttgaaaagtgatgtgtagatgaaaacacaaggtatggatgttggttacagagttcagttttaacaagggaaatttggggatttttttttttttacttgcatgttctatgggtagctatcaaagggtgtaacaaattattccagcttttcccaatactaattatattggttttaaaaagtctgcataatcactaggtggcattttcccttcatttgtgaaccaagaggggtaaatgatgctacccatacagtgacttctgagttctttaactttgacagaatctccattgtttcattgaatttctcattgtattatatgtctttccaagtgtgcaaactataatatgtagttaatgaaaaatggaaggctgcagattattttgcatgaataattaattgcccattagggctaaggagactgacatgatttttatcggttctgggtaaatgaaaattttaatggaaaactcattcaccatttactagctttgtgcaatattataaaaggtagaagcaaaacactagcacattgtgctttgcttggcttgtaaggatggctttagtaccattacattaaatggacagtgtgcacagtgtattgtaaatgccaactcttgcaaatttacaatacttaaatatgttcaattaacatcctaaagtattaaaagtacagaggaaaaactaagcaagcatttatagcaataccatgaaatctccagtaatcgttttgactgttgccttttgctctttagtgcagcttttctgcattgtaattgtattgctttgtatttcatgttttttacactcatgacttcagagttaagtacttgtacaccaagtattgcaatcacctttctcttgttgtacatgcaatgtaacaacctacagttttggtgcttttaacaatattcctctttttctttaataaaggatatttatttgaattaaaaaaaaactgattt

SEQ ID NO: 315126 - DNA, 1225 bp, Homo sapiens
  misc_feature (1129)..(1129): n is a, c, g, or t
  misc_feature (1141)..(1141): n is a, c, g, or t
  misc_feature (1159)..(1159): n is a, c, g, or t
  misc_feature (1199)..(1199): n is a, c, g, or t
  misc_feature (1207)..(1207): n is a, c, g, or t
  misc_feature (1224)..(1224): n is a, c, g, or t
ctatgtgctgggccctgtgttcactcccagaaatgcaaaggtcagcaattctcatggttaaggacctcacactcatgtaggagagacaggcctattatgatgaactataatgcaataagagccaaacatcctagagaaagtcactttgcttctctgagccaccttttctcaactctaaggtgtgagcagcgttgggtatatttagttatgatggtacttgtagatgctcacatttccagttccaaactcgcccgtactttttatgtgcttcaaaatattggacacatttctgcttaatatatgatttctgtatccacaaaccgctgtttgctatgctgagtcaatttagaagttaatttccaatctagtctcaactgcaatgcatttaaaataggtaaaacaagtaaatgagtttgggacattttgagattaatgttactgcccacttgactgtcaatttcaaatggctcctaatgcaaccaaaattataaccaatgtagcatgtgtaggaaaggtatttttaattatttaaaatcattgtgtatattacagcagtatgaggaatgcctggctaaagaggattttttaaaagatgaagaatggttttgcttgtattatataggcttactgagtttgtgagcagcataaaaacaatcattccttaattcttcattgtggaactgaaatatttctgtaatgcattttttaaaaggagactcctagacacagctgtaatagtgggaatagaaatgtagagcttttctcataacacaaaaccagaaaataattttcagcactttgacttactctatgtaataaggaaaaaaattgtttccacaaagttgaactatgtagtaatatttggtaacatatggcatggccactttatatcacagaatgtgtgtcaagttgcaaagcatacttgggccatagtagacactaagaattaaaactcttaaatcagtgaaacaaaaactaatgggcagcattctctctgtttggaatgggatcagtatacaattaatacaatttaattttacacattccctaagacaccatttttaagttacagtcacatgagtgtttgtataaatttaagtcaatgcttttagccctaaggccaaaagcnttaaataccaangggtttttttgggggggnttttctttttttttcaaaccttttttttttttcgaaagtnttttaccnaaacctttaaccttccng

SEQ ID NO: 315127 - DNA, 350 bp, Homo sapiens
gagtttgcggggtggtacagaagcgatagcacgattggatcagttagaagctgattattatgatctgcaacttcagttgtatgaagtacagtttgaaatcttgaagtgtgaagagttactattgacagcgcaactagaaagcatcaaaagacttatatcagaaaaaagagatgaagtggtatactatgacacttacgaaagcatggaggccatgctggagaaggaagagatggcagcatctgcgtacttacagagagaagagctgcagaaacttcagcagaaagcacgccagctggaagcaagacgtggacgggtttctgccaagaaatcctacctcagaaataaaaagg

SEQ ID NO: 315128 - DNA, 1772 bp, Homo sapiens
attttgacctttttcgcaacgggtttgccgccagaacacaggtgtcgtgaaaactacccctaaaagccaaaatgggaaaggaaaagactcatatcaacattgtcgtcattggacacgtagattcgggcaagtccaccactactggccatctgatctataaatgcggtggcatcgacaaaagaaccattgaaaaatttgagaaggaggctgctgagatgggaaagggctccttcaagtatgcctgggtcttggataaactgaaagctgagcgtgaacgtggtatcaccattgatatctccttgtggaaatttgagaccagcaagtactatgtgactatcattgatgccccaggacacagagactttatcaaaaacatgattacagggacatctcaggctgactgtgctgtcctgattgttgctgctggtgttggtgaatttgaagctggtatctccaagaatgggcagacccgagagcatgcccttctggcttacacactgggtgtgaaacaactaattgtcggtgttaacaaaatggattccactgagccaccctacagccagaagagatatgaggaaatgttaaggaagtcagcacttacattaagaaaatggctacaaccccgacacagtagcatttgtgccaatttctggttggaatggtgacaacatgctggagccaagtgctaacatgccttggttcaagggatggaaagtcacccgtaaggatggcaatgccagtggaaccacgctgcttgaggctctggactgcatcctaccaccaactcgtccaactgacaagcccttgcgcctgcctctccaggatgtctacaaaattggtggtattggtactgttcctgttggccgagtggagactggtgttctcaaacccggtatggtggtcacctttgctccagtcaacgttacaacggaagtaaaatctgtcgaaatgcaccatgaagctttgagtgaagctcttcctggggacaatgtgggcttcaatgtcaagaatgtgtctgtcaaggatgttcgtcgtggcaacgttgctggtgacagcaaaaatgacccaccaatggaagcagctggcttcactgctcaggtgattatcctgaaccatccaggccaaataagcgccggctatgcccctgtattggattgccacacggctcacattgcatgcaagtttgctgagctgaaggaaaagattgatcgccgttctggtaaaaagctggaagatggccctaaattcttgaagtctggtgatgctgccattgttgatatggttcctggcaagcccatgtgtgttgagagcttctcagactatccacctttgggtcgctttgctgttcgtgatatgagacagacagttgcggtgggtgtcatcaaagcagtggacaagaaggctgctggagctggcaaggtcaccaagtctgcccagaaagctcagaaggctaaatgaatattatccctaatacctgccaccccactcttaatcagtggtggaagaacggtctcagaactgtttgtttcaattggccatttaagtttagtagtaaaagactggttaatgataacaatgcatcgtaaaaccttcagaaggaaaggagaatgttttgtggaccactttggttttcttttttgcgtgtggcagttttaagttattagtttttaaaatcagtactttttaatggaaacaacttgaccaaaaatttgtcacagaattttgagacccattaaaaaagttaaatgagaaaaaaaaaaaaaaaaacaaaa

SEQ ID NO: 315129 - DNA, 1726 bp, Homo sapiens
attttgacctttttcgcaacgggtttgccgccagaacacaggtgtcgtgaaaactacccctaaaagccaaaatgggaaaggaaaagactcatatcaacattgtcgtcattggacacgtagattcgggcaagtccaccactactggccatctgatctataaatgcggtggcatcgacaaaagaaccattgaaaaatttgagaaggaggctgctgagatgggaaagggctccttcaagtatgcctgggtcttggataaactgaaagctgagcgtgaacgtggtatcaccattgatatctccttgtggaaatttgagaccagcaagtactatgtgactaagggacatctcaggctgactgtgctgtcctgattgttgctgctggtgttggtgaatttgaagctggtatctccaagaatgggcagacccgagagcatgcccttctggcttacacactgggtgtgaaacaactaattgtcggtgttaacaaaatggattccactgagccaccctacagccagaagagatatgaggaaatgttaaggaagtcagcacttacattaagaaaatggctacaaccccgacacagtagcatttgtgccaatttctggttggaatggtgacaacatgctggagccaagtgctaacatgccttggttcaagggatggaaagtcacccgtaaggatggcaatgccagtggaaccacgctgcttgaggctctggactgcatcctaccaccaactcgtccaactgacaagcccttgcgcctgcctctccaggatgtctacaaaattggtggtattggtactgttcctgttggccgagtggagactggtgttctcaaacccggtatggtggtcacctttgctccagtcaacgttacaacggaagtaaaatctgtcgaaatgcaccatgaagctttgagtgaagctcttcctggggacaatgtgggcttcaatgtcaagaatgtgtctgtcaaggatgttcgtcgtggcaacgttgctggtgacagcaaaaatgacccaccaatggaagcagctggcttcactgctcaggtgattatcctgaaccatccaggccaaataagcgccggctatgcccctgtattggattgccacacggctcacattgcatgcaagtttgctgagctgaaggaaaagattgatcgccgttctggtaaaaagctggaagatggccctaaattcttgaagtctggtgatgctgccattgttgatatggttcctggcaagcccatgtgtgttgagagcttctcagactatccacctttgggtcgctttgctgttcgtgatatgagacagacagttgcggtgggtgtcatcaaagcagtggacaagaaggctgctggagctggcaaggtcaccaagtctgcccagaaagctcagaaggctaaatgaatattatccctaatacctgccaccccactcttaatcagtggtggaagaacggtctcagaactgtttgtttcaattggccatttaagtttagtagtaaaagactggttaatgataacaatgcatcgtaaaaccttcagaaggaaaggagaatgttttgtggaccactttggttttcttttttgcgtgtggcagttttaagttattagtttttaaaatcagtactttttaatggaaacaacttgaccaaaaatttgtcacagaattttgagacccattaaaaaagttaaatgagaaaaaaaaaaaaaaaaacaaaa

SEQ ID NO: 315130 - DNA, 1074 bp, Homo sapiens
attttgacctttttcgcaacgggtttgccgccagaacacaggtgtcgtgaaaactacccctaaaagccaaaatgggaaaggaaaagactcatatcaacattgtcgtcattggacacgtagattcggtgtctacaaaattggtggtattggtactgttcctgttggccgagtggagactggtgttctcaaacccggtatggtggtcacctttgctccagtcaacgttacaacggaagtaaaatctgtcgaaatgcaccatgaagctttgagtgaagctcttcctggggacaatgtgggcttcaatgtcaagaatgtgtctgtcaaggatgttcgtcgtggcaacgttgctggtgacagcaaaaatgacccaccaatggaagcagctggcttcactgctcaggtgattatcctgaaccatccaggccaaataagcgccggctatgcccctgtattggattgccacacggctcacattgcatgcaagtttgctgagctgaaggaaaagattgatcgccgttctggtaaaaagctggaagatggccctaaattcttgaagtctggtgatgctgccattgttgatatggttcctggcaagcccatgtgtgttgagagcttctcagactatccacctttgggtcgctttgctgttcgtgatatgagacagacagttgcggtgggtgtcatcaaagcagtggacaagaaggctgctggagctggcaaggtcaccaagtctgcccagaaagctcagaaggctaaatgaatattatccctaatacctgccaccccactcttaatcagtggtggaagaacggtctcagaactgtttgtttcaattggccatttaagtttagtagtaaaagactggttaatgataacaatgcatcgtaaaaccttcagaaggaaaggagaatgttttgtggaccactttggttttcttttttgcgtgtggcagttttaagttattagtttttaaaatcagtactttttaatggaaacaacttgaccaaaaatttgtcacagaattttgagacccattaaaaaagttaaatgagaaaaaaaaaaaaaaaaacaaaa

SEQ ID NO: 315131 - DNA, 1284 bp, Homo sapiens
attttgacctttttcgcaacgggtttgccgccagaacacaggtgtcgtgaaaactacccctaaaagccaaaatgggaaaggaaaagactcatatcaacattgtcgtcattggacacgtagattcgggcaagtccaccactactggccatctgatctataaatgcggtggcatcgacaaaagaaccattgaaaaatttgagaaggaggctgctgagatgggaaagggctccttcaagtatgcctgggtcttggataaactgaaagctgagcgtgaacgtggtatcaccattgatatctccttgtggaaatttgagaccagcaagtactatgtgactatgtctacaaaattggtggtattggtactgttcctgttggccgagtggagactggtgttctcaaacccggtatggtggtcacctttgctccagtcaacgttacaacggaagtaaaatctgtcgaaatgcaccatgaagctttgagtgaagctcttcctggggacaatgtgggcttcaatgtcaagaatgtgtctgtcaaggatgttcgtcgtggcaacgttgctggtgacagcaaaaatgacccaccaatggaagcagctggcttcactgctcaggtgattatcctgaaccatccaggccaaataagcgccggctatgcccctgtattggattgccacacggctcacattgcatgcaagtttgctgagctgaaggaaaagattgatcgccgttctggtaaaaagctggaagatggccctaaattcttgaagtctggtgatgctgccattgttgatatggttcctggcaagcccatgtgtgttgagagcttctcagactatccacctttgggtcgctttgctgttcgtgatatgagacagacagttgcggtgggtgtcatcaaagcagtggacaagaaggctgctggagctggcaaggtcaccaagtctgcccagaaagctcagaaggctaaatgaatattatccctaatacctgccaccccactcttaatcagtggtggaagaacggtctcagaactgtttgtttcaattggccatttaagtttagtagtaaaagactggttaatgataacaatgcatcgtaaaaccttcagaaggaaaggagaatgttttgtggaccactttggttttcttttttgcgtgtggcagttttaagttattagtttttaaaatcagtactttttaatggaaacaacttgaccaaaaatttgtcacagaattttgagacccattaaaaaagttaaatgagaaaaaaaaaaaaaaaaacaaaa

SEQ ID NO: 315132 - DNA, 2690 bp, Homo sapiens
cggacgcgtgggtcgcccacgcgtcgccagaacacaggtgtcgtgaaaactacccctaaaagccaaaatgggaaaggaaaagactcatatcaacattgtcgtcattggacacgtagattcgggcaagtccaccactactggccatctgatctataaatgcggtggcatcgacaaaagaaccattgaaaaatttgagaaggaggctgctgagatgggaaagggctccttcaagtatgcctgggtcttggataaactgaaagctgagcgtgaacgtggtatcaccattgatatctccttgtggaaatttgagaccagcaagtactatgtgactatcattgatgccccaggacacagagactttatcaaaaacatgattacagggacatctcaggctgactgtgctgtcctgattgttgctgctggtgttggtgaatttgaagctggtatctccaagaatgggcagacccgagagcatgcccttctggcttacacactgggtgtgaaacaactaattgtcggtgttaacaaaatggattccactgagccaccctacagccagaagagatatgaggaaatgttaaggaagtcagcacttacattaagaaaatggctacaaccccgacacagtagcatttgtgccaatttctggttggaatggtgacaacatgctggagccaagtgctaacatgccttggttcaagggatggaaagtcacccgtaaggatggcaatgccagtggaaccacgctgcttgaggctctggactgcatcctaccaccaactcgtccaactgacaagcccttgcgcctgcctctccaggatgtctacaaaattggtggtattggtactgttcctgttggccgagtggagactggtgttctcaaacccggtatggtggtcacctttgctccagtcaacgttacaacggaagtaaaatctgtcgaaatgcaccatgaagctttgagtgaagctcttcctggggacaatgtgggcttcaatgtcaagaatgtgtctgtcaaggatgttcgtcgtggcaacgttgctggtgacagcaaaaatgacccaccaatggaagcagctggcttcactgctcaggtgattatcctgaaccatccaggccaaataagcgccggctatgcccctgtattggattgccacacggctcacattgcatgcaagtttgctgagctgaaggaaaagattgatcgccgttctggtaaaaagctggaagatggccctaaattcttgaagtctggtgatgctgccattgttgatatggttcctggcaagcccatgtgtgttgagagcttctcagactatccacctttgggtcgctttgctgttcgtgatatgagacagacagttgcggtgggtgtcatcaaagcagtggacaagaaggctgctggagctggcaaggtcaccaagtctgcccagaaagctcagaaggctaaatgaatattatccctaatacctgccaccccactcttaatcagtggtggaagaacggtctcagaactgtttgtttcaattggccatttaagtttagtagtaaaagactggttaatgataacaatgcatcgtaaaaccttcagaaggaaaggagaatgttttgtggaccactttggttttcttttttgcgtgtggcagttttaagttattagtttttaaaatcagtactttttaatggaaacaacttgaccaaaaatttgtcacagaattttgagacccattaaaaaagttaaatgagaaaaaaaaaaaaaaaaacaaaaaaaaaaaaaaaaaaaaaaaaacaaaaaataaaaaaaaaaaacaaaaaaaaaaacaaaaaaacaaaaaaaaacaaaaaaaacaaaaaaacaaaacaacaaacaccagagcgagggggggggcggaggccgccccagaacgacactcactccggggacggacgcacgacaccgacggcagcccgactgtacgtgagcatggggcggcgccgccagaaaggaaggagacattacagagagacgggacggggacgtgacacaaacaacaaaacaacagagcaatgggcagggagacagaaaccaacgacgacacaggtaccaaacactacatagaaagacacaccacaacacaacagcgtggggggcggaagaaaaacaaaggacgccacaaccacaccacaggaagaaacataggcaaacaaaggaaggacaaaaaacaaaaaaaacagagagcaggactgtagggcaacacaaccagagagaaacaacggaggacagaacgaaaaagccaccagccggcaagccaacaacaataaaaaacaacacacacacagcgggaagggcggaataaaagccagcaaagacccgcaacaacgtgacgatggctaaggagaacgcagaaacaaagaagcccagcaagaggaagaggaaggagggacagcgaagagcaaaaggaaagaagaaagaagaaacagacgacggtaagaacaagagagcgagcagacaagagcagcgagaggagcgagaaggcgagagagaaaagaacagagcgggcgcggagagcggcacgcggagcgagaaagggggagggaggcggaggggagagaaaaaggcagagagaggcgagagaggcgagaagacaagaggcgacgaggaagagagggagataggcagaacaaacaaagccggagaaggagaaacagag

SEQ ID NO: 315133 - DNA, 1768 bp, Homo sapiens
cggacgcgtgggtcgcccacgcgtcgccagaacacaggtgtcgtgaaaactacccctaaaagccaaaatgggaaaggaaaagactcatatcaacattgtcgtcattggacacgtagattcgggcaagtccaccactactggccatctgatctataaatgcggtggcatcgacaaaagaaccattgaaaaatttgagaaggaggctgctgagatgggaaagggctccttcaagtatgcctgggtcttggataaactgaaagctgagcgtgaacgtggtatcaccattgatatctccttgtggaaatttgagaccagcaagtactatgtgactatcattgatgccccaggacacagagactttatcaaaaacatgattacagggacatctcaggctgactgtgctgtcctgattgttgctgctggtgttggtgaatttgaagctggtatctccaagaatgggcagacccgagagcatgcccttctggcttacacactgggtgtgaaacaactaattgtcggtgttaacaaaatggattccactgagccaccctacagccagaagagatatgaggaaatgttaaggaagtcagcacttacattaagaaaatggctacaaccccgacacagtagcatttgtgccaatttctggttggaatggtgacaacatgctggagccaagtgctaacatgccttggttcaagggatggaaagtcacccgtaaggatggcaatgccagtggaaccacgctgcttgaggctctggactgcatcctaccaccaactcgtccaactgacaagcccttgcgcctgcctctccaggatgtctacaaaattggtggtattggtactgttcctgttggccgagtggagactggtgttctcaaacccggtatggtggtcacctttgctccagtcaacgttacaacggaagtaaaatctgtcgaaatgcaccatgaagctttgagtgaagctcttcctggggacaatgtgggcttcaatgtcaagaatgtgtctgtcaaggatgttcgtcgtggcaacgttgctggtgacagcaaaaatgacccaccaatggaagcagctggcttcactgctcaggtgattatcctgaaccatccaggccaaataagcgccggctatgcccctgtattggattgccacacggctcacattgcatgcaagtttgctgagctgaaggaaaagattgatcgccgttctggtaaaaagctggaagatggccctaaattcttgaagtctggtgatgctgccattgttgatatggttcctggcaagcccatgtgtgttgagagcttctcagactatccacctttgggtcgctttgctgttcgtgatatgagacagacagttgcggtgggtgtcatcaaagcagtggacaagaaggctgctggagctggcaaggtcaccaagtctgcccagaaagctcagaaggctaaatgaatattatccctaatacctgccaccccactcttaatcagtggtggaagaacggtctcagaactgtttgtttcaattggccatttaagtttagtagtaaaagactggttaatgataacaatgcatcgtaaaaccttcagaaggaaaggagaatgttttgtggaccactttggttttcttttttgcgtgtggcagttttaagttattagtttttaaaatcagtactttttaatggaaacaacttgaccaaaaatttgtcacagaattttgagacccattaaaaaagttaaatgagaaaaaaaaaaaaaaaaacaaaa

SEQ ID NO: 315134 - DNA, 1528 bp, Homo sapiens
attttgacctttttcgcaacgggtttgccgccagaacacaggtgtcgtgaaaactacccctaaaagccaaaatgggaaaggaaaagactcatatcaacattgtcgtcattggacacgtagattcgggcaagtccaccactactggccatctgatctataaatgcggtggcatcgacaaaagaaccattgaaaaatttgagaaggaggctgctgagatgggaaagggctccttcaagtatgcctgggtcttggataaactgaaagctgagcgtgaacgtggtatcaccattgatatctccttgtggaaatttgagaccagcaagtactatgtgactatcattgatgccccaggacacagagactttatcaaaaacatgattacagggacatctcaggctgactgtgctgtcctgattgttgctgctggtgttggtgaatttgaagctggtatctccaagaatgggcagacccgagagcatgcccttctggcttacacactgggtgtgaaacaactaattgtcggtgttaacaaaatggattccactgagccaccctacagccagaagagatatgaggaaattgtctacaaaattggtggtattggtactgttcctgttggccgagtggagactggtgttctcaaacccggtatggtggtcacctttgctccagtcaacgttacaacggaagtaaaatctgtcgaaatgcaccatgaagctttgagtgaagctcttcctggggacaatgtgggcttcaatgtcaagaatgtgtctgtcaaggatgttcgtcgtggcaacgttgctggtgacagcaaaaatgacccaccaatggaagcagctggcttcactgctcaggtgattatcctgaaccatccaggccaaataagcgccggctatgcccctgtattggattgccacacggctcacattgcatgcaagtttgctgagctgaaggaaaagattgatcgccgttctggtaaaaagctggaagatggccctaaattcttgaagtctggtgatgctgccattgttgatatggttcctggcaagcccatgtgtgttgagagcttctcagactatccacctttgggtcgctttgctgttcgtgatatgagacagacagttgcggtgggtgtcatcaaagcagtggacaagaaggctgctggagctggcaaggtcaccaagtctgcccagaaagctcagaaggctaaatgaatattatccctaatacctgccaccccactcttaatcagtggtggaagaacggtctcagaactgtttgtttcaattggccatttaagtttagtagtaaaagactggttaatgataacaatgcatcgtaaaaccttcagaaggaaaggagaatgttttgtggaccactttggttttcttttttgcgtgtggcagttttaagttattagtttttaaaatcagtactttttaatggaaacaacttgaccaaaaatttgtcacagaattttgagacccattaaaaaagttaaatgagaaaaaaaaaaaaaaaaacaaaa

SEQ ID NO: 315135 - DNA, 1189 bp, Homo sapiens
cggacgcgtgggtcgcccacgcgtaaaatggctacaaccccgacacagtagcatttgtgccaatttctggttggaatggtgacaacatgctggagccaagtgctaacatgccttggttcaagggatggaaagtcacccgtaaggatggcaatgccagtggaaccacgctgcttgaggctctggactgcatcctaccaccaactcgtccaactgacaagcccttgcgcctgcctctccaggatgtctacaaaattggtggtattggtactgttcctgttggccgagtggagactggtgttctcaaacccggtatggtggtcacctttgctccagtcaacgttacaacggaagtaaaatctgtcgaaatgcaccatgaagctttgagtgaagctcttcctggggacaatgtgggcttcaatgtcaagaatgtgtctgtcaaggatgttcgtcgtggcaacgttgctggtgacagcaaaaatgacccaccaatggaagcagctggcttcactgctcaggtgattatcctgaaccatccaggccaaataagcgccggctatgcccctgtattggattgccacacggctcacattgcatgcaagtttgctgagctgaaggaaaagattgatcgccgttctggtaaaaagctggaagatggccctaaattcttgaagtctggtgatgctgccattgttgatatggttcctggcaagcccatgtgtgttgagagcttctcagactatccacctttgggtcgctttgctgttcgtgatatgagacagacagttgcggtgggtgtcatcaaagcagtggacaagaaggctgctggagctggcaaggtcaccaagtctgcccagaaagctcagaaggctaaatgaatattatccctaatacctgccaccccactcttaatcagtggtggaagaacggtctcagaactgtttgtttcaattggccatttaagtttagtagtaaaagactggttaatgataacaatgcatcgtaaaaccttcagaaggaaaggagaatgttttgtggaccactttggttttcttttttgcgtgtggcagttttaagttattagtttttaaaatcagtactttttaatggaaacaacttgaccaaaaatttgtcacagaattttgagacccattaaaaaagttaaatgagaaaaaaaaaaaaaaaaacaaaa

SEQ ID NO: 315136 - DNA, 2655 bp, Homo sapiens
cggacgcgtgggtcgcccacgcgtcgccagaacacaggtgtcgtgaaaactacccctaaaagccaaaatgggaaaggaaaagactcatatcaacattgtcgtcattggacacgtagattcgggcaagtccaccactactggccatctgatctataaatgcggtggcatcgacaaaagaaccattgaaaaatttgagaaggaggctgctgagatgggaaagggctccttcaagtatgcctgggtcttggataaactgaaagctgagcgtgaacgtggtatcaccattgatatctccttgtggaaatttgagaccagcaagtactatgtgactatcattgatgccccaggacacagagactttatcaaaaacatgattacagggacatctcaggctgactgtgctgtcctgattgttgctgctggtgttggtgaatttgaagctggtatctccaagaatgggcagacccgagagcatgcccttctggcttacacactgggtgtgaaacaactaattgtcggtgttaacaaaatggattccactgagccaccctacagccagaagagatatgaggaaatgttaaggaagtcagcacttacattaagaaaatggctacaaccccgacacagtagcatttgtgccaatttctggttggaatggtgacaacatgctggagccaagtgctaacatgccttggttcaagggatggaaagtcacccgtaaggatggcaatgccagtggaaccacgctgcttgaggctctggactgcatcctaccaccaactcgtccaactgacaagcccttgcgcctgcctctccaggatgtctacaaaattggtggtattggtactgttcctgttggccgagtggagactggtgttctcaaacccggtatggtggtcacctttgctccagtcaacgttacaacggaagtaaaatctgtcgaaatgcaccatgaagctttgagtgaagctcttcctggggacaatgtgggcttcaatgtcaagaatgtgtctgtcaaggatgttcgtcgtggcaacgttgctggtgacagcaaaaatgacccaccaatggaagcagctggcttcactgctcaggtgattatcctgaaccatccaggccaaataagcgccggctatgcccctgtattggattgccacacggctcacattgcatgcaagtttgctgagctgaaggaaaagattgatcgccgttctggtaaaaagctggaagatggccctaaattcttgaagtctggtgatgctgccattgttgatatggttcctggcaagcccatgtgtgttgagagcttctcagactatccacctttgggtcgctttgctgttcgtgatatgagacagacagttgcggtgggtgtcatcaaagcagtggacaagaaggctgctggagctggcaaggtcaccaagtctgcccagaaagctcagaaggctaaatgaatattatccctaatacctgccaccccactcttaatcagtggtggaagaacggtctcagaactgtttgtttcaattggccatttaagtttagtagtaaaagactggttaatgataacaatgcatcgtaaaaccttcagaaggaaaggagaatgttttgtggaccactttggttttcttttttgcgtgtggcagttttaagttattagtttttaaaatcagtactttttaatggaaacaacttgaccaaaaatttgtcacagaattttgagacccattaaaaaagttaaatgagaaaaaaaaaaaaaaaaacaaaaaaaaaacaaaaaaaaaaacaaaaaaacaaaaaaaaacaaaaaaaacaaaaaaacaaaacaacaaacaccagagcgagggggggggcggaggccgccccagaacgacactcactccggggacggacgcacgacaccgacggcagcccgactgtacgtgagcatggggcggcgccgccagaaaggaaggagacattacagagagacgggacggggacgtgacacaaacaacaaaacaacagagcaatgggcagggagacagaaaccaacgacgacacaggtaccaaacactacatagaaagacacaccacaacacaacagcgtggggggcggaagaaaaacaaaggacgccacaaccacaccacaggaagaaacataggcaaacaaaggaaggacaaaaaacaaaaaaaacagagagcaggactgtagggcaacacaaccagagagaaacaacggaggacagaacgaaaaagccaccagccggcaagccaacaacaataaaaaacaacacacacacagcgggaagggcggaataaaagccagcaaagacccgcaacaacgtgacgatggctaaggagaacgcagaaacaaagaagcccagcaagaggaagaggaaggagggacagcgaagagcaaaaggaaagaagaaagaagaaacagacgacggtaagaacaagagagcgagcagacaagagcagcgagaggagcgagaaggcgagagagaaaagaacagagcgggcgcggagagcggcacgcggagcgagaaagggggagggaggcggaggggagagaaaaaggcagagagaggcgagagaggcgagaagacaagaggcgacgaggaagagagggagataggcagaacaaacaaagccggagaaggagaaacagag

SEQ ID NO: 315137 - DNA, 2428 bp, Homo sapiens
cggacgcgtgggtcgcccacgcgtcgccagaacacaggtgtcgtgaaaactacccctaaaagccaaaatgggaaaggaaaagactcatatcaacattgtcgtcattggacacgtagattcgggcaagtccaccactactggccatctgatctataaatgcggtggcatcgacaaaagaaccattgaaaaatttgagaaggaggctgctgagatgggaaagggctccttcaagtatgcctgggtcttggataaactgaaagctgagcgtgaacgtggtatcaccattgatatctccttgtggaaatttgagaccagcaagtactatgtgactatcattgatgccccaggacacagagactttatcaaaaacatgattacagggacatctcaggctgactgtgctgtcctgattgttgctgctggtgttggtgaatttgaagctggtatctccaagaatgggcagacccgagagcatgcccttctggcttacacactgggtgtgaaacaactaattgtcggtgttaacaaaatggattccactgagccaccctacagccagaagagatatgaggaaatgttaaggaagtcagcacttacattaagaaaatggctacaaccccgacacagtagcatttgtgccaatttctggttggaatggtgacaacatgctggagccaagtgctaacatgccttggttcaagggatggaaagtcacccgtaaggatggcaatgccagtggaaccacgctgcttgaggctctggactgcatcctaccaccaactcgtccaactgacaagcccttgcgcctgcctctccaggatgtctacaaaattggtggtattggtactgttcctgttggccgagtggagactggtgttctcaaacccggtatggtggtcacctttgctccagtcaacgttacaacggaagtaaaatctgtcgaaatgcaccatgaagctttgagtgaagctcttcctggggacaatgtgggcttcaatgtcaagaatgtgtctgtcaaggatgttcgtcgtggcaacgttgctggtgacagcaaaaatgacccaccaatggaagcagctggcttcactgctcaggtgattatcctgaaccatccaggccaaataagcgccggctatgcccctgtattggattgccacacggctcacattgcatgcaagtttgctgagctgaaggaaaagattgatcgccgttctggtaaaaagctggaagatggccctaaattcttgaagtctggtgatgctgccattgttgatatggttcctggcaagcccatgtgtgttgagagcttctcagactatccacctttgggtcgctttgctgttcgtgagtggaccactttggttttcttttttgcgtgtggcagttttaagttattagtttttaaaatcagtactttttaatggaaacaacttgaccaaaaatttgtcacagaattttgagacccattaaaaaagttaaatgagaaaaaaaaaaaaaaaaacaaaaaaaaaaaaaaaaaaaaaaaaacaaaaaataaaaaaaaaaaacaaaaaaaaaaacaaaaaaacaaaaaaaaacaaaaaaaacaaaaaaacaaaacaacaaacaccagagcgagggggggggcggaggccgccccagaacgacactcactccggggacggacgcacgacaccgacggcagcccgactgtacgtgagcatggggcggcgccgccagaaaggaaggagacattacagagagacgggacggggacgtgacacaaacaacaaaacaacagagcaatgggcagggagacagaaaccaacgacgacacaggtaccaaacactacatagaaagacacaccacaacacaacagcgtggggggcggaagaaaaacaaaggacgccacaaccacaccacaggaagaaacataggcaaacaaaggaaggacaaaaaacaaaaaaaacagagagcaggactgtagggcaacacaaccagagagaaacaacggaggacagaacgaaaaagccaccagccggcaagccaacaacaataaaaaacaacacacacacagcgggaagggcggaataaaagccagcaaagacccgcaacaacgtgacgatggctaaggagaacgcagaaacaaagaagcccagcaagaggaagaggaaggagggacagcgaagagcaaaaggaaagaagaaagaagaaacagacgacggtaagaacaagagagcgagcagacaagagcagcgagaggagcgagaaggcgagagagaaaagaacagagcgggcgcggagagcggcacgcggagcgagaaagggggagggaggcggaggggagagaaaaaggcagagagaggcgagagaggcgagaagacaagaggcgacgaggaagagagggagataggcagaacaaacaaagccggagaaggagaaacagag

SEQ ID NO: 315138 - DNA, 5557 bp, Homo sapiens
tagcggcacccgaggccacgccccgagatcggaagtgacggagacgtgctagcgcgtcgaaggtagctctatggttttcctcgcgttcttgagtcgggaaatggccgctgtgtggttgcaacggagataaattcccggaaccgcgattcggcgtgtcaggaattcgaatttagagtttaatttctcagagcattctctccaggaagaatttttacagtatctcaaagacttcacttgacttcttgatcctgcataaaaccaaggagaaaagaaatgggtcgctccaattctagatcacattcttcaaggtcaaagtctagatcacagtctagttctcgatcaagatcaagatctcattctagaaagaagcgatacagttctaggtctcgttccagaacatattcaaggtctcgtagtagagatcgtatgtattctagagattatcgtcgcgattacagaaataatagaggaatgagacgaccttatgggtacagaggaaggggtagagggtattatcaaggaggaggaggtagatatcatcgaggtggttatagacctgtctggaatagaaggcactctaggagtcctagacgaggtcgttcacgttccaggagtccaaaaagaagatccgtttcttctcaaagatccagaagcagatctcgccggtcatatagatcttctaggtctccaagatcatcctcttctcgttcttcatccccatatagcaaatctcctgtttctaaaagacgagggtctcaggaaaaacaaaccaaaaaagctgaaggggaaccccaagaagagagtccgttgaaaagtaaatcacaggaggaaccgaaagatacatttgaacatgacccatctgagtctatcgatgaatttaataagtcatcagccacatccggtgatatttggcctggcctttcagcttatgataatagtcctagatcaccccatagtccttcacctattgctacaccacctagtcagagttcatcttgctctgatgctcccatgctcagtacagttcactctgcaaaaaatactccttctcagcattcacattccattcagcatagtcctgaaaggtctgggtctggttctgttggaaatggatctagtcgatacagtccttctcagaatagtccaattcatcacatcccttcacgaagaagtcctgcaaagacaatcgcaccacagaatgctccaagagatgagtctaggggccgttcctcgttttatcctgatggtggagatcaggaaactgcaaagactgggaagttcttaaaaaggttcacagatgaagagtctagagtattcctgcttgataggggtaataccagggataaagaggcttcaaaagagaaaggatcagagaaagggagggcagagggagaatgggaagatcaggaagctctagattacttcagtgataaagagtctggaaaacaaaagtttaatgattcagaaggggatgacacagaggagacagaggattatagacagttcaggaagtcagtcctcgcagatcagggtaaaagttttgctactgcatctcaccggaatactgaggaggaaggactcaagtacaagtccaaagtttcactgaaaggcaatagagaaagtgatggatttagagaagaaaaaaattataaacttaaagagactggatatgtagtggaaaggcctagcactacaaaagataagcacaaagaagaagacaaaaattctgaaagaataacagtaaagaaagaaactcagtcacctgagcaggtaaagtctgaaaagctcaaagacctctttgattacagtccccctctacacaagaatctggatgcacgagaaaagtctaccttcagagaggaaagcccacttaggatcaaaatgatagcgagtgattctcaccgtcctgaagtcaaactcaaaatggcacctgttcctcttgatgattctaacagacctgcttccttgactaaagacaggctgcttgctagtacacttgtccattctgtcaagaaggagcaagaattccgatccatctttgaccacattaagttgccacaggccagcaaaagcacttcagagtcatttattcaacacattgtgtccttggttcatcatgttaaagagcaatacttcaagtcagctgcaatgaccctaaacgagcggttcacttcgtatcagaaagccactgaagaacatagtactcggcaaaagagccctgaaatacacaggagaattgacatctcaccaagtaccctgaggaagcatacccgtttagcaggggaagagagagtttttaaagaagaaaatcaaaagggagataaaaaattaaggtgtgactctgctgaccttcggcatgacattgatcgccgtagaaaagaaagaagtaaagaacggggagattccaagggctccagggaatccagtggatcaagaaagcaggaaaaaactccaaaagattacaaggaatacaaatcttacaaagatgacagtaaacataaaagagagcaagatcattctcgatcttcatcctcttcagcatcaccttcttctcccagttctcgagaagaaaaggagagtaagaaggaaagagaagaagaatttaaaactcaccatgaaatgaaagaatactcaggctttgcaggagttagccgaccacgaggaaccttttttcgaattagaggcagaggaagagccagaggagtttttgctgggacaaatactggtccaaacaactcaaatactacttttcaaaagagaccgaaggaagaggaatgggatccagaatataccccaaagagcaagaagtacttcttgcatgacgacagagatgatggtgtggattattgggccaaaagaggaagaggtcgtggtacttttcaacgtggcagagggcgctttaacttcaaaaaatcaggtagcagtcctaaatggactcatgacaaataccaaggggatgggattgttgaagatgaagaagagaccatggaaaataatgaagaaaagaaggacagacgcaaggaagaaaaggaataataaatatgaagtaagattacaacagagcagaacttgcacccaccattttttttacctgatttttgttttcaaataagaatgtaagcattttacttaaattttactgtttgcaagtagtctatagaaattttgttttaagtcttcaaatatcttgagaaatagtagactgtatgttgaaaattgtactgaaataaagtagaaaattgttacgtaccatatttgtaactatcaacttttaaaacttttaacgtttttgttacatgcattgtaattctgctttgtctataagatatggtcaagtacagctctgtgaaagttctgattctcttccttccctgtttgtcaatgttttattctgaagtaaacgttagctctacatataaatcctggaacagaaattgtttatagagactacactaattattttaactgtatacatctgtttaatttgaacacactacatcgtagggtgactgatttttgaagtataccacagacaaaaagttgttactatggtaaactaagctagtttaacacttgagcaaatgcttaagaaggaattaaaaaaaaaaagctttgccaatagctaaaaagtacaagctattaaaaatcagattgaaaagttttgagaaaatgttatttttactgaaagcaagcagtggcctataaagaacattcttaggagccttttctatttgcgttcaaaactgtgtgttctctttctattcctatttgatagtttgagtcatggtcttagatattagctatttgtgagaggaaactggtttgtaacaatactgcaaatagaaaccccatttctactgaacatcctagttttaaacagaagaaaaactgtaatcctggggttggtatgtaggaggtctatcctgcagaataagttgatacattagtacctgatttcatatcttacatatttatttgagctgaacattagtttgtagtgtaactattagtaaaaatagagaaacacagcatactgttcattaatagtattttaaaaaaattgtttttcaaatgtcaccaataaaagttttggcaggaagcttgttgcggcattgatctaacctttttcccccccatttcagttgcagtttttgtagaatggctttttctttttcctcttaagagttctattcttcaggtagataatttttcaaatgtgaattatcttttgtgtctatattgatagctcttaaaggagtgaaaatctaaaatagtaaatttcaatgttaagtgtctgctttatgggcatatataaaagtagacacatttcatttgttaatttagttgtgtgtgtgtgttaaaaggagctaatgcttattctgttaatgtaaacttttgaagatcttaagtgtattgctctttcatcttaaacactttcgaggatttgcagtgcgtctagcacctagattacagccaggaacattggttaagaactgttggaaacaaaactaaaagcaaactcaacatatgtgatgtttatggccctcagatccttagtattgtgtgattttcccccgttaacatgtctttctaaaattgtctattaaagcagaggaaatacctgccaaaggaagtatgtattgcattaatcagggcataactaatattctcctgttcagaataatacttatttacgtgtgaaagcaacatggatgtgattcccaacacagaattttcatgacccttttattgtatacaaataaataccataacagttacttggttagacatcaaatctgtgtgcatgactatgtgcttatccacttaagacaataggtaaaaggggatctgagaaattatgtaatagggagtgggaataaaactacttaattcctgtgggcaggttatattttaagttcaaatgcattgctttaacctttggttacttttattctgttaaacagaattgaagaaagagtattataccagagtgtagtaggctagggtgattgtaagaactctgtaatagaatgtcattgtggatgttacctttttcagatccaagcatataaaaagcctgtatattttttaaaaacacatcttaactccacgctttacgatattataaaagttgaatggttcctcttggtaaggatatttgcttacaagtgctaggaaataactcactgatacctgcgttaacatactttgttttgcctagagaggggcaataaaaatgaaccaaaggatatttccagaaaggattaagaaagctgtttaagaaggccatgactctttaggtgtgtatgtgtacctttcagcatcctaggaatttttatactaaaagcaaaatgttttttccagttagtcttcttcaaggaattactattgttccttttgtcacaggtaaaatcagtgttgggaattataatttgagaaaaatattacccagtaacattgaatgtagatggctaaacgattcttactcagtgtgatgtataatgatgcaacagggacccttgtaaattgtcatacgccaataaaatgtcacaagtaa

SEQ ID NO: 315139 - DNA, 1083 bp, Homo sapiens
  misc_feature (318)..(318): n is a, c, g, or t
  misc_feature (326)..(329): n is a, c, g, or t
  misc_feature (331)..(331): n is a, c, g, or t
  misc_feature (341)..(341): n is a, c, g, or t
  misc_feature (440)..(440): n is a, c, g, or t
  misc_feature (463)..(463): n is a, c, g, or t
  misc_feature (492)..(492): n is a, c, g, or t
cctcgtttcttcaagtctgttaccgaaattatcgttcccaaggttaaaccaatgcattttgaaccttataaatatcaccctggccccacagtaattaaatagtgtttatgtcccactcccttataacataattttctccagatcccccttttaccctagttgtcttaagtgggataatccacatagtcatgcacacagaatgtggatgtcttctcccaagtaactgttatggttatttcatttgtatcacaataaaaggtcatcaaaattctgtgttgggaatcacatccacgttgctttcacacgctaaataagtantattctgnnnngnagaatattanttatgccctgattaatgcatacatacttcctttggcaggtatttcctctgctttaatagacaattttagaaagacatgttaacgggggaaaatcacacnatactaaggatctgagggccatnaacatcacatatgttgagtttgcttttanttttgtttccaacgttcttaaccaatgttcctggctagggtgattgtaagaactctgtaatagaatgtcattgtggatgttacctttttcagatccaagcatataaaaagcctgtatattttttaaaaacacatcttaactccacgctttacgatattataaaagttgaatggttcctcttggtaaggatatttgcttacaagtgctaggaaataactcactgatacctgcgttaacatactttgttttgcctagagaggggcaataaaaatgaaccaaaggatatttccagaaaggattaagaaagctgtttaagaaggccatgactctttaggtgtgtatgtgtacctttcagcatcctaggaatttttatactaaaagcaaaatgttttttccagttagtcttcttcaaggaattactattgttccttttgtcacaggtaaaatcagtgttgggaattataatttgagaaaaatattacccagtaacattgaatgtagatggctaaacgattcttactcagtgtgatgtataatgatgcaacagggacccttgtaaattgtcatacgccaataaaatgtcacaagtaa

SEQ ID NO: 315140 - DNA, 1149 bp, Homo sapiens
tttgctgttgggtttgccaagatgccagatttttggagtaattattgaatgttaattgatttaaaaatatttttccaatttgggtgataatattcagtgtttttataaatccatttttgttgatatggcagcatatagtcactgatgaaatttaatagttgacccaaacaagctttttagttaactccatattttcctgtttttttgttttctgcaaatgattacttgaagtaatgtcattggttcatattggcaaggtattagagcatccatagattatgttcctttttgttctgaggaagtagtgtattaatgaagtggaattagagactcttgatttaatctattaattgctcttggattagatgtagtattgacagggacctgtgagcaactttcgaaacactctcctgttgaggtacaagaaattgaaagggtaggagttccttgtaacacttgattctcttttgctaggtttcttatttttattttcttttcacctgctacatgcccttctgtcacaaacaaatctctcttaaagtaaagttaactaatcggacagtatttcttctaaatcaacagagcaatacttcaagtcagctgcaatgaccctaaacgagcggttcacttcgtatcagaaagccactgaagaacatagtactcggcaaaagagccctgaaatacacagacacaggtatgtatcctgctgaactggcatataaaaacgttgttttgataggaagacactgttaaaacaagattgtattggaagtttgtttttgtcattgatacaagtattattcctcatttatactttaaataaatatatttcaaagtcttgaaaattctataattcttgattttcagcttagttgaaactggttgttagaacttgaaatattaactcttattactttgcagtatggaattaaatagttatcaattagtttggtttttgggaggggcagtggaggcctagagttaccttcgaatttctagtgaaataaatgtgaaataaatgtttggtgagagagagagaacgaaagcatgagcattgaagtcagatagttgtgttgaaatcctgactttgtctcttcgttgcattgtgatgaacaacttaatctctggacgtaagttttttcatataca

SEQ ID NO: 315141 - DNA, 5410 bp, Homo sapiens
tagcggcacccgaggccacgccccgagatcggaagtgacggagacgtgctagcgcgtcgaaggtagctctatggttttcctcgcgttcttgagtcgggaaatggccgctgtgtggttgcaacggagataaattcccggaaccgcgattcggcgtgtcaggaattcgaatttagagtttaatttctcagagcattctctccaggaagaatttttacagtatctcaaagacttcacttgacttcttgatcctgcataaaaccaaggagaaaagaaatgggtcgctccaattctagatcacattcttcaaggtcaaagtctagatcacagtctagttctcgatcaagatcaagatctcattctagaaagaagcgatacagttctaggtctcgttccagaacatattcaaggtctcgtagtagagatcgtatgtattctagagattatcgtcgcgattacagaaataatagaggaatgagacgaccttatgggtacagaggaaggggtagagggtattatcaaggaggaggaggtagatatcatcgaggtggttatagacctgtctggaatagaaggcactctaggagtcctagacgaggtcgttcacgttccaggagtccaaaaagaagatccgtttcttctcaaagatccagaagcagatctcgccggtcatatagatcttctaggtctccaagatcatcctcttctcgttcttcatccccatatagcaaatctcctgtttctaaaagacgagggtctcaggaaaaacaaaccaaaaaagctgaaggggaaccccaagaagagagtccgttgaaaagtaaatcacaggaggaaccgaaagatacatttgaacatgacccatctgagtctatcgatgaatttaataagtcatcagccacatccggtgatatttggcctggcctttcagcttatgataatagtcctagatcaccccatagtccttcacctattgctacaccacctagtcagagttcatcttgctctgatgctcccatgctcagtacagttcactctgcaaaaaatactccttctcagcattcacattccattcagcatagtcctgaaaggtctgggtctggttctgttggaaatggatctagtcgatacagtccttctcagaatagtccaattcatcacatcccttcacgaagaagtcctgcaaagacaatcgcaccacagaatgctccaagagatgagtctaggggccgttcctcgttttatcctgatggtggagatcaggaaactgcaaagactgggaagttcttaaaaaggttcacagatgaagagtctagagtattcctgcttgataggggtaataccagggataaagaggcttcaaaagagaaaggatcagagaaagggagggcagagggagaatgggaagatcaggaagctctagattacttcagtgataaagagtctggaaaacaaaagtttaatgattcagaaggggatgacacagaggagacagaggattatagacagttcaggaagtcagtcctcgcagatcagggtaaaagttttgctactgcatctcaccggaatactgaggaggaaggactcaagtacaagtccaaagtttcactgaaaggcaatagagaaagtgatggatttagagaagaaaaaaattataaacttaaagagactggatatgtagtggaaaggcctagcactacaaaagataagcacaaagaagaagacaaaaattctgaaagaataacagtaaagaaagaaactcagtcacctgagcaggtaaagtctgaaaagctcaaagacctctttgattacagtccccctctacacaagaatctggatgcacgagaaaagtctaccttcagagaggaaagcccacttaggatcaaaatgatagcgagtgattctcaccgtcctgaagtcaaactcaaaatggcacctgttcctcttgatgattctaacagacctgcttccttgactaaagacaggctgcttgctagtacacttgtccattctgtcaagaaggagcaagaattccgatccatctttgaccacattaagttgccacaggccagcaaaagcacttcagagtcatttattcaacacattgtgtccttggttcatcatgttaaagagcaatacttcaagtcagctgcaatgaccctaaacgagcggttcacttcgtatcagaaagccactgaagaacatagtactcggcaaaagagccctgaaatacacaggagaattgacatctcaccaagtaccctgaggaagcatacccgtttagcaggggaagagagagtttttaaagaagaaaatcaaaagggagataaaaaattaaggtgtgactctgctgaccttcggcatgacattgatcgccgtagaaaagaaagaagtaaagaacggggagattccaagggctccagggaatccagtggatcaagaaagcaggaaaaaactccaaaagattacaaggaatacaaatcttacaaagatgacagtaaacataaaagagagcaagatcattctcgatcttcatcctcttcagcatcaccttcttctcccagttctcgagaagaaaaggagagtaagaaggaaagagaagaagaatttaaaactcaccatgaaatgaaagaatactcaggctttgcaggagttagccgaccacgaggaacctttcatgacgacagagatgatggtgtggattattgggccaaaagaggaagaggtcgtggtacttttcaacgtggcagagggcgctttaacttcaaaaaatcaggtagcagtcctaaatggactcatgacaaataccaaggggatgggattgttgaagatgaagaagagaccatggaaaataatgaagaaaagaaggacagacgcaaggaagaaaaggaataataaatatgaagtaagattacaacagagcagaacttgcacccaccattttttttacctgatttttgttttcaaataagaatgtaagcattttacttaaattttactgtttgcaagtagtctatagaaattttgttttaagtcttcaaatatcttgagaaatagtagactgtatgttgaaaattgtactgaaataaagtagaaaattgttacgtaccatatttgtaactatcaacttttaaaacttttaacgtttttgttacatgcattgtaattctgctttgtctataagatatggtcaagtacagctctgtgaaagttctgattctcttccttccctgtttgtcaatgttttattctgaagtaaacgttagctctacatataaatcctggaacagaaattgtttatagagactacactaattattttaactgtatacatctgtttaatttgaacacactacatcgtagggtgactgatttttgaagtataccacagacaaaaagttgttactatggtaaactaagctagtttaacacttgagcaaatgcttaagaaggaattaaaaaaaaaaagctttgccaatagctaaaaagtacaagctattaaaaatcagattgaaaagttttgagaaaatgttatttttactgaaagcaagcagtggcctataaagaacattcttaggagccttttctatttgcgttcaaaactgtgtgttctctttctattcctatttgatagtttgagtcatggtcttagatattagctatttgtgagaggaaactggtttgtaacaatactgcaaatagaaaccccatttctactgaacatcctagttttaaacagaagaaaaactgtaatcctggggttggtatgtaggaggtctatcctgcagaataagttgatacattagtacctgatttcatatcttacatatttatttgagctgaacattagtttgtagtgtaactattagtaaaaatagagaaacacagcatactgttcattaatagtattttaaaaaaattgtttttcaaatgtcaccaataaaagttttggcaggaagcttgttgcggcattgatctaacctttttcccccccatttcagttgcagtttttgtagaatggctttttctttttcctcttaagagttctattcttcaggtagataatttttcaaatgtgaattatcttttgtgtctatattgatagctcttaaaggagtgaaaatctaaaatagtaaatttcaatgttaagtgtctgctttatgggcatatataaaagtagacacatttcatttgttaatttagttgtgtgtgtgtgttaaaaggagctaatgcttattctgttaatgtaaacttttgaagatcttaagtgtattgctctttcatcttaaacactttcgaggatttgcagtgcgtctagcacctagattacagccaggaacattggttaagaactgttggaaacaaaactaaaagcaaactcaacatatgtgatgtttatggccctcagatccttagtattgtgtgattttcccccgttaacatgtctttctaaaattgtctattaaagcagaggaaatacctgccaaaggaagtatgtattgcattaatcagggcataactaatattctcctgttcagaataatacttatttacgtgtgaaagcaacatggatgtgattcccaacacagaattttcatgacccttttattgtatacaaataaataccataacagttacttggttagacatcaaatctgtgtgcatgactatgtgcttatccacttaagacaataggtaaaaggggatctgagaaattatgtaatagggagtgggaataaaactacttaattcctgtgggcaggttatattttaagttcaaatgcattgctttaacctttggttacttttattctgttaaacagaattgaagaaagagtattataccagagtgtagtaggctagggtgattgtaagaactctgtaatagaatgtcattgtggatgttacctttttcagatccaagcatataaaaagcctgtatattttttaaaaacacatcttaactccacgctttacgatattataaaagttgaatggttcctcttggtaaggatatttgcttacaagtgctaggaaataactcactgatacctgcgttaacatactttgttttgcctagagaggggcaataaaaatgaaccaaaggatatttccagaaaggattaagaaagctgtttaagaaggccatgactctttaggtgtgtatgtgtacctttcagcatcctaggaatttttatactaaaagcaaaatgttttttccagttagtcttcttcaaggaattactattgttccttttgtcacaggtaaaatcagtgttgggaattataatttgagaaaaatattacccagtaacattgaatgtagatggctaaacgattcttactcagtgtgatgtataatgatgcaacagggacccttgtaaattgtcatacgccaataaaatgtcacaagtaa

SEQ ID NO: 315142 - DNA, 5720 bp, Homo sapiens
tagcggcacccgaggccacgccccgagatcggaagtgacggagacgtgctagcgcgtcgaaggtagctctatggttttcctcgcgttcttgagtcgggaaatggccgctgtgtggttgcaacggagataaattcccggaaccgcgattcggcgtgtcaggaattcgaatttagagtttaatttctcagagcattctctccaggaagaatttttacagtatctcaaagacttcacttgacttcttgatcctgcataaaaccaaggagaaaagaaatgggtcgctccaattctagatcacattcttcaaggtcaaagtctagatcacagtctagttctcgatcaagatcaagatctcattctagaaagaagcgatacagttctaggtctcgttccagaacatattcaaggtctcgtagtagagatcgtatgtattctagagattatcgtcgcgattacagaaataatagaggaatgagacgaccttatgggtacagaggaaggggtagagggtattatcaaggaggaggaggtagatatcatcgaggtggttatagacctgtctggaatagaaggcactctaggagtcctagacgaggtcgttcacgttccaggagtccaaaaagaagatccgtttcttctcaaagatccagaagcagatctcgccggtcatatagatcttctaggtctccaagatcatcctcttctcgttcttcatccccatatagcaaatctcctgtttctaaaagacgagggtctcaggaaaaacaaaccaaaaaagctgaaggggaaccccaagaagagagtccgttgaaaagtaaatcacaggaggaaccgaaagatacatttgaacatgacccatctgagtctatcgatgaatttaataagtcatcagccacatccggtgatatttggcctggcctttcagcttatgataatagtcctagatcaccccatagtccttcacctattgctacaccacctagtcagagttcatcttgctctgatgctcccatgctcagtacagttcactctgcaaaaaatactccttctcagcattcacattccattcagcatagtcctgaaaggtctgggtctggttctgttggaaatggatctagtcgatacagtccttctcagaatagtccaattcatcacatcccttcacgaagaagtcctgcaaagacaatcgcaccacagaatgctccaagagatgagtctaggggccgttcctcgttttatcctgatggtggagatcaggaaactgcaaagactgggaagttcttaaaaaggttcacagatgaagagtctagagtattcctgcttgataggggtaataccagggataaagaggcttcaaaagagaaaggatcagagaaagggagggcagagggagaatgggaagatcaggaagctctagattacttcagtgataaagagtctggaaaacaaaagtttaatgattcagaaggggatgacacagaggagacagaggattatagacagttcaggaagtcagtcctcgcagatcagggtaaaagttttgctactgcatctcaccggaatactgaggaggaaggactcaagtacaagtccaaagtttcactgaaaggcaatagagaaagtgatggatttagagaagaaaaaaattataaacttaaagagactggatatgtagtggaaaggcctagcactacaaaagataagcacaaagaagaagacaaaaattctgaaagaataacagtaaagaaagaaactcagtcacctgagcaggtaaagtctgaaaagctcaaagacctctttgattacagtccccctctacacaagaatctggatgcacgagaaaagtctaccttcagagaggaaagcccacttaggatcaaaatgatagcgagtgattctcaccgtcctgaagtcaaactcaaaatggcacctgttcctcttgatgattctaacagacctgcttccttgactaaagacaggctgcttgctagtacacttgtccattctgtcaagaaggagcaagaattccgatccatctttgaccacattaagttgccacaggccagcaaaagcacttcagagtcatttattcaacacattgtgtccttggttcatcatgttaaagagcaatacttcaagtcagctgcaatgaccctaaacgagcggttcacttcgtatcagaaagccactgaagaacatagtactcggcaaaagagccctgaaatacacaggagaattgacatctcaccaagtaccctgaggaagcatacccgtttagcaggggaagagagagtttttaaagaagaaaatcaaaagggagataaaaaattaaggtgtgactctgctgaccttcggcatgacattgatcgccgtagaaaagaaagaagtaaagaacggggagattccaagggctccagggaatccagtggatcaagaaagcaggaaaaaactccaaaagattacaaggaatacaaatcttacaaagatgacagcaaaaatgtatttgtcttttacacggcttatggtggatgaggacaaaaactttggaatagcaagctaacactgaaaaaaaaaatgacaaattaatgtgtcctattatccaggctacatcaggaggttggacttcaatgcagtgcatttctagaaacagtttgttaaacataaaagagagcaagatcattctcgatcttcatcctcttcagcatcaccttcttctcccagttctcgagaagaaaaggagagtaagaaggaaagagaagaagaatttaaaactcaccatgaaatgaaagaatactcaggctttgcaggagttagccgaccacgaggaaccttttttcgaattagaggcagaggaagagccagaggagtttttgctgggacaaatactggtccaaacaactcaaatactacttttcaaaagagaccgaaggaagaggaatgggatccagaatataccccaaagagcaagaagtacttcttgcatgacgacagagatgatggtgtggattattgggccaaaagaggaagaggtcgtggtacttttcaacgtggcagagggcgctttaacttcaaaaaatcaggtagcagtcctaaatggactcatgacaaataccaaggggatgggattgttgaagatgaagaagagaccatggaaaataatgaagaaaagaaggacagacgcaaggaagaaaaggaataataaatatgaagtaagattacaacagagcagaacttgcacccaccattttttttacctgatttttgttttcaaataagaatgtaagcattttacttaaattttactgtttgcaagtagtctatagaaattttgttttaagtcttcaaatatcttgagaaatagtagactgtatgttgaaaattgtactgaaataaagtagaaaattgttacgtaccatatttgtaactatcaacttttaaaacttttaacgtttttgttacatgcattgtaattctgctttgtctataagatatggtcaagtacagctctgtgaaagttctgattctcttccttccctgtttgtcaatgttttattctgaagtaaacgttagctctacatataaatcctggaacagaaattgtttatagagactacactaattattttaactgtatacatctgtttaatttgaacacactacatcgtagggtgactgatttttgaagtataccacagacaaaaagttgttactatggtaaactaagctagtttaacacttgagcaaatgcttaagaaggaattaaaaaaaaaaagctttgccaatagctaaaaagtacaagctattaaaaatcagattgaaaagttttgagaaaatgttatttttactgaaagcaagcagtggcctataaagaacattcttaggagccttttctatttgcgttcaaaactgtgtgttctctttctattcctatttgatagtttgagtcatggtcttagatattagctatttgtgagaggaaactggtttgtaacaatactgcaaatagaaaccccatttctactgaacatcctagttttaaacagaagaaaaactgtaatcctggggttggtatgtaggaggtctatcctgcagaataagttgatacattagtacctgatttcatatcttacatatttatttgagctgaacattagtttgtagtgtaactattagtaaaaatagagaaacacagcatactgttcattaatagtattttaaaaaaattgtttttcaaatgtcaccaataaaagttttggcaggaagcttgttgcggcattgatctaacctttttcccccccatttcagttgcagtttttgtagaatggctttttctttttcctcttaagagttctattcttcaggtagataatttttcaaatgtgaattatcttttgtgtctatattgatagctcttaaaggagtgaaaatctaaaatagtaaatttcaatgttaagtgtctgctttatgggcatatataaaagtagacacatttcatttgttaatttagttgtgtgtgtgtgttaaaaggagctaatgcttattctgttaatgtaaacttttgaagatcttaagtgtattgctctttcatcttaaacactttcgaggatttgcagtgcgtctagcacctagattacagccaggaacattggttaagaactgttggaaacaaaactaaaagcaaactcaacatatgtgatgtttatggccctcagatccttagtattgtgtgattttcccccgttaacatgtctttctaaaattgtctattaaagcagaggaaatacctgccaaaggaagtatgtattgcattaatcagggcataactaatattctcctgttcagaataatacttatttacgtgtgaaagcaacatggatgtgattcccaacacagaattttcatgacccttttattgtatacaaataaataccataacagttacttggttagacatcaaatctgtgtgcatgactatgtgcttatccacttaagacaataggtaaaaggggatctgagaaattatgtaatagggagtgggaataaaactacttaattcctgtgggcaggttatattttaagttcaaatgcattgctttaacctttggttacttttattctgttaaacagaattgaagaaagagtattataccagagtgtagtaggctagggtgattgtaagaactctgtaatagaatgtcattgtggatgttacctttttcagatccaagcatataaaaagcctgtatattttttaaaaacacatcttaactccacgctttacgatattataaaagttgaatggttcctcttggtaaggatatttgcttacaagtgctaggaaataactcactgatacctgcgttaacatactttgttttgcctagagaggggcaataaaaatgaaccaaaggatatttccagaaaggattaagaaagctgtttaagaaggccatgactctttaggtgtgtatgtgtacctttcagcatcctaggaatttttatactaaaagcaaaatgttttttccagttagtcttcttcaaggaattactattgttccttttgtcacaggtaaaatcagtgttgggaattataatttgagaaaaatattacccagtaacattgaatgtagatggctaaacgattcttactcagtgtgatgtataatgatgcaacagggacccttgtaaattgtcatacgccaataaaatgtcacaagtaa

SEQ ID NO: 315143 - DNA, 5038 bp, Homo sapiens
tagcggcacccgaggccacgccccgagatcggaagtgacggagacgtgctagcgcgtcgaaggtagctctatggttttcctcgcgttcttgagtcgggaaatggccgctgtgtggttgcaacggagataaattcccggaaccgcgattcggcgtgtcaggaattcgaatttagagtttaatttctcagagcattctctccaggaagaatttttacagtatctcaaagacttcacttgacttcttgatcctgcataaaaccaaggagaaaagaaatgggtcgctccaattctagatcacattcttcaaggtcaaagtctagatcacagtctagttctcgatcaagatcaagatctcattctagaaagaagcgatacagttctaggtctcgttccagaacatattcaaggtctcgtagtagagatcgtatgtattctagagattatcgtcgcgattacagaaataatagaggaatgagacgaccttatgggtacagaggaaggggtagagggtattatcaaggaggaggaggtagatatcatcgaggtggttatagacctgtctggaatagaaggcactctaggagtcctagacgaggtcgttcacgttccaggagtccaaaaagaagatccgtttcttctcaaagatccagaagcagatctcgccggtcatatagatcttctaggtctccaagatcatcctcttctcgttcttcatccccatatagcaaatctcctgtttctaaaagacgagggtctcaggaaaaacaaaccaaaaaagctgaaggggaaccccaagaagagagtccgttgaaaagtaaatcacaggaggaaccgaaagatacatttgaacatgacccatctgagtctatcgatgaatttaataagtcatcagccacatccggtgatatttggcctggcctttcagcttatgataatagtcctagatcaccccatagtccttcacctattgctacaccacctagtcagagttcatcttgctctgatgctcccatgctcagtacagttcactctgcaaaaaatactccttctcagcattcacattccattcagcatagtcctgaaaggtctgggtctggttctgttggaaatggatctagtcgatacagtccttctcagaatagtccaattcatcacatcccttcacgaagaagtcctgcaaagacaatcgcaccacagaatgctccaagagatgagtctaggggccgttcctcgttttatcctgatggtggagatcaggaaactgcaaagactgggaagttcttaaaaagtccccctctacacaagaatctggatgcacgagaaaagtctaccttcagagaggaaagcccacttaggatcaaaatgatagcgagtgattctcaccgtcctgaagtcaaactcaaaatggcacctgttcctcttgatgattctaacagacctgcttccttgactaaagacaggctgcttgctagtacacttgtccattctgtcaagaaggagcaagaattccgatccatctttgaccacattaagttgccacaggccagcaaaagcacttcagagtcatttattcaacacattgtgtccttggttcatcatgttaaagagcaatacttcaagtcagctgcaatgaccctaaacgagcggttcacttcgtatcagaaagccactgaagaacatagtactcggcaaaagagccctgaaatacacaggagaattgacatctcaccaagtaccctgaggaagcatacccgtttagcaggggaagagagagtttttaaagaagaaaatcaaaagggagataaaaaattaaggtgtgactctgctgaccttcggcatgacattgatcgccgtagaaaagaaagaagtaaagaacggggagattccaagggctccagggaatccagtggatcaagaaagcaggaaaaaactccaaaagattacaaggaatacaaatcttacaaagatgacagtaaacataaaagagagcaagatcattctcgatcttcatcctcttcagcatcaccttcttctcccagttctcgagaagaaaaggagagtaagaaggaaagagaagaagaatttaaaactcaccatgaaatgaaagaatactcaggctttgcaggagttagccgaccacgaggaaccttttttcgaattagaggcagaggaagagccagaggagtttttgctgggacaaatactggtccaaacaactcaaatactacttttcaaaagagaccgaaggaagaggaatgggatccagaatataccccaaagagcaagaagtacttcttgcatgacgacagagatgatggtgtggattattgggccaaaagaggaagaggtcgtggtacttttcaacgtggcagagggcgctttaacttcaaaaaatcaggtagcagtcctaaatggactcatgacaaataccaaggggatgggattgttgaagatgaagaagagaccatggaaaataatgaagaaaagaaggacagacgcaaggaagaaaaggaataataaatatgaagtaagattacaacagagcagaacttgcacccaccattttttttacctgatttttgttttcaaataagaatgtaagcattttacttaaattttactgtttgcaagtagtctatagaaattttgttttaagtcttcaaatatcttgagaaatagtagactgtatgttgaaaattgtactgaaataaagtagaaaattgttacgtaccatatttgtaactatcaacttttaaaacttttaacgtttttgttacatgcattgtaattctgctttgtctataagatatggtcaagtacagctctgtgaaagttctgattctcttccttccctgtttgtcaatgttttattctgaagtaaacgttagctctacatataaatcctggaacagaaattgtttatagagactacactaattattttaactgtatacatctgtttaatttgaacacactacatcgtagggtgactgatttttgaagtataccacagacaaaaagttgttactatggtaaactaagctagtttaacacttgagcaaatgcttaagaaggaattaaaaaaaaaaagctttgccaatagctaaaaagtacaagctattaaaaatcagattgaaaagttttgagaaaatgttatttttactgaaagcaagcagtggcctataaagaacattcttaggagccttttctatttgcgttcaaaactgtgtgttctctttctattcctatttgatagtttgagtcatggtcttagatattagctatttgtgagaggaaactggtttgtaacaatactgcaaatagaaaccccatttctactgaacatcctagttttaaacagaagaaaaactgtaatcctggggttggtatgtaggaggtctatcctgcagaataagttgatacattagtacctgatttcatatcttacatatttatttgagctgaacattagtttgtagtgtaactattagtaaaaatagagaaacacagcatactgttcattaatagtattttaaaaaaattgtttttcaaatgtcaccaataaaagttttggcaggaagcttgttgcggcattgatctaacctttttcccccccatttcagttgcagtttttgtagaatggctttttctttttcctcttaagagttctattcttcaggtagataatttttcaaatgtgaattatcttttgtgtctatattgatagctcttaaaggagtgaaaatctaaaatagtaaatttcaatgttaagtgtctgctttatgggcatatataaaagtagacacatttcatttgttaatttagttgtgtgtgtgtgttaaaaggagctaatgcttattctgttaatgtaaacttttgaagatcttaagtgtattgctctttcatcttaaacactttcgaggatttgcagtgcgtctagcacctagattacagccaggaacattggttaagaactgttggaaacaaaactaaaagcaaactcaacatatgtgatgtttatggccctcagatccttagtattgtgtgattttcccccgttaacatgtctttctaaaattgtctattaaagcagaggaaatacctgccaaaggaagtatgtattgcattaatcagggcataactaatattctcctgttcagaataatacttatttacgtgtgaaagcaacatggatgtgattcccaacacagaattttcatgacccttttattgtatacaaataaataccataacagttacttggttagacatcaaatctgtgtgcatgactatgtgcttatccacttaagacaataggtaaaaggggatctgagaaattatgtaatagggagtgggaataaaactacttaattcctgtgggcaggttatattttaagttcaaatgcattgctttaacctttggttacttttattctgttaaacagaattgaagaaagagtattataccagagtgtagtaggctagggtgattgtaagaactctgtaatagaatgtcattgtggatgttacctttttcagatccaagcatataaaaagcctgtatattttttaaaaacacatcttaactccacgctttacgatattataaaagttgaatggttcctcttggtaaggatatttgcttacaagtgctaggaaataactcactgatacctgcgttaacatactttgttttgcctagagaggggcaataaaaatgaaccaaaggatatttccagaaaggattaagaaagctgtttaagaaggccatgactctttaggtgtgtatgtgtacctttcagcatcctaggaatttttatactaaaagcaaaatgttttttccagttagtcttcttcaaggaattactattgttccttttgtcacaggtaaaatcagtgttgggaattataatttgagaaaaatattacccagtaacattgaatgtagatggctaaacgattcttactcagtgtgatgtataatgatgcaacagggacccttgtaaattgtcatacgccaataaaatgtcacaagtaa

SEQ ID NO: 315144 - DNA, 5135 bp, Homo sapiens
ccgggcttcagtgtccagagtatcagtgacttgagaaatttaccaagggaatggatgaccttgggagcagtgaggaaggggtagagggtattatcaaggaggaggaggtagatatcatcgaggtggttatagacctgtctggaatagaaggcactctaggagtcctagacgaggtcgttcacgttccaggagtccaaaaagaagatccgtttcttctcaaagatccagaagcagatctcgccggtcatatagatcttctaggtctccaagatcatcctcttctcgttcttcatccccatatagcaaatctcctgtttctaaaagacgagggtctcaggaaaaacaaaccaaaaaagctgaaggggaaccccaagaagagagtccgttgaaaagtaaatcacaggaggaaccgaaagatacatttgaacatgacccatctgagtctatcgatgaatttaataagtcatcagccacatccggtgatatttggcctggcctttcagcttatgataatagtcctagatcaccccatagtccttcacctattgctacaccacctagtcagagttcatcttgctctgatgctcccatgctcagtacagttcactctgcaaaaaatactccttctcagcattcacattccattcagcatagtcctgaaaggtctgggtctggttctgttggaaatggatctagtcgatacagtccttctcagaatagtccaattcatcacatcccttcacgaagaagtcctgcaaagacaatcgcaccacagaatgctccaagagatgagtctaggggccgttcctcgttttatcctgatggtggagatcaggaaactgcaaagactgggaagttcttaaaaaggttcacagatgaagagtctagagtattcctgcttgataggggtaataccagggataaagaggcttcaaaagagaaaggatcagagaaagggagggcagagggagaatgggaagatcaggaagctctagattacttcagtgataaagagtctggaaaacaaaagtttaatgattcagaaggggatgacacagaggagacagaggattatagacagttcaggaagtcagtcctcgcagatcagggtaaaagttttgctactgcatctcaccggaatactgaggaggaaggactcaagtacaagtccaaagtttcactgaaaggcaatagagaaagtgatggatttagagaagaaaaaaattataaacttaaagagactggatatgtagtggaaaggcctagcactacaaaagataagcacaaagaagaagacaaaaattctgaaagaataacagtaaagaaagaaactcagtcacctgagcaggtaaagtctgaaaagctcaaagacctctttgattacagtccccctctacacaagaatctggatgcacgagaaaagtctaccttcagagaggaaagcccacttaggatcaaaatgatagcgagtgattctcaccgtcctgaagtcaaactcaaaatggcacctgttcctcttgatgattctaacagacctgcttccttgactaaagacaggctgcttgctagtacacttgtccattctgtcaagaaggagcaagaattccgatccatctttgaccacattaagttgccacaggccagcaaaagcacttcagagtcatttattcaacacattgtgtccttggttcatcatgttaaagagcaatacttcaagtcagctgcaatgaccctaaacgagcggttcacttcgtatcagaaagccactgaagaacatagtactcggcaaaagagccctgaaatacacaggagaattgacatctcaccaagtaccctgaggaagcatacccgtttagcaggggaagagagagtttttaaagaagaaaatcaaaagggagataaaaaattaaggtgtgactctgctgaccttcggcatgacattgatcgccgtagaaaagaaagaagtaaagaacggggagattccaagggctccagggaatccagtggatcaagaaagcaggaaaaaactccaaaagattacaaggaatacaaatcttacaaagatgacagtaaacataaaagagagcaagatcattctcgatcttcatcctcttcagcatcaccttcttctcccagttctcgagaagaaaaggagagtaagaaggaaagagaagaagaatttaaaactcaccatgaaatgaaagaatactcaggctttgcaggagttagccgaccacgaggaaccttttttcgaattagaggcagaggaagagccagaggagtttttgctgggacaaatactggtccaaacaactcaaatactacttttcaaaagagaccgaaggaagaggaatgggatccagaatataccccaaagagcaagaagtacttcttgcatgacgacagagatgatggtgtggattattgggccaaaagaggaagaggtcgtggtacttttcaacgtggcagagggcgctttaacttcaaaaaatcaggtagcagtcctaaatggactcatgacaaataccaaggggatgggattgttgaagatgaagaagagaccatggaaaataatgaagaaaagaaggacagacgcaaggaagaaaaggaataataaatatgaagtaagattacaacagagcagaacttgcacccaccattttttttacctgatttttgttttcaaataagaatgtaagcattttacttaaattttactgtttgcaagtagtctatagaaattttgttttaagtcttcaaatatcttgagaaatagtagactgtatgttgaaaattgtactgaaataaagtagaaaattgttacgtaccatatttgtaactatcaacttttaaaacttttaacgtttttgttacatgcattgtaattctgctttgtctataagatatggtcaagtacagctctgtgaaagttctgattctcttccttccctgtttgtcaatgttttattctgaagtaaacgttagctctacatataaatcctggaacagaaattgtttatagagactacactaattattttaactgtatacatctgtttaatttgaacacactacatcgtagggtgactgatttttgaagtataccacagacaaaaagttgttactatggtaaactaagctagtttaacacttgagcaaatgcttaagaaggaattaaaaaaaaaaagctttgccaatagctaaaaagtacaagctattaaaaatcagattgaaaagttttgagaaaatgttatttttactgaaagcaagcagtggcctataaagaacattcttaggagccttttctatttgcgttcaaaactgtgtgttctctttctattcctatttgatagtttgagtcatggtcttagatattagctatttgtgagaggaaactggtttgtaacaatactgcaaatagaaaccccatttctactgaacatcctagttttaaacagaagaaaaactgtaatcctggggttggtatgtaggaggtctatcctgcagaataagttgatacattagtacctgatttcatatcttacatatttatttgagctgaacattagtttgtagtgtaactattagtaaaaatagagaaacacagcatactgttcattaatagtattttaaaaaaattgtttttcaaatgtcaccaataaaagttttggcaggaagcttgttgcggcattgatctaacctttttcccccccatttcagttgcagtttttgtagaatggctttttctttttcctcttaagagttctattcttcaggtagataatttttcaaatgtgaattatcttttgtgtctatattgatagctcttaaaggagtgaaaatctaaaatagtaaatttcaatgttaagtgtctgctttatgggcatatataaaagtagacacatttcatttgttaatttagttgtgtgtgtgtgttaaaaggagctaatgcttattctgttaatgtaaacttttgaagatcttaagtgtattgctctttcatcttaaacactttcgaggatttgcagtgcgtctagcacctagattacagccaggaacattggttaagaactgttggaaacaaaactaaaagcaaactcaacatatgtgatgtttatggccctcagatccttagtattgtgtgattttcccccgttaacatgtctttctaaaattgtctattaaagcagaggaaatacctgccaaaggaagtatgtattgcattaatcagggcataactaatattctcctgttcagaataatacttatttacgtgtgaaagcaacatggatgtgattcccaacacagaattttcatgacccttttattgtatacaaataaataccataacagttacttggttagacatcaaatctgtgtgcatgactatgtgcttatccacttaagacaataggtaaaaggggatctgagaaattatgtaatagggagtgggaataaaactacttaattcctgtgggcaggttatattttaagttcaaatgcattgctttaacctttggttacttttattctgttaaacagaattgaagaaagagtattataccagagtgtagtaggctagggtgattgtaagaactctgtaatagaatgtcattgtggatgttacctttttcagatccaagcatataaaaagcctgtatattttttaaaaacacatcttaactccacgctttacgatattataaaagttgaatggttcctcttggtaaggatatttgcttacaagtgctaggaaataactcactgatacctgcgttaacatactttgttttgcctagagaggggcaataaaaatgaaccaaaggatatttccagaaaggattaagaaagctgtttaagaaggccatgactctttaggtgtgtatgtgtacctttcagcatcctaggaatttttatactaaaagcaaaatgttttttccagttagtcttcttcaaggaattactattgttccttttgtcacaggtaaaatcagtgttgggaattataatttgagaaaaatattacccagtaacattgaatgtagatggctaaacgattcttactcagtgtgatgtataatgatgcaacagggacccttgtaaattgtcatacgccaataaaatgtcacaagtaa

SEQ ID NO: 315145 - DNA, 5706 bp, Homo sapiens
tagcggcacccgaggccacgccccgagatcggaagtgacggagacgtgctagcgcgtcgaaggtagctctatggttttcctcgcgttcttgagtcgggaaatggccgctgtgtggttgcaacggagataaattcccggaaccgcgattcggcgtgtcaggaattcgaatttagagtttaatttctcagagcattctctccaggaagaatttttacagtatctcaaagacttcacttgacttcttgatcctgcataaaaccaaggagaaaagaaatgggtcgctccaattctagatcacattcttcaaggtcaaagtctagatcacagtctagttctcgatcaagatcaagatctcattctagaaagaagcgatacagttctaggtctcgttccagaacatattcaaggtctcgtagtagagatcgtatgtattctagagattatcgtcgcgattacagaaataatagaggaatgagacgaccttatgggtacagaggaaggggtagagggtattatcaaggaggaggaggtagatatcatcgaggtggttatagacctgtctggaatagaaggcactctaggagtcctagacgaggtcgttcacgttccaggagtccaaaaagaagatccgtttcttctcaaagatccagaagcagatctcgccggtcatatagatcttctaggtctccaagatcatcctcttctcgttcttcatccccatatagcaaatctcctgtttctaaaagacgagggtctcaggaaaaacaaaccaaaaaagctgaaggggaaccccaagaagagagtccgttgaaaagtaaatcacaggaggaaccgaaagatacatttgaacatgacccatctgagtctatcgatgaatttaataagtcatcagccacatccggtgatatttggcctggcctttcagcttatgataatagtcctagatcaccccatagtccttcacctattgctacaccacctagtcagagttcatcttgctctgatgctcccatgctcagtacagttcactctgcaaaaaatactccttctcagcattcacattccattcagcatagtcctgaaaggtctgggtctggttctgttggaaatggatctagtcgatacagtccttctcagaatagtccaattcatcacatcccttcacgaagaagtcctgcaaagacaatcgcaccacagaatgctccaagagatgagtctaggggccgttcctcgttttatcctgatggtggagatcaggaaactgcaaagactgggaagttcttaaaaaggttcacagatgaagagtctagagtattcctgcttgataggggtaataccagggataaagaggcttcaaaagagaaaggatcagagaaagggagggcagagggagaatgggaagatcaggaagctctagattacttcagtgataaagagtctggaaaacaaaagtttaatgattcagaaggggatgacacagaggagacagaggattatagacagttcaggaagtcagtcctcgcagatcagggtaaaagttttgctactgcatctcaccggaatactgaggaggaaggactcaagtacaagtccaaagtttcactgaaaggcaatagagaaagtgatggatttagagaagaaaaaaattataaacttaaagagactggatatgtagtggaaaggcctagcactacaaaagataagcacaaagaagaagacaaaaattctgaaagaataacagtaaagaaagaaactcagtcacctgagcaggtaaagtctgaaaagctcaaagacctctttgattacagtccccctctacacaagaatctggatgcacgagaaaagtctaccttcagagaggaaagcccacttaggatcaaaatgatagcgagtgattctcaccgtcctgaagtcaaactcaaaatggcacctgttcctcttgatgattctaacagacctgcttccttgactaaagacaggctgcttgctagtacacttgtccattctgtcaagaaggagcaagaattccgatccatctttgaccacattaagttgccacaggccagcaaaagcacttcagagtcatttattcaacacattgtgtccttggttcatcatgttaaagagcaatacttcaagtcagctgcaatgaccctaaacgagcggttcacttcgtatcagaaagccactgaagaacatagtactcggcaaaagagccctgaaatacacaggagaattgacatctcaccaagtaccctgaggaagcatacccgtttagcaggggaagagagagtttttaaagaagaaaatcaaaagggagataaaaaattaaggtgtgactctgctgaccttcggcatgacattgatcgccgtagaaaagaaagaagtaaagaacggggagattccaagggctccagggaatccagtggatcaagaaagcaggaaaaaactccaaaagattacaaggaatacaaatcttacaaagatgacagtaaacataaaagagagcaagatcattctcgatcttcatcctcttcagcatcaccttcttctcccagttctcgagaagaaaaggagagtaagaaggaaagagaagaagaatttaaaactcaccatgaaatgaaagaatactcaggctttgcaggagttagccgaccacgaggaaccttttttcgaattagaggcagaggaagagccagaggagtttttgctgggacaaatactggtccaaacaactcaaatactacttttcaaaagagaccgaaggaagaggaatgggatccagaatataccccaaagagcaagaagtacttcttgcatgacgacagagatgatggtgtggattattgggccaaaagaggaagaggtcgtggtacttttcaacgtggcagagggcgctttaacttcaaaaaatcaggtagcagtcctaaatggactcatgacaaataccaaggggatgggattgttgaagatgaagaagagaccatggaaaataatgaagaaaagaaggacagacgcaaggaagaaaaggtataaaatttcaacttgtgattctgacagattttttttgatataggtttggtgggtgaattatttcatttttaggaacaattattaatatggttccttttcactctccgcatcttttgttaatctttaattttttctctctcttttaggaataataaatatgaagtaagattacaacagagcagaacttgcacccaccattttttttacctgatttttgttttcaaataagaatgtaagcattttacttaaattttactgtttgcaagtagtctatagaaattttgttttaagtcttcaaatatcttgagaaatagtagactgtatgttgaaaattgtactgaaataaagtagaaaattgttacgtaccatatttgtaactatcaacttttaaaacttttaacgtttttgttacatgcattgtaattctgctttgtctataagatatggtcaagtacagctctgtgaaagttctgattctcttccttccctgtttgtcaatgttttattctgaagtaaacgttagctctacatataaatcctggaacagaaattgtttatagagactacactaattattttaactgtatacatctgtttaatttgaacacactacatcgtagggtgactgatttttgaagtataccacagacaaaaagttgttactatggtaaactaagctagtttaacacttgagcaaatgcttaagaaggaattaaaaaaaaaaagctttgccaatagctaaaaagtacaagctattaaaaatcagattgaaaagttttgagaaaatgttatttttactgaaagcaagcagtggcctataaagaacattcttaggagccttttctatttgcgttcaaaactgtgtgttctctttctattcctatttgatagtttgagtcatggtcttagatattagctatttgtgagaggaaactggtttgtaacaatactgcaaatagaaaccccatttctactgaacatcctagttttaaacagaagaaaaactgtaatcctggggttggtatgtaggaggtctatcctgcagaataagttgatacattagtacctgatttcatatcttacatatttatttgagctgaacattagtttgtagtgtaactattagtaaaaatagagaaacacagcatactgttcattaatagtattttaaaaaaattgtttttcaaatgtcaccaataaaagttttggcaggaagcttgttgcggcattgatctaacctttttcccccccatttcagttgcagtttttgtagaatggctttttctttttcctcttaagagttctattcttcaggtagataatttttcaaatgtgaattatcttttgtgtctatattgatagctcttaaaggagtgaaaatctaaaatagtaaatttcaatgttaagtgtctgctttatgggcatatataaaagtagacacatttcatttgttaatttagttgtgtgtgtgtgttaaaaggagctaatgcttattctgttaatgtaaacttttgaagatcttaagtgtattgctctttcatcttaaacactttcgaggatttgcagtgcgtctagcacctagattacagccaggaacattggttaagaactgttggaaacaaaactaaaagcaaactcaacatatgtgatgtttatggccctcagatccttagtattgtgtgattttcccccgttaacatgtctttctaaaattgtctattaaagcagaggaaatacctgccaaaggaagtatgtattgcattaatcagggcataactaatattctcctgttcagaataatacttatttacgtgtgaaagcaacatggatgtgattcccaacacagaattttcatgacccttttattgtatacaaataaataccataacagttacttggttagacatcaaatctgtgtgcatgactatgtgcttatccacttaagacaataggtaaaaggggatctgagaaattatgtaatagggagtgggaataaaactacttaattcctgtgggcaggttatattttaagttcaaatgcattgctttaacctttggttacttttattctgttaaacagaattgaagaaagagtattataccagagtgtagtaggctagggtgattgtaagaactctgtaatagaatgtcattgtggatgttacctttttcagatccaagcatataaaaagcctgtatattttttaaaaacacatcttaactccacgctttacgatattataaaagttgaatggttcctcttggtaaggatatttgcttacaagtgctaggaaataactcactgatacctgcgttaacatactttgttttgcctagagaggggcaataaaaatgaaccaaaggatatttccagaaaggattaagaaagctgtttaagaaggccatgactctttaggtgtgtatgtgtacctttcagcatcctaggaatttttatactaaaagcaaaatgttttttccagttagtcttcttcaaggaattactattgttccttttgtcacaggtaaaatcagtgttgggaattataatttgagaaaaatattacccagtaacattgaatgtagatggctaaacgattcttactcagtgtgatgtataatgatgcaacagggacccttgtaaattgtcatacgccaataaaatgtcacaagtaa

SEQ ID NO: 315146 - DNA, 4925 bp, Homo sapiens
  misc_feature (318)..(318): n is a, c, g, or t
  misc_feature (326)..(329): n is a, c, g, or t
  misc_feature (331)..(331): n is a, c, g, or t
  misc_feature (341)..(341): n is a, c, g, or t
  misc_feature (440)..(440): n is a, c, g, or t
  misc_feature (463)..(463): n is a, c, g, or t
  misc_feature (492)..(492): n is a, c, g, or t
  misc_feature (954)..(954): n is a, c, g, or t
  misc_feature (991)..(991): n is a, c, g, or t
  misc_feature (1035)..(1035): n is a, c, g, or t
  misc_feature (1163)..(1163): n is a, c, g, or t
  misc_feature (1165)..(1165): n is a, c, g, or t
  misc_feature (1170)..(1170): n is a, c, g, or t
  misc_feature (1172)..(1172): n is a, c, g, or t
  misc_feature (1179)..(1179): n is a, c, g, or t
  misc_feature (1181)..(1181): n is a, c, g, or t
  misc_feature (1183)..(1183): n is a, c, g, or t
  misc_feature (1202)..(1202): n is a, c, g, or t
cctcgtttcttcaagtctgttaccgaaattatcgttcccaaggttaaaccaatgcattttgaaccttataaatatcaccctggccccacagtaattaaatagtgtttatgtcccactcccttataacataattttctccagatcccccttttaccctagttgtcttaagtgggataatccacatagtcatgcacacagaatgtggatgtcttctcccaagtaactgttatggttatttcatttgtatcacaataaaaggtcatcaaaattctgtgttgggaatcacatccacgttgctttcacacgctaaataagtantattctgnnnngnagaatattanttatgccctgattaatgcatacatacttcctttggcaggtatttcctctgctttaatagacaattttagaaagacatgttaacgggggaaaatcacacnatactaaggatctgagggccatnaacatcacatatgttgagtttgcttttanttttgtttccaacgttcttaaccaatgttcctggctgtaatctaggtgctagacgcactgcaaatcctcgaaagtgctttatagatgaaagagcatacacttaagatcttcaaagtttacattaacagcataagcaccttagctcccttttaacacacacacacacttaaatagtaaatttcaatgttaagtgtctgctttatgggcatatatacaaagtagacacatttcatttgttaatttagttgtgtgtgtgtgttaaaaggagctaatgcttattctgttaatgtaaacttttgaagatcttaagtgtattgctctttcatcttaaacactttcgaggatttgcagtgcgtctagcacctagattacagccaggaacattggttaagaactgttggaaacaaaactaaaagcaaactcaacatatgtgatgtttatggccctcagatccttagtatngtgtgattttcccccgttaacatgtctttctaaaatngtctattaaagcagaggaaatacctgccaaaggaagtatgtatngcattaatcagggcataactaatattctcctgttcagaataatacttatttacgtgtgaaagcaacatggatgtgattcccaacacagaattttcatgacccttttattgtatacaaataaataccanancagtnanttggttngncntcaaaaaaaaaaaaaaaanaaaaaaaaaaaaataccttcagagaggaaagcccacttaggatcaaaatgatagcgagtgattctcaccgtcctgaagtcaaactcaaaatggcacctgttcctcttgatgattctaacagacctgcttccttgactaaagacaggctgcttgctagtacacttgtccattctgtcaagaaggagcaagaattccgatccatctttgaccacattaagttgccacaggccagcaaaagcacttcagagtcatttattcaacacattgtgtccttggttcatcatgttaaagagcaatacttcaagtcagctgcaatgaccctaaacgagcggttcacttcgtatcagaaagccactgaagaacatagtactcggcaaaagagccctgaaatacacaggagaattgacatctcaccaagtaccctgaggaagcatacccgtttagcaggggaagagagagtttttaaagaagaaaatcaaaagggagataaaaaattaaggtgtgactctgctgaccttcggcatgacattgatcgccgtagaaaagaaagaagtaaagaacggggagattccaagggctccagggaatccagtggatcaagaaagcaggaaaaaactccaaaagattacaaggaatacaaatcttacaaagatgacagtaaacataaaagagagcaagatcattctcgatcttcatcctcttcagcatcaccttcttctcccagttctcgagaagaaaaggagagtaagaaggaaagagaagaagaatttaaaactcaccatgaaatgaaagaatactcaggctttgcaggagttagccgaccacgaggaaccttttttcgaattagaggcagaggaagagccagaggagtttttgctgggacaaatactggtccaaacaactcaaatactacttttcaaaagagaccgaaggaagaggaatgggatccagaatataccccaaagagcaagaagtacttcttgcatgacgacagagatgatggtgtggattattgggccaaaagaggaagaggtcgtggtacttttcaacgtggcagagggcgctttaacttcaaaaaatcaggtagcagtcctaaatggactcatgacaaataccaaggggatgggattgttgaagatgaagaagagaccatggaaaataatgaagaaaagaaggacagacgcaaggaagaaaaggaataataaatatgaagtaagattacaacagagcagaacttgcacccaccattttttttacctgatttttgttttcaaataagaatgtaagcattttacttaaattttactgtttgcaagtagtctatagaaattttgttttaagtcttcaaatatcttgagaaatagtagactgtatgttgaaaattgtactgaaataaagtagaaaattgttacgtaccatatttgtaactatcaacttttaaaacttttaacgtttttgttacatgcattgtaattctgctttgtctataagatatggtcaagtacagctctgtgaaagttctgattctcttccttccctgtttgtcaatgttttattctgaagtaaacgttagctctacatataaatcctggaacagaaattgtttatagagactacactaattattttaactgtatacatctgtttaatttgaacacactacatcgtagggtgactgatttttgaagtataccacagacaaaaagttgttactatggtaaactaagctagtttaacacttgagcaaatgcttaagaaggaattaaaaaaaaaaagctttgccaatagctaaaaagtacaagctattaaaaatcagattgaaaagttttgagaaaatgttatttttactgaaagcaagcagtggcctataaagaacattcttaggagccttttctatttgcgttcaaaactgtgtgttctctttctattcctatttgatagtttgagtcatggtcttagatattagctatttgtgagaggaaactggtttgtaacaatactgcaaatagaaaccccatttctactgaacatcctagttttaaacagaagaaaaactgtaatcctggggttggtatgtaggaggtctatcctgcagaataagttgatacattagtacctgatttcatatcttacatatttatttgagctgaacattagtttgtagtgtaactattagtaaaaatagagaaacacagcatactgttcattaatagtattttaaaaaaattgtttttcaaatgtcaccaataaaagttttggcaggaagcttgttgcggcattgatctaacctttttcccccccatttcagttgcagtttttgtagaatggctttttctttttcctcttaagagttctattcttcaggtagataatttttcaaatgtgaattatcttttgtgtctatattgatagctcttaaaggagtgaaaatctaaaatagtaaatttcaatgttaagtgtctgctttatgggcatatataaaagtagacacatttcatttgttaatttagttgtgtgtgtgtgttaaaaggagctaatgcttattctgttaatgtaaacttttgaagatcttaagtgtattgctctttcatcttaaacactttcgaggatttgcagtgcgtctagcacctagattacagccaggaacattggttaagaactgttggaaacaaaactaaaagcaaactcaacatatgtgatgtttatggccctcagatccttagtattgtgtgattttcccccgttaacatgtctttctaaaattgtctattaaagcagaggaaatacctgccaaaggaagtatgtattgcattaatcagggcataactaatattctcctgttcagaataatacttatttacgtgtgaaagcaacatggatgtgattcccaacacagaattttcatgacccttttattgtatacaaataaataccataacagttacttggttagacatcaaatctgtgtgcatgactatgtgcttatccacttaagacaataggtaaaaggggatctgagaaattatgtaatagggagtgggaataaaactacttaattcctgtgggcaggttatattttaagttcaaatgcattgctttaacctttggttacttttattctgttaaacagaattgaagaaagagtattataccagagtgtagtaggctagggtgattgtaagaactctgtaatagaatgtcattgtggatgttacctttttcagatccaagcatataaaaagcctgtatattttttaaaaacacatcttaactccacgctttacgatattataaaagttgaatggttcctcttggtaaggatatttgcttacaagtgctaggaaataactcactgatacctgcgttaacatactttgttttgcctagagaggggcaataaaaatgaaccaaaggatatttccagaaaggattaagaaagctgtttaagaaggccatgactctttaggtgtgtatgtgtacctttcagcatcctaggaatttttatactaaaagcaaaatgttttttccagttagtcttcttcaaggaattactattgttccttttgtcacaggtaaaatcagtgttgggaattataatttgagaaaaatattacccagtaacattgaatgtagatggctaaacgattcttactcagtgtgatgtataatgatgcaacagggacccttgtaaattgtcatacgccaataaaatgtcacaagtaa

SEQ ID NO: 315147 - DNA, 4014 bp, Homo sapiens
tttgctgttgggtttgccaagatgccagatttttggagtaattattgaatgttaattgatttaaaaatatttttccaatttgggtgataatattcagtgtttttataaatccatttttgttgatatggcagcatatagtcactgatgaaatttaatagttgacccaaacaagctttttagttaactccatattttcctgtttttttgttttctgcaaatgattacttgaagtaatgtcattggttcatattggcaaggtattagagcatccatagattatgttcctttttgttctgaggaagtagtgtattaatgaagtggaattagagactcttgatttaatctattaattgctcttggattagatgtagtattgacagggacctgtgagcaactttcgaaacactctcctgttgaggtacaagaaattgaaagggtaggagttccttgtaacacttgattctcttttgctaggtttcttatttttattttcttttcacctgctacatgcccttctgtcacaaacaaatctctcttaaagtaaagttaactaatcggacagtatttcttctaaatcaacagagcaatacttcaagtcagctgcaatgaccctaaacgagcggttcacttcgtatcagaaagccactgaagaacatagtactcggcaaaagagccctgaaatacacaggagaattgacatctcaccaagtaccctgaggaagcatacccgtttagcaggggaagagagagtttttaaagaagaaaatcaaaagggagataaaaaattaaggtgtgactctgctgaccttcggcatgacattgatcgccgtagaaaagaaagaagtaaagaacggggagattccaagggctccagggaatccagtggatcaagaaagcaggaaaaaactccaaaagattacaaggaatacaaatcttacaaagatgacagtaaacataaaagagagcaagatcattctcgatcttcatcctcttcagcatcaccttcttctcccagttctcgagaagaaaaggagagtaagaaggaaagagaagaagaatttaaaactcaccatgaaatgaaagaatactcaggctttgcaggagttagccgaccacgaggaaccttttttcgaattagaggcagaggaagagccagaggagtttttgctgggacaaatactggtccaaacaactcaaatactacttttcaaaagagaccgaaggaagaggaatgggatccagaatataccccaaagagcaagaagtacttcttgcatgacgacagagatgatggtgtggattattgggccaaaagaggaagaggtcgtggtacttttcaacgtggcagagggcgctttaacttcaaaaaatcaggtagcagtcctaaatggactcatgacaaataccaaggggatgggattgttgaagatgaagaagagaccatggaaaataatgaagaaaagaaggacagacgcaaggaagaaaaggaataataaatatgaagtaagattacaacagagcagaacttgcacccaccattttttttacctgatttttgttttcaaataagaatgtaagcattttacttaaattttactgtttgcaagtagtctatagaaattttgttttaagtcttcaaatatcttgagaaatagtagactgtatgttgaaaattgtactgaaataaagtagaaaattgttacgtaccatatttgtaactatcaacttttaaaacttttaacgtttttgttacatgcattgtaattctgctttgtctataagatatggtcaagtacagctctgtgaaagttctgattctcttccttccctgtttgtcaatgttttattctgaagtaaacgttagctctacatataaatcctggaacagaaattgtttatagagactacactaattattttaactgtatacatctgtttaatttgaacacactacatcgtagggtgactgatttttgaagtataccacagacaaaaagttgttactatggtaaactaagctagtttaacacttgagcaaatgcttaagaaggaattaaaaaaaaaaagctttgccaatagctaaaaagtacaagctattaaaaatcagattgaaaagttttgagaaaatgttatttttactgaaagcaagcagtggcctataaagaacattcttaggagccttttctatttgcgttcaaaactgtgtgttctctttctattcctatttgatagtttgagtcatggtcttagatattagctatttgtgagaggaaactggtttgtaacaatactgcaaatagaaaccccatttctactgaacatcctagttttaaacagaagaaaaactgtaatcctggggttggtatgtaggaggtctatcctgcagaataagttgatacattagtacctgatttcatatcttacatatttatttgagctgaacattagtttgtagtgtaactattagtaaaaatagagaaacacagcatactgttcattaatagtattttaaaaaaattgtttttcaaatgtcaccaataaaagttttggcaggaagcttgttgcggcattgatctaacctttttcccccccatttcagttgcagtttttgtagaatggctttttctttttcctcttaagagttctattcttcaggtagataatttttcaaatgtgaattatcttttgtgtctatattgatagctcttaaaggagtgaaaatctaaaatagtaaatttcaatgttaagtgtctgctttatgggcatatataaaagtagacacatttcatttgttaatttagttgtgtgtgtgtgttaaaaggagctaatgcttattctgttaatgtaaacttttgaagatcttaagtgtattgctctttcatcttaaacactttcgaggatttgcagtgcgtctagcacctagattacagccaggaacattggttaagaactgttggaaacaaaactaaaagcaaactcaacatatgtgatgtttatggccctcagatccttagtattgtgtgattttcccccgttaacatgtctttctaaaattgtctattaaagcagaggaaatacctgccaaaggaagtatgtattgcattaatcagggcataactaatattctcctgttcagaataatacttatttacgtgtgaaagcaacatggatgtgattcccaacacagaattttcatgacccttttattgtatacaaataaataccataacagttacttggttagacatcaaatctgtgtgcatgactatgtgcttatccacttaagacaataggtaaaaggggatctgagaaattatgtaatagggagtgggaataaaactacttaattcctgtgggcaggttatattttaagttcaaatgcattgctttaacctttggttacttttattctgttaaacagaattgaagaaagagtattataccagagtgtagtaggctagggtgattgtaagaactctgtaatagaatgtcattgtggatgttacctttttcagatccaagcatataaaaagcctgtatattttttaaaaacacatcttaactccacgctttacgatattataaaagttgaatggttcctcttggtaaggatatttgcttacaagtgctaggaaataactcactgatacctgcgttaacatactttgttttgcctagagaggggcaataaaaatgaaccaaaggatatttccagaaaggattaagaaagctgtttaagaaggccatgactctttaggtgtgtatgtgtacctttcagcatcctaggaatttttatactaaaagcaaaatgttttttccagttagtcttcttcaaggaattactattgttccttttgtcacaggtaaaatcagtgttgggaattataatttgagaaaaatattacccagtaacattgaatgtagatggctaaacgattcttactcagtgtgatgtataatgatgcaacagggacccttgtaaattgtcatacgccaataaaatgtcacaagtaa

SEQ ID NO: 315148 - DNA, 5406 bp, Homo sapiens
tagcggcacccgaggccacgccccgagatcggaagtgacggagacgtgctagcgcgtcgaaggtagctctatggttttcctcgcgttcttgagtcgggaaatggccgctgtgtggttgcaacggagataaattcccggaaccgcgattcggcgtgtcaggaattcgaatttagagtttaatttctcagagcattctctccaggaagaatttttacagtatctcaaagacttcacttgacttcttgatcctgcataaaaccaaggagaaaagaaatgggtcgctccaattctagatcacattcttcaaggtcaaagtctagatcacagtctagttctcgatcaagatcaagatctcattctagaaagaagcgatacagttctaggtctcgttccagaacatattcaaggtctcgtagtagagatcgtatgtattctagagattatcgtcgcgattacagaaataatagaggaatgagacgaccttatgggtacagaggaaggggtagagggtattatcaaggaggaggaggtagatatcatcgaggtggttatagacctgtctggaatagaaggcactctaggagtcctagacgaggtcgttcacgttccaggagtccaaaaagaagatccgtttcttctcaaagatccagaagcagatctcgccggtcatatagatcttctaggtctccaagatcatcctcttctcgttcttcatccccatatagcaaatctcctgtttctaaaagacgagggtctcaggaaaaacaaaccaaaaaagctgaaggggaaccccaagaagagagtccgttgaaaagtaaatcacaggaggaaccgaaagatacatttgaacatgacccatctgagtctatcgatgaatttaataagtcatcagccacatccggtgatatttggcctggcctttcagcttatgataatagtcctagatcaccccatagtccttcacctattgctacaccacctagtcagagttcatcttgctctgatgctcccatgctcagtacagttcactctgcaaaaaatactccttctcagcattcacattccattcagcatagtcctgaaaggtctgggtctggttctgttggaaatggatctagtcgatacagtccttctcagaatagtccaattcatcacatcccttcacgaagaagtcctgcaaagacaatcgcaccacagaatgctccaagagatgagtctaggggccgttcctcgttttatcctgatggtggagatcaggaaactgcaaagactgggaagttcttaaaaaggttcacagatgaagagtctagagtattcctgcttgataggggtaataccagggataaagaggcttcaaaagagaaaggatcagagaaagggagggcagagggagaatgggaagatcaggaagctctagattacttcagtgataaagagtctggaaaacaaaagtttaatgattcagaaggggatgacacagaggagacagaggattatagacagttcaggaagtcagtcctcgcagatcagggtaaaagttttgctactgcatctcaccggaatactgaggaggaaggactcaagtacaagtccaaagtttcactgaaaggcaatagagaaagtgatggatttagagaagaaaaaaattataaacttaaagagactggatatgtagtggaaaggcctagcactacaaaagataagcacaaagaagaagacaaaaattctgaaagaataacagtaaagaaagaaactcagtcacctgagcaggtaaagtctgaaaagctcaaagacctctttgattacagtccccctctacacaagaatctggatgcacgagaaaagtctaccttcagagaggaaagcccacttaggatcaaaatgatagcgagtgattctcaccgtcctgaagtcaaactcaaaatggcacctgttcctcttgatgattctaacagacctgcttccttgactaaagacaggctgcttgctagtacacttgtccattctgtcaagaaggagcaagaattccgatccatctttgaccacattaagttgccacaggccagcaaaagcacttcagagtcatttattcaacacattgtgtccttggttcatcatgttaaagagcaatacttcaagtcagctgcaatgaccctaaacgagcggttcacttcgtatcagaaagccactgaagaacatagtactcggcaaaagagccctgaaatacacaggagaattgacatctcaccaagtaccctgaggaagcatacccgtttagcaggggaagagagagtttttaaagaagaaaatcaaaagggagataaaaaattaaggtgtgactctgctgaccttcggcatgacattgatcgccgtagaaaagaaagaagtaaagaacggggagattccaagggctccagggaatccagtggatcaagaaagcaggaaaaaactccaaaagattacaaggaatacaaatcttacaaagatgacagtaaacataaaagagagcaagatcattctcgatcttcatcctcttcagcatcaccttcttctcccagttctcgagaagaaaaggagagtaagaaggaaagagaagaagaatttaaaactcaccatgaaatgaaagaatactcaggctttgcaggagttagccgaccacgaggaacctttcatgacgacagagatgatggtgtggattattgggccaaaagaggaagaggtcgtggtacttttcaacgtggcagagggcgctttaacttcaaaaaatcaggtagcagtcctaaatggactcatgacaaataccaaggggatgggattgttgaagatgaagaagagaccatggaaaataatgaagaaaagaaggacagacgcaaggaagaaaaggaataataaatatgaagtaagattacaacagagcagaacttgcacccaccattttttttacctgatttttgttttcaaataagaatgtaagcattttacttaaattttactgtttgcaagtagtctatagaaattttgttttaagtcttcaaatatcttgagaaatagtagactgtatgttgaaaattgtactgaaataaagtagaaaattgttacgtaccatatttgtaactatcaacttttaaaacttttaacgtttttgttacatgcattgtaattctgctttgtctataagatatggtcaagtacagctctgtgaaagttctgattctcttccttccctgtttgtcaatgttttattctgaagtaaacgttagctctacatataaatcctggaacagaaattgtttatagagactacactaattattttaactgtatacatctgtttaatttgaacacactacatcgtagggtgactgatttttgaagtataccacagacaaaaagttgttactatggtaaactaagctagtttaacacttgagcaaatgcttaagaaggaattaaaaaaaaaaagctttgccaatagctaaaaagtacaagctattaaaaatcagattgaaaagttttgagaaaatgttatttttactgaaagcaagcagtggcctataaagaacattcttaggagccttttctatttgcgttcaaaactgtgtgttctctttctattcctatttgatagtttgagtcatggtcttagatattagctatttgtgagaggaaactggtttgtaacaatactgcaaatagaaaccccatttctactgaacatcctagttttaaacagaagaaaaactgtaatcctggggttggtatgtaggaggtctatcctgcagaataagttgatacattagtacctgatttcatatcttacatatttatttgagctgaacattagtttgtagtgtaactattagtaaaaatagagaaacacagcatactgttcattaatagtattttaaaaaaattgtttttcaaatgtcaccaataaaagttttggcaggaagcttgttgcggcattgatctaacctttttcccccccatttcagttgcagtttttgtagaatggctttttctttttcctcttaagagttctattcttcaggtagataatttttcaaatgtgaattatcttttgtgtctatattgatagctcttaaaggagtgaaaatctaaaatagtaaatttcaatgttaagtgtctgctttatgggcatatataaaagtagacacatttcatttgttaatttagttgtgtgtgtgtgttaaaaggagctaatgcttattctgttaatgtaaacttttgaagatcttaagtgtattgctctttcatcttaaacactttcgaggatttgcagtgcgtctagcacctagattacagccaggaacattggttaagaactgttggaaacaaaactaaaagcaaactcaacatatgtgatgtttatggccctcagatccttagtattgtgtgattttcccccgttaacatgtctttctaaaattgtctattaaagcagaggaaatacctgccaaaggaagtatgtattgcattaatcagggcataactaatattctcctgttcagaataatacttatttacgtgtgaaagcaacatggatgtgattcccaacacagaattttcatgacccttttattgtatacaaataaataccataacagttacttggttagacatcaaatctgtgtgcatgactatgtgcttatccacttaagacaataggtaaaaggggatctgagaaattatgtaatagggagtgggaataaaactacttaattcctgtgggcaggttatattttaagttcaaatgcattgctttaacctttggttacttttattctgttaaacagaattgaagaaagagtattataccagagtgtagtaggctagggtgattgtaagaactctgtaatagaatgtcattgtggatgttacctttttcagatccaagcatataaaaagcctgtatattttttaaaaacacatcttaactccacgctttacgatattataaaagttgaatggttcctcttggtaaggatatttgcttacaagtgctaggaaataactcactgatacctgcgttaacatactttgttttgcctagagaggggcaataaaaatgaaccaaaggatatttccagaaaggattaagaaagctgtttaagaaggccatgactctttaggtgtgtatgtgtacctttcagcatcctaggaatttttatactaaaagcaaaatgttttttccagttagtcttcttcaaggaattactattgttccttttgtcacaggtaaaatcagtgttggcgcgataacatcacgtatcttatcccctacacgcaccttgaatacaaccaaatctcagttttacttttcacttaatatctgtgatgatacagccaaaaaaattttttttattaagtttggcgatacttacg

SEQ ID NO: 315149 - DNA, 6873 bp, Homo sapiens
tagcggcacccgaggccacgccccgagatcggaagtgacggagacgtgctagcgcgtcgaaggtagctctatggttttcctcgcgttcttgagtcgggaaatggccgctgtgtggttgcaacggagataaattcccggaaccgcgattcggcgtgtcaggaattcgaatttagagtttaatttctcagagcattctctccaggaagaatttttacagtatctcaaagacttcacttgacttcttgatcctgcataaaaccaaggagaaaagaaatgggtcgctccaattctagatcacattcttcaaggtcaaagtctagatcacagtctagttctcgatcaagatcaagatctcattctagaaagaagcgatacagttctaggtctcgttccagaacatattcaaggtctcgtagtagagatcgtatgtattctagagattatcgtcgcgattacagaaataatagaggaatgagacgaccttatgggtacagaggaaggggtagagggtattatcaaggaggaggaggtagatatcatcgaggtggttatagacctgtctggaatagaaggcactctaggagtcctagacgaggtcgttcacgttccaggagtccaaaaagaagatccgtttcttctcaaagatccagaagcagatctcgccggtcatatagatcttctaggtctccaagatcatcctcttctcgttcttcatccccatatagcaaatctcctgtttctaaaagacgagggtctcaggaaaaacaaaccaaaaaagctgaaggggaaccccaagaagagagtccgttgaaaagtaaatcacaggaggaaccgaaagatacatttgaacatgacccatctgagtctatcgatgaatttaataagtcatcagccacatccggtgatatttggcctggcctttcagcttatgataatagtcctagatcaccccatagtccttcacctattgctacaccacctagtcagagttcatcttgctctgatgctcccatgctcagtacagttcactctgcaaaaaatactccttctcagcattcacattccattcagcatagtcctgaaaggtctgggtctggttctgttggaaatggatctagtcgatacagtccttctcagaatagtccaattcatcacatcccttcacgaagaagtcctgcaaagacaatcgcaccacagaatgctccaagagatgagtctaggggccgttcctcgttttatcctgatggtggagatcaggaaactgcaaagactgggaagttcttaaaaaggttcacagatgaagagtctagagtattcctgcttgataggggtaataccagggataaagaggcttcaaaagagaaaggatcagagaaagggagggcagagggagaatgggaagatcaggaagctctagattacttcagtgataaagagtctggaaaacaaaagtttaatgattcagaaggggatgacacagaggagacagaggattatagacagttcaggaagtcagtcctcgcagatcagggtaaaagttttgctactgcatctcaccggaatactgaggaggaaggactcaagtacaagtccaaagtttcactgaaaggcaatagagaaagtgatggatttagagaagaaaaaaattataaacttaaagagactggatatgtagtggaaaggcctagcactacaaaagataagcacaaagaagaagacaaaaattctgaaagaataacagtaaagaaagaaactcagtcacctgagcaggtaaagtctgaaaagctcaaagacctctttgattacagtccccctctacacaagaatctggatgcacgagaaaagtctaccttcagagaggaaagcccacttaggatcaaaatgatagcgagtgattctcaccgtcctgaagtcaaactcaaaatggcacctgttcctcttgatgattctaacagacctgcttccttgactaaagacaggctgcttgctagtacacttgtccattctgtcaagaaggagcaagaattccgatccatctttgaccacattaagttgccacaggccagcaaaagcacttcagagtcatttattcaacacattgtgtccttggttcatcatgttaaagagcaatacttcaagtcagctgcaatgaccctaaacgagcggttcacttcgtatcagaaagccactgaagaacatagtactcggcaaaagagccctgaaatacacaggagaattgacatctcaccaagtaccctgaggaagcatacccgtttagcaggggaagagagagtttttaaagaagaaaatcaaaagggagataaaaaattaaggtgtgactctgctgaccttcggcatgacattgatcgccgtagaaaagaaagaagtaaagaacggggagattccaagggctccagggaatccagtggatcaagaaagcaggaaaaaactccaaaagattacaaggaatacaaatcttacaaagatgacagtaaacataaaagagagcaagatcattctcgatcttcatcctcttcagcatcaccttcttctcccagttctcgagaagaaaaggagagtaagaaggaaagagaagaagaatttaaaactcaccatgaaatgaaagaatactcaggctttgcaggagttagccgaccacgaggaacctttcatgacgacagagatgatggtgtggattattgggccaaaagaggaagaggtcgtggtacttttcaacgtggcagagggcgctttaacttcaaaaaatcaggtagcagtcctaaatggactcatgacaaataccaaggggatgggattgttgaagatgaagaagagaccatggaaaataatgaagaaaagaaggacagacgcaaggaagaaaaggaataataaatatgaagtaagattacaacagagcagaacttgcacccaccattttttttacctgatttttgttttcaaataagaatgtaagcattttacttaaattttactgtttgcaagtagtctatagaaattttgttttaagtcttcaaatatcttgagaaatagtagactgtatgttgaaaattgtactgaaataaagtagaaaattgttacgtaccatatttgtaactatcaacttttaaaacttttaacgtttttgttacatgcattgtaattctgctttgtctataagatatggtcaagtacagctctgtgaaagttctgattctcttccttccctgtttgtcaatgttttattctgaagtaaacgttagctctacatataaatcctggaacagaaattgtttatagagactacactaattattttaactgtatacatctgtttaatttgaacacactacatcgtagggtgactgatttttgaagtataccacagacaaaaagttgttactatggtaaactaagctagtttaacacttgagcaaatgcttaagaaggaattaaaaaaaaaaagctttgccaatagctaaaaagtacaagctattaaaaatcagattgaaaagttttgagaaaatgttatttttactgaaagcaagcagtggcctataaagaacattcttaggagccttttctatttgcgttcaaaactgtgtgttctctttctattcctatttgatagtttgagtcatggtcttagatattagctatttgtgagaggaaactggtttgtaacaatactgcaaatagaaaccccatttctactgaacatcctagttttaaacagaagaaaaactgtaatcctggggttggtatgtaggaggtctatcctgcagaataagttgatacattagtacctgatttcatatcttacatatttatttgagctgaacattagtttgtagtgtaactattagtaaaaatagagaaacacagcatactgttcattaatagtattttaaaaaaattgtttttcaaatgtcaccaataaaagttttggcaggaagcttgttgcggcattgatctaacctttttcccccccatttcagttgcagtttttgtagaatggctttttctttttcctcttaagagttctattcttcaggtagataatttttcaaatgtgaattatcttttgtgtctatattgatagctcttaaaggagtgaaaatctaaaatagtaaatttcaatgttaagtgtctgctttatgggcatatataaaagtagacacatttcatttgttaatttagttgtgtgtgtgtgttaaaaggagctaatgcttattctgttaatgtaaacttttgaagatcttaagtgtattgctctttcatcttaaacactttcgaggatttgcagtgcgtctagcacctagattacagccaggaacattggttaagaactgttggaaacaaaactaaaagcaaactcaacatatgtgatgtttatggccctcagatccttagtattgtgtgattttcccccgttaacatgtctttctaaaattgtctattaaagcagaggaaatacctgccaaaggaagtatgtattgcattaatcagggcataactaatattctcctgttcagaataatacttatttacgtgtgaaagcaacatggatgtgattcccaacacagaattttcatgacccttttattgtatacaaataaataccataacagttacttggttagacatcaaatctgtgtgcatgactatgtgcttatccacttaagacaataggtaaaaggggatctgagaaattatgtaatagggagtgggaataaaactacttaattcctgtgggcaggttatattttaagttcaaatgcattgctttaacctttggttacttttattctgttaaacagaattgaagaaagagtattataccagagtgtagtaggctagggtgattgtaagaactctgtaatagaatgtcattgtgtgtatgtgtacctttcagcatcctaggaatttttatactaaaagcaaaatgttttttccagttagtcttcttcaaggaattactattgttccttttgtcacaggtaaaatcagtgttgggaattataatttgagaaaaatattacccagtaacattgaatgtagatggctaaacgattcttactcagtgtgatgtataatgatgcaacagggacccttgtaaattgtcatacgccaataaaatgtcacaagtaataactgctgttgtttgtttacctgtgtctatttcacacatcttatttctgtggcctattttagaatatcagcgcatctgttaggaagattactggtgtggtaaggcttgataaatgctttataaactccctcaaacctttctttactgtttttttgttttgtcttgtttttgtttttgtttttgtttttgttttttcccttgtctcccctgggaaaatgggaaattttacagttggtaaatctaagccaaaattattttgaaataaaggaattctggatgtccagtttagtcctcgttttcttacgttaatctgggaccttatcacccataatatggtgattacttctctttctaaaaacatagtagctagtaaataagtaaaaagaattgtcttttcattcactttaagtaagatgtggtataattcttaccatgtgccatcctgtcagttttaacaaagcattttcacagaaatttgtgtactaagacaaactgacacattttgactcatacaaatggcaaattagtccttaaaaattctgtgagagaaataactctgtgtgtacatacatatgcatgtaaagtgttgtgtaagatcattggtagcttaattatactggataattgtaatgttatatacaaatttcttatataaaagtatgctgcattattaacatttgtttaacttttcttatttttctttttctgggtttcaactggaatcccattggtggggatgtaccttaagtttccttgtggaataatagactttcacatccagaaagagaagttcagaggcctttctcaatttacagagttgaagaggaaaggcaaatggaggaataaacttcattgtcattgggattaatttggctagactcaatctcttgagccctaaaatgagaaagtaatatccattacatgtttagagttctcaaatagttgatactattattaaatgtttcaaattttattggggtagatactaaaaattagtacactgtcctaatgaagtttaaatgaacaagttttacatttcttaggattcaggaatatatggaatctagttgtatttaattgacttgagagccacagagattgtgttgatttatgagctggactcctattgttttagaaacatgcagtaatgattaacttgtgtcaatgatggtaatgagaccaaacttgtacatttaattaagggtaccagttctttttatgttactagactataccttggcctttaaaaatgaatctcactgattaaagagaacaggcattattaggatagcattccaccacaactagaaacattcaaataatgtgtcttaattgtaatctgtatataggaaaatttttcctatggatatttttggtgttttaccacagtgaactgatttgtagcacttatgaagtgcagaaggtaatattcttgaaaatagaaaaaggttgggtgagcaggctttaatgcctttcccccaagaatatacatcgaatttttcttaatcttttggggttggccagcttccagatttcattaataatgagctctgcctttaataaaagtacatgatcatagctacactgtatgtttaggtggtgtgaaatgatttataatcacagcttgaactgtgtttgcttggtactgtcatagtgattacaaatttcatggaatgcgaagagcaacaataaataaaaaataccactcaccctccagaatagtg

SEQ ID NO: 315150 - DNA, 3346 bp, Homo sapiens
  misc_feature (325)..(325): n is a, c, g, or t
cggggcgcgcaaaatttcgaaaattctgagggcgctctcctttgtggagaactcccctcgcggtttaaatagaagacctcccctgagttatttagccccctctctgagaactcctccccactcttgtgggagatttttgttctccaaaaaaaacacgcctcctgggtgtgtctccccccccgggcgcgcgcttttttatataactctggtgtgagagaaaaatccccaacacccaccctgtttgtgctctcttggcccccgggtgttctctctctgggaacacccgtctttggcgccacatgtgttcgccttgatcacctcctgnggtgcccgcgcgcggcgcccacacccgaagtgggtctcttcaaacagagtcttcttcggaggtcccagggcgcgcgccgcagcaaagcttttttttgttcttctttgtttgtttgcttcgtgttggccccatatccacaccatcatctctgtcgtcatgcaagaagtacttcttgtgggacaaatactggtccaaacaactcaaatactacttttcaaaagagaccgaaggaagaggaatgggatccagaatataccccaaagagcaagaagtacttcttgcatgacgacagagatgatggtgtggattattgggccaaaagaggaagaggtcgtggtacttttcaacgtggcagagggcgctttaacttcaaaaaatcaggtagcagtcctaaatggactcatgacaaataccaaggggatgggattgttgaagatgaagaagagaccatggaaaataatgaagaaaagaaggacagacgcaaggaagaaaaggaataataaatatgaagtaagattacaacagagcagaacttgcacccaccattttttttacctgatttttgttttcaaataagaatgtaagcattttacttaaattttactgtttgcaagtagtctatagaaattttgttttaagtcttcaaatatcttgagaaatagtagactgtatgttgaaaattgtactgaaataaagtagaaaattgttacgtaccatatttgtaactatcaacttttaaaacttttaacgtttttgttacatgcattgtaattctgctttgtctataagatatggtcaagtacagctctgtgaaagttctgattctcttccttccctgtttgtcaatgttttattctgaagtaaacgttagctctacatataaatcctggaacagaaattgtttatagagactacactaattattttaactgtatacatctgtttaatttgaacacactacatcgtagggtgactgatttttgaagtataccacagacaaaaagttgttactatggtaaactaagctagtttaacacttgagcaaatgcttaagaaggaattaaaaaaaaaaagctttgccaatagctaaaaagtacaagctattaaaaatcagattgaaaagttttgagaaaatgttatttttactgaaagcaagcagtggcctataaagaacattcttaggagccttttctatttgcgttcaaaactgtgtgttctctttctattcctatttgatagtttgagtcatggtcttagatattagctatttgtgagaggaaactggtttgtaacaatactgcaaatagaaaccccatttctactgaacatcctagttttaaacagaagaaaaactgtaatcctggggttggtatgtaggaggtctatcctgcagaataagttgatacattagtacctgatttcatatcttacatatttatttgagctgaacattagtttgtagtgtaactattagtaaaaatagagaaacacagcatactgttcattaatagtattttaaaaaaattgtttttcaaatgtcaccaataaaagttttggcaggaagcttgttgcggcattgatctaacctttttcccccccatttcagttgcagtttttgtagaatggctttttctttttcctcttaagagttctattcttcaggtagataatttttcaaatgtgaattatcttttgtgtctatattgatagctcttaaaggagtgaaaatctaaaatagtaaatttcaatgttaagtgtctgctttatgggcatatataaaagtagacacatttcatttgttaatttagttgtgtgtgtgtgttaaaaggagctaatgcttattctgttaatgtaaacttttgaagatcttaagtgtattgctctttcatcttaaacactttcgaggatttgcagtgcgtctagcacctagattacagccaggaacattggttaagaactgttggaaacaaaactaaaagcaaactcaacatatgtgatgtttatggccctcagatccttagtattgtgtgattttcccccgttaacatgtctttctaaaattgtctattaaagcagaggaaatacctgccaaaggaagtatgtattgcattaatcagggcataactaatattctcctgttcagaataatacttatttacgtgtgaaagcaacatggatgtgattcccaacacagaattttcatgacccttttattgtatacaaataaataccataacagttacttggttagacatcaaatctgtgtgcatgactatgtgcttatccacttaagacaataggtaaaaggggatctgagaaattatgtaatagggagtgggaataaaactacttaattcctgtgggcaggttatattttaagttcaaatgcattgctttaacctttggttacttttattctgttaaacagaattgaagaaagagtattataccagagtgtagtaggctagggtgattgtaagaactctgtaatagaatgtcattgtggatgttacctttttcagatccaagcatataaaaagcctgtatattttttaaaaacacatcttaactccacgctttacgatattataaaagttgaatggttcctcttggtaaggatatttgcttacaagtgctaggaaataactcactgatacctgcgttaacatactttgttttgcctagagaggggcaataaaaatgaaccaaaggatatttccagaaaggattaagaaagctgtttaagaaggccatgactctttaggtgtgtatgtgtacctttcagcatcctaggaatttttatactaaaagcaaaatgttttttccagttagtcttcttcaaggaattactattgttccttttgtcacaggtaaaatcagtgttgggaattataatttgagaaaaatattacccagtaacattgaatgtagatggctaaacgattcttactcagtgtgatgtataatgatgcaacagggacccttgtaaattgtcatacgccaataaaatgtcacaagtaa

SEQ ID NO: 315151 - DNA, 2805 bp, Homo sapiens
  misc_feature (63)..(63): n is a, c, g, or t
  misc_feature (65)..(65): n is a, c, g, or t
atcggacgaatgttgagactgcggagaatccagggaacagaatcaggccttgcatggaacacngncatgacgacagagatgatggtgtggattattgggccaaaagaggaagaggtcgtggtacttttcaacgtggcagagggcgctttaacttcaaaaaatcaggtagcagtcctaaatggactcatgacaaataccaaggggatgggattgttgaagatgaagaagagaccatggaaaataatgaagaaaagaaggacagacgcaaggaagaaaaggaataataaatatgaagtaagattacaacagagcagaacttgcacccaccattttttttacctgatttttgttttcaaataagaatgtaagcattttacttaaattttactgtttgcaagtagtctatagaaattttgttttaagtcttcaaatatcttgagaaatagtagactgtatgttgaaaattgtactgaaataaagtagaaaattgttacgtaccatatttgtaactatcaacttttaaaacttttaacgtttttgttacatgcattgtaattctgctttgtctataagatatggtcaagtacagctctgtgaaagttctgattctcttccttccctgtttgtcaatgttttattctgaagtaaacgttagctctacatataaatcctggaacagaaattgtttatagagactacactaattattttaactgtatacatctgtttaatttgaacacactacatcgtagggtgactgatttttgaagtataccacagacaaaaagttgttactatggtaaactaagctagtttaacacttgagcaaatgcttaagaaggaattaaaaaaaaaaagctttgccaatagctaaaaagtacaagctattaaaaatcagattgaaaagttttgagaaaatgttatttttactgaaagcaagcagtggcctataaagaacattcttaggagccttttctatttgcgttcaaaactgtgtgttctctttctattcctatttgatagtttgagtcatggtcttagatattagctatttgtgagaggaaactggtttgtaacaatactgcaaatagaaaccccatttctactgaacatcctagttttaaacagaagaaaaactgtaatcctggggttggtatgtaggaggtctatcctgcagaataagttgatacattagtacctgatttcatatcttacatatttatttgagctgaacattagtttgtagtgtaactattagtaaaaatagagaaacacagcatactgttcattaatagtattttaaaaaaattgtttttcaaatgtcaccaataaaagttttggcaggaagcttgttgcggcattgatctaacctttttcccccccatttcagttgcagtttttgtagaatggctttttctttttcctcttaagagttctattcttcaggtagataatttttcaaatgtgaattatcttttgtgtctatattgatagctcttaaaggagtgaaaatctaaaatagtaaatttcaatgttaagtgtctgctttatgggcatatataaaagtagacacatttcatttgttaatttagttgtgtgtgtgtgttaaaaggagctaatgcttattctgttaatgtaaacttttgaagatcttaagtgtattgctctttcatcttaaacactttcgaggatttgcagtgcgtctagcacctagattacagccaggaacattggttaagaactgttggaaacaaaactaaaagcaaactcaacatatgtgatgtttatggccctcagatccttagtattgtgtgattttcccccgttaacatgtctttctaaaattgtctattaaagcagaggaaatacctgccaaaggaagtatgtattgcattaatcagggcataactaatattctcctgttcagaataatacttatttacgtgtgaaagcaacatggatgtgattcccaacacagaattttcatgacccttttattgtatacaaataaataccataacagttacttggttagacatcaaatctgtgtgcatgactatgtgcttatccacttaagacaataggtaaaaggggatctgagaaattatgtaatagggagtgggaataaaactacttaattcctgtgggcaggttatattttaagttcaaatgcattgctttaacctttggttacttttattctgttaaacagaattgaagaaagagtattataccagagtgtagtaggctagggtgattgtaagaactctgtaatagaatgtcattgtggatgttacctttttcagatccaagcatataaaaagcctgtatattttttaaaaacacatcttaactccacgctttacgatattataaaagttgaatggttcctcttggtaaggatatttgcttacaagtgctaggaaataactcactgatacctgcgttaacatactttgttttgcctagagaggggcaataaaaatgaaccaaaggatatttccagaaaggattaagaaagctgtttaagaaggccatgactctttaggtgtgtatgtgtacctttcagcatcctaggaatttttatactaaaagcaaaatgttttttccagttagtcttcttcaaggaattactattgttccttttgtcacaggtaaaatcagtgttgggaattataatttgagaaaaatattacccagtaacattgaatgtagatggctaaacgattcttactcagtgtgatgtataatgatgcaacagggacccttgtaaattgtcatacgccaataaaatgtcacaagtaa

SEQ ID NO: 315152 - DNA, 2798 bp, Homo sapiens
  misc_feature (38)..(38): n is a, c, g, or t
  misc_feature (40)..(40): n is a, c, g, or t
  misc_feature (42)..(42): n is a, c, g, or t
ttagttacgcggatcgcccgggcggctgggaggggttntntnctcacatgtaccacgccatgacgacagagatgatggtgtggattattgggccaaaagaggaagaggtcgtggtacttttcaacgtggcagagggcgctttaacttcaaaaaatcaggtagcagtcctaaatggactcatgacaaataccaaggggatgggattgttgaagatgaagaagagaccatggaaaataatgaagaaaagaaggacagacgcaaggaagaaaaggaataataaatatgaagtaagattacaacagagcagaacttgcacccaccattttttttacctgatttttgttttcaaataagaatgtaagcattttacttaaattttactgtttgcaagtagtctatagaaattttgttttaagtcttcaaatatcttgagaaatagtagactgtatgttgaaaattgtactgaaataaagtagaaaattgttacgtaccatatttgtaactatcaacttttaaaacttttaacgtttttgttacatgcattgtaattctgctttgtctataagatatggtcaagtacagctctgtgaaagttctgattctcttccttccctgtttgtcaatgttttattctgaagtaaacgttagctctacatataaatcctggaacagaaattgtttatagagactacactaattattttaactgtatacatctgtttaatttgaacacactacatcgtagggtgactgatttttgaagtataccacagacaaaaagttgttactatggtaaactaagctagtttaacacttgagcaaatgcttaagaaggaattaaaaaaaaaaagctttgccaatagctaaaaagtacaagctattaaaaatcagattgaaaagttttgagaaaatgttatttttactgaaagcaagcagtggcctataaagaacattcttaggagccttttctatttgcgttcaaaactgtgtgttctctttctattcctatttgatagtttgagtcatggtcttagatattagctatttgtgagaggaaactggtttgtaacaatactgcaaatagaaaccccatttctactgaacatcctagttttaaacagaagaaaaactgtaatcctggggttggtatgtaggaggtctatcctgcagaataagttgatacattagtacctgatttcatatcttacatatttatttgagctgaacattagtttgtagtgtaactattagtaaaaatagagaaacacagcatactgttcattaatagtattttaaaaaaattgtttttcaaatgtcaccaataaaagttttggcaggaagcttgttgcggcattgatctaacctttttcccccccatttcagttgcagtttttgtagaatggctttttctttttcctcttaagagttctattcttcaggtagataatttttcaaatgtgaattatcttttgtgtctatattgatagctcttaaaggagtgaaaatctaaaatagtaaatttcaatgttaagtgtctgctttatgggcatatataaaagtagacacatttcatttgttaatttagttgtgtgtgtgtgttaaaaggagctaatgcttattctgttaatgtaaacttttgaagatcttaagtgtattgctctttcatcttaaacactttcgaggatttgcagtgcgtctagcacctagattacagccaggaacattggttaagaactgttggaaacaaaactaaaagcaaactcaacatatgtgatgtttatggccctcagatccttagtattgtgtgattttcccccgttaacatgtctttctaaaattgtctattaaagcagaggaaatacctgccaaaggaagtatgtattgcattaatcagggcataactaatattctcctgttcagaataatacttatttacgtgtgaaagcaacatggatgtgattcccaacacagaattttcatgacccttttattgtatacaaataaataccataacagttacttggttagacatcaaatctgtgtgcatgactatgtgcttatccacttaagacaataggtaaaaggggatctgagaaattatgtaatagggagtgggaataaaactacttaattcctgtgggcaggttatattttaagttcaaatgcattgctttaacctttggttacttttattctgttaaacagaattgaagaaagagtattataccagagtgtagtaggctagggtgattgtaagaactctgtaatagaatgtcattgtggatgttacctttttcagatccaagcatataaaaagcctgtatattttttaaaaacacatcttaactccacgctttacgatattataaaagttgaatggttcctcttggtaaggatatttgcttacaagtgctaggaaataactcactgatacctgcgttaacatactttgttttgcctagagaggggcaataaaaatgaaccaaaggatatttccagaaaggattaagaaagctgtttaagaaggccatgactctttaggtgtgtatgtgtacctttcagcatcctaggaatttttatactaaaagcaaaatgttttttccagttagtcttcttcaaggaattactattgttccttttgtcacaggtaaaatcagtgttgggaattataatttgagaaaaatattacccagtaacattgaatgtagatggctaaacgattcttactcagtgtgatgtataatgatgcaacagggacccttgtaaattgtcatacgccaataaaatgtcacaagtaa

SEQ ID NO: 315153 - DNA, 3240 bp, Homo sapiens
  misc_feature (325)..(325): n is a, c, g, or t
cggggcgcgcaaaatttcgaaaattctgagggcgctctcctttgtggagaactcccctcgcggtttaaatagaagacctcccctgagttatttagccccctctctgagaactcctccccactcttgtgggagatttttgttctccaaaaaaaacacgcctcctgggtgtgtctccccccccgggcgcgcgcttttttatataactctggtgtgagagaaaaatccccaacacccaccctgtttgtgctctcttggcccccgggtgttctctctctgggaacacccgtctttggcgccacatgtgttcgccttgatcacctcctgnggtgcccgcgcgcggcgcccacacccgaagtgggtctcttcaaacagagtcttcttcggaggtcccagggcgcgcgccgcagcaaagcttttttttgttcttctttgtttgtttgcttcgtgttggccccatatccacaccatcatctctgtcgtcatgcaagaagtacttcttgcatgacgacagagatgatggtgtggattattgggccaaaagaggaagaggtcgtggtacttttcaacgtggcagagggcgctttaacttcaaaaaatcaggtagcagtcctaaatggactcatgacaaataccaaggggatgggattgttgaagatgaagaagagaccatggaaaataatgaagaaaagaaggacagacgcaaggaagaaaaggaataataaatatgaagtaagattacaacagagcagaacttgcacccaccattttttttacctgatttttgttttcaaataagaatgtaagcattttacttaaattttactgtttgcaagtagtctatagaaattttgttttaagtcttcaaatatcttgagaaatagtagactgtatgttgaaaattgtactgaaataaagtagaaaattgttacgtaccatatttgtaactatcaacttttaaaacttttaacgtttttgttacatgcattgtaattctgctttgtctataagatatggtcaagtacagctctgtgaaagttctgattctcttccttccctgtttgtcaatgttttattctgaagtaaacgttagctctacatataaatcctggaacagaaattgtttatagagactacactaattattttaactgtatacatctgtttaatttgaacacactacatcgtagggtgactgatttttgaagtataccacagacaaaaagttgttactatggtaaactaagctagtttaacacttgagcaaatgcttaagaaggaattaaaaaaaaaaagctttgccaatagctaaaaagtacaagctattaaaaatcagattgaaaagttttgagaaaatgttatttttactgaaagcaagcagtggcctataaagaacattcttaggagccttttctatttgcgttcaaaactgtgtgttctctttctattcctatttgatagtttgagtcatggtcttagatattagctatttgtgagaggaaactggtttgtaacaatactgcaaatagaaaccccatttctactgaacatcctagttttaaacagaagaaaaactgtaatcctggggttggtatgtaggaggtctatcctgcagaataagttgatacattagtacctgatttcatatcttacatatttatttgagctgaacattagtttgtagtgtaactattagtaaaaatagagaaacacagcatactgttcattaatagtattttaaaaaaattgtttttcaaatgtcaccaataaaagttttggcaggaagcttgttgcggcattgatctaacctttttcccccccatttcagttgcagtttttgtagaatggctttttctttttcctcttaagagttctattcttcaggtagataatttttcaaatgtgaattatcttttgtgtctatattgatagctcttaaaggagtgaaaatctaaaatagtaaatttcaatgttaagtgtctgctttatgggcatatataaaagtagacacatttcatttgttaatttagttgtgtgtgtgtgttaaaaggagctaatgcttattctgttaatgtaaacttttgaagatcttaagtgtattgctctttcatcttaaacactttcgaggatttgcagtgcgtctagcacctagattacagccaggaacattggttaagaactgttggaaacaaaactaaaagcaaactcaacatatgtgatgtttatggccctcagatccttagtattgtgtgattttcccccgttaacatgtctttctaaaattgtctattaaagcagaggaaatacctgccaaaggaagtatgtattgcattaatcagggcataactaatattctcctgttcagaataatacttatttacgtgtgaaagcaacatggatgtgattcccaacacagaattttcatgacccttttattgtatacaaataaataccataacagttacttggttagacatcaaatctgtgtgcatgactatgtgcttatccacttaagacaataggtaaaaggggatctgagaaattatgtaatagggagtgggaataaaactacttaattcctgtgggcaggttatattttaagttcaaatgcattgctttaacctttggttacttttattctgttaaacagaattgaagaaagagtattataccagagtgtagtaggctagggtgattgtaagaactctgtaatagaatgtcattgtggatgttacctttttcagatccaagcatataaaaagcctgtatattttttaaaaacacatcttaactccacgctttacgatattataaaagttgaatggttcctcttggtaaggatatttgcttacaagtgctaggaaataactcactgatacctgcgttaacatactttgttttgcctagagaggggcaataaaaatgaaccaaaggatatttccagaaaggattaagaaagctgtttaagaaggccatgactctttaggtgtgtatgtgtacctttcagcatcctaggaatttttatactaaaagcaaaatgttttttccagttagtcttcttcaaggaattactattgttccttttgtcacaggtaaaatcagtgttgggaattataatttgagaaaaatattacccagtaacattgaatgtagatggctaaacgattcttactcagtgtgatgtataatgatgcaacagggacccttgtaaattgtcatacgccaataaaatgtcacaagtaa

SEQ ID NO: 315154 - DNA, 3951 bp, Homo sapiens
tagcggcacccgaggccacgccccgagatcggaagtgacggagacgtgctagcgcgtcgaaggtagctctatggttttcctcgcgttcttgagtcgggaaatggccgctgtgtggttgcaacggagataaattcccggaaccgcgattcggcgtgtcaggaattcgaatttagagtttaatttctcagagcattctctccaggaagaatttttacagtatctcaaagacttcacttgacttcttgatcctgcataaaaccaaggagaaaagaaatgggtcgctccaattctagatcacattcttcaaggtcaaagtctagatcacagtctagttctcgatcaagatcaagatctcattctagaaagaagcgatacagttctaggtctcgttccagaacatattcaaggtctcgtagtagagatcgtatgtattctagagattatcgtcgcgattacagaaataatagaggaatgagacgaccttatgggtacagaggaaggggtagagggtattatcaaggaggaggaggtagatatcatcgaggtggttatagacctgtctggaatagaaggcactctaggagtcctagacgaggtcgttcacgttccaggagtccaaaaagaagatccgtttcttctcaaagatccagaagcagatctcgccggtcatatagatcttctaggtctccaagatcatcctcttctcgttcttcatccccatatagcaaatctcctgtttctaaaagacgagggtctcaggaaaaacaaaccaaaaaagctgaaggggaaccccaagaagagagtccgttgaaaagtaaatcacaggaggaaccgaaagatacatttgaacatgacccatctgagtctatcgatgaatttaataagtcatcagccacatccggtgatatttggcctggcctttcagcttatgataatagtcctagatcaccccatagtccttcacctattgctacaccacctagtcagagttcatcttgctctgatgctcccatgctcagtacagttcactctgcaaaaaatactccttctcagcattcacattccattcagcatagtcctgaaaggtctgggtctggttctgttggaaatggatctagtcgatacagtccttctcagaatagtccaattcatcacatcccttcacgaagaagtcctgcaaagacaatcgcaccacagaatgctccaagagatgagtctaggggccgttcctcgttttatcctgatggtggagatcaggaaactgcaaagactgggaagttcttaaaaaggttcacagatgaagagtctagagtattcctgcttgataggggtaataccagggataaagaggcttcaaaagagaaaggatcagagaaagggagggcagagggagaatgggaagatcaggaagctctagattacttcagtgataaagagtctggaaaacaaaagtttaatgattcagaaggggatgacacagaggagacagaggattatagacagttcaggaagtcagtcctcgcagatcagggtaaaagttttgctactgcatctcaccggaatactgaggaggaaggactcaagtacaagtccaaagtttcactgaaaggcaatagagaaagtgatggatttagagaagaaaaaaattataaacttaaagagactggatatgtagtggaaaggcctagcactacaaaagataagcacaaagaagaagacaaaaattctgaaagaataacagtaaagaaagaaactcagtcacctgagcaggtaaagtctgaaaagctcaaagacctctttgattacagtccccctctacacaagaatctggatgcacgagaaaagtctaccttcagagaggaaagcccacttaggatcaaaatgatagcgagtgattctcaccgtcctgaagtcaaactcaaaatggcacctgttcctcttgatgattctaacagacctgcttccttgactaaagacaggctgcttgctagtacacttgtccattctgtcaagaaggagcaagaattccgatccatctttgaccacattaagttgccacaggccagcaaaagcacttcagagtcatttattcaacacattgtgtccttggttcatcatgttaaagagcaatacttcaagtcagctgcaatgaccctaaacgagcggttcacttcgtatcagaaagccactgaagaacatagtactcggcaaaagagccctgaaatacacaggagaattgacatctcaccaagtaccctgaggaagcatacccgtttagcaggggaagagagagtttttaaagaagaaaatcaaaagggagataaaaaattaaggtgtgactctgctgaccttcggcatgacattgatcgccgtagaaaagaaagaagtaaagaacggggagattccaagggctccagggaatccagtggatcaagaaagcaggaaaaaactccaaaagattacaaggaatacaaatcttacaaagatgacagtaaacataaaagagagcaagatcattctcgatcttcatcctcttcagcatcaccttcttctcccagttctcgagaagaaaaggagagtaagaaggaaagagaagaagaatttaaaactcaccatgaaatgaaagaatactcaggctttgcaggagttagccgaccacgaggaacctttcatgacgacagagatgatggtgtggattattgggccaaaagaggaagaggtcgtggtacttttcaacgtggcagagggcgctttaacttcaaaaaatcaggtagcagtcctaaatggactcatgacaaataccaaggggatgggattgttgaagatgaagaagagaccatggaaaataatgaagaaaagaaggacagacgcaaggaagaaaaggaataataaatatgaagtaagattacaacagagcagaacttgcacccaccattttttttacctgatttttgttttcaaataagaatgtaagcattttacttaaattttactgtttgcaagtagtctatagaaattttgttttaagtcttcaaatatcttgagaaatagtagactgtatgttgaaaattgtactgaaataaagtagaaaattgttacgtaccatatttgtaactatcaacttttaaaacttttaacgtttttgttacatgcattgtaattctgctttgtctataagatatggtcaagtacagctctgtgaaagttctgattctcttccttccctgtttgtcaatgttttattctgaagtaaacgttagctctacatataaatcctggaacagaaattgtttatagagactacactaattattttaactgtatacatctgtttaatttgaacacactacatcgtagggtgactgatttttgaagtataccacagacaaaaagttgttactatggtaaactaagctagtttaacacttgagcaaatgcttaagaaggaattaaaaaaaaaaagctttgccaatagctaaaaagtacaagctattaaaaatcagattgaaaagttttgagaaaatgttatttttactgaaagcaagcagtggcctataaagaacattcttaggagccttttctatttgcgttcaaaactgtgtgttctctttctattcctatttgatagtttgagtcatggtcttagatattagctatttgtgagaggaaactggtttgtaacaatactgcaaatagaaaccccatttctactgaacatcctagttttaaacagaagaaaaactgtaatcctggggttggtatgtaggaggtctatcctgcagaataagttgatacattagtacctgatttcatatcttacatatttatttgagctgaacattagtttgtagtgtaactattagtaaaaatagagaaacacagcatactgttcattaatagtattttaaaaaaattgtttttcaaatgtcaccaataaaagttttggcagga

SEQ ID NO: 315155 - DNA, 1822 bp, Homo sapiens
aactaggatgttcagtagaaatggggtttctatttgcagtatgttacaaaccagtttcctctcacaaatagctaatatctaagaccatgactcaaactatgcaaatagaaaccccatttctactgaacatcctagttttaaacagaagaaaaactgtaatcctggggttggtatgtaggaggtctatcctgcagaataagttgatacattagtacctgatttcatatcttacatatttatttgagctgaacattagtttgtagtgtaactattagtaaaaatagagaaacacagcatactgttcattaatagtattttaaaaaaattgtttttcaaatgtcaccaataaaagttttggcaggaagcttgttgcggcattgatctaacctttttcccccccatttcagttgcagtttttgtagaatggctttttctttttcctcttaagagttctattcttcaggtagataatttttcaaatgtgaattatcttttgtgtctatattgatagctcttaaaggagtgaaaatctaaaatagtaaatttcaatgttaagtgtctgctttatgggcatatataaaagtagacacatttcatttgttaatttagttgtgtgtgtgtgttaaaaggagctaatgcttattctgttaatgtaaacttttgaagatcttaagtgtattgctctttcatcttaaacactttcgaggatttgcagtgcgtctagcacctagattacagccaggaacattggttaagaactgttggaaacaaaactaaaagcaaactcaacatatgtgatgtttatggccctcagatccttagtattgtgtgattttcccccgttaacatgtctttctaaaattgtctattaaagcagaggaaatacctgccaaaggaagtatgtattgcattaatcagggcataactaatattctcctgttcagaataatacttatttacgtgtgaaagcaacatggatgtgattcccaacacagaattttcatgacccttttattgtatacaaataaataccataacagttacttggttagacatcaaatctgtgtgcatgactatgtgcttatccacttaagacaataggtaaaaggggatctgagaaattatgtaatagggagtgggaataaaactacttaattcctgtgggcaggttatattttaagttcaaatgcattgctttaacctttggttacttttattctgttaaacagaattgaagaaagagtattataccagagtgtagtaggctagggtgattgtaagaactctgtaatagaatgtcattgtggatgttacctttttcagatccaagcatataaaaagcctgtatattttttaaaaacacatcttaactccacgctttacgatattataaaagttgaatggttcctcttggtaaggatatttgcttacaagtgctaggaaataactcactgatacctgcgttaacatactttgttttgcctagagaggggcaataaaaatgaaccaaaggatatttccagaaaggattaagaaagctgtttaagaaggccatgactctttaggtgtgtatgtgtacctttcagcatcctaggaatttttatactaaaagcaaaatgttttttccagttagtcttcttcaaggaattactattgttccttttgtcacaggtaaaatcagtgttgggaattataatttgagaaaaatattacccagtaacattgaatgtagatggctaaacgattcttactcagtgtgatgtataatgatgcaacagggacccttgtaaattgtcatacgccaataaaatgtcacaagtaa

SEQ ID NO: 315156 - DNA, 3073 bp, Homo sapiens
tagcggcacccgaggccacgccccgagatcggaagtgacggagacgtgctagcgcgtcgaaggtagctctatggttttcctcgcgttcttgagtcgggaaatggccgctgtgtggttgcaacggagataaattcccggaaccgcgattcggcgtgtcaggaattcgaatttagagtttaatttctcagagcattctctccaggaagaatttttacagtatctcaaagacttcacttgacttcttgatcctgcataaaaccaaggagaaaagaaatgggtcgctccaattctagatcacattcttcaaggtcaaagtctagatcacagtctagttctcgatcaagatcaagatctcattctagaaagaagcgatacagttctaggtctcgttccagaacatattcaaggtctcgtagtagagatcgtatgtattctagagattatcgtcgcgattacagaaataatagaggaatgagacgaccttatgggtacagaggaaggggtagagggtattatcaaggaggaggaggtagatatcatcgaggtggttatagacctgtctggaatagaaggcactctaggagtcctagacgaggtcgttcacgttccaggagtccaaaaagaagatccgtttcttctcaaagatccagaagcagatctcgccggtcatatagatcttctaggtctccaagatcatcctcttctcgttcttcatccccatatagcaaatctcctgtttctaaaagacgagggtctcaggaaaaacaaaccaaaaaagctgaaggggaaccccaagaagagagtccgttgaaaagtaaatcacaggaggaaccgaaagatacatttgaacatgacccatctgagtctatcgatgaatttaataagtcatcagccacatccggtgatatttggcctggcctttcagcttatgataatagtcctagatcaccccatagtccttcacctattgctacaccacctagtcagagttcatcttgctctgatgctcccatgctcagtacagttcactctgcaaaaaatactccttctcagcattcacattccattcagcatagtcctgaaaggtctgggtctggttctgttggaaatggatctagtcgatacagtccttctcagaatagtccaattcatcacatcccttcacgaagaagtcctgcaaagacaatcgcaccacagaatgctccaagagatgagtctaggggccgttcctcgttttatcctgatggtggagatcaggaaactgcaaagactgggaagttcttaaaaaggttcacagatgaagagtctagagtattcctgcttgataggggtaataccagggataaagaggcttcaaaagagaaaggatcagagaaagggagggcagagggagaatgggaagatcaggaagctctagattacttcagtgataaagagtctggaaaacaaaagtttaatgattcagaaggggatgacacagaggagacagaggattatagacagttcaggaagtcagtcctcgcagatcagggtaaaagttttgctactgcatctcaccggaatactgaggaggaaggactcaagtacaagtccaaagtttcactgaaaggcaatagagaaagtgatggatttagagaagaaaaaaattataaacttaaagagactggatatgtagtggaaaggcctagcactacaaaagataagcacaaagaagaagacaaaaattctgaaagaataacagtaaagaaagaaactcagtcacctgagcaggtaaagtctgaaaagctcaaagacctctttgattacagtccccctctacacaagaatctggatgcacgagaaaagtctaccttcagagaggaaagcccacttaggatcaaaatgatagcgagtgattctcaccgtcctgaagtcaaactcaaaatggcacctgttcctcttgatgattctaacagacctgcttccttgactaaagacaggctgcttgctagtacacttgtccattctgtcaagaaggagcaagaattccgatccatctttgaccacattaagttgccacaggccagcaaaagcacttcagagtcatttattcaacacattgtgtccttggttcatcatgttaaagagcaatacttcaagtcagctgcaatgaccctaaacgagcggttcacttcgtatcagaaagccactgaagaacatagtactcggcaaaagagccctgaaatacacaggagaattgacatctcaccaagtaccctgaggaagcatacccgtttagcaggggaagagagagtttttaaagaagaaaatcaaaagggagataaaaaattaaggtgtgactctgctgaccttcggcatgacattgatcgccgtagaaaagaaagaagtaaagaacggggagattccaagggctccagggaatccagtggatcaagaaagcaggaaaaaactccaaaagattacaaggaatacaaatcttacaaagatgacagtaaacataaaagagagcaagatcattctcgatcttcatcctcttcagcatcaccttcttctcccagttctcgagaagaaaaggagagtaagaaggaaagagaagaagaatttaaaactcaccatgaaatgaaagaatactcaggctttgcaggagttagccgaccacgaggaacctttgtaagtgaaaaaattatctttgattgtttggtaggagtttatcttagagtactgtacataaggaaggtcatatacatgatttagagattgttatgtgtgtcattattcctaaagtcagagatagtattgaaacatgaagtggtgtttgaagtgctgtcttcatttagaaatgccattttgaggtctagaagcatctgtataaactaggtacttttcttgacttcgagatcaataactgtacctagtccttaaagaccaagagtcaaggaaagttactgatttgtaataacatttctttaatcacttagtttttgaaaaggtacctttagcgcagaataaatccaccacgttgttatcccagtcaccatagtacagctgttccctgtgtaaaagtcgccaggtc

SEQ ID NO: 315157 - DNA, 2415 bp, Homo sapiens
tagcggcacccgaggccacgccccgagatcggaagtgacggagacgtgctagcgcgtcgaaggtagctctatggttttcctcgcgttcttgagtcgggaaatggccgctgtgtggttgcaacggagataaattcccggaaccgcgattcggcgtgtcaggaattcgaatttagagtttaatttctcagagcattctctccaggaagaatttttacagtatctcaaagacttcacttgacttcttgatcctgcataaaaccaaggagaaaagaaatgggtcgctccaattctagatcacattcttcaaggtcaaagtctagatcacagtctagttctcgatcaagatcaagatctcattctagaaagaagcgatacagttctaggtctcgttccagaacatattcaaggtctcgtagtagagatcgtatgtattctagagattatcgtcgcgattacagaaataatagaggaatgagacgaccttatgggtacagaggaaggggtagagggtattatcaaggaggaggaggtagatatcatcgaggtggttatagacctgtctggaatagaaggcactctaggagtcctagacgaggtcgttcacgttccaggagtccaaaaagaagatccgtttcttctcaaagatccagaagcagatctcgccggtcatatagatcttctaggtctccaagatcatcctcttctcgttcttcatccccatatagcaaatctcctgtttctaaaagacgagggtctcaggaaaaacaaaccaaaaaagctgaaggggaaccccaagaagagagtccgttgaaaagtaaatcacaggaggaaccgaaagatacatttgaacatgacccatctgagtctatcgatgaatttaataagtcatcagccacatccggtgatatttggcctggcctttcagcttatgataatagtcctagatcaccccatagtccttcacctattgctacaccacctagtcagagttcatcttgctctgatgctcccatgctcagtacagttcactctgcaaaaaatactccttctcagcattcacattccattcagcatagtcctgaaaggtctgggtctggttctgttggaaatggatctagtcgatacagtccttctcagaatagtccaattcatcacatcccttcacgaagaagtcctgcaaagacaatcgcaccacagaatgctccaagagatgagtctaggggccgttcctcgttttatcctgatggtggagatcaggaaactgcaaagactgggaagttcttaaaaaggttcacagatgaagagtctagagtattcctgcttgataggggtaataccagggataaagaggcttcaaaagagaaaggatcagagaaagggagggcagagggagaatgggaagatcaggaagctctagattacttcagtgataaagagtctggaaaacaaaagtttaatgattcagaaggggatgacacagaggagacagaggattatagacagttcaggaagtcagtcctcgcagatcagggtaaaagttttgctactgcatctcaccggaatactgaggaggaaggactcaagtacaagtccaaagtttcactgaaaggcaatagagaaagtgatggatttagagaagaaaaaaattataaacttaaagagactggatatgtagtggaaaggcctagcactacaaaagataagcacaaagaagaagacaaaaattctgaaagaataacagtaaagaaagaaactcagtcacctgagcaggtaaagtctgaaaagctcaaagacctctttgattacagtccccctctacacaagaatctggatgcacgagaaaagtctaccttcagagaggaaagcccacttaggatcaaaatgatagcgagtgattctcaccgtcctgaagtcaaactcaaaatggcacctgttcctcttgatgattctaacagacctgcttccttgactaaagacaggctgcttgctagtacacttgtccattctgtcaagaaggagcaagaattccgatccatctttgaccacattaagttgccacaggccagcaaaagcacttcagagtcatttattcaacacattgtgtccttggttcatcatgttaaagagcaatacttcaagtcagctgcaatgaccctaaacgagcggttcacttcgtatcagaaagccactgaagaacatagtactcggcaaaagagccctgaaatacacagttgtcactgaggacacaggaaggaccacgactacgcaatcgagctcggagaccccccaacaccgcgcgcagagggagagggatacgcggataagggtgaggctaacgcggatgtaagggtgagggaagacgcggttaggctgaggttcacgcggacagggtgagcgctcacgcgggttagagtg

SEQ ID NO: 315158 - DNA, 1655 bp, Homo sapiens
tagcggcacccgaggccacgccccgagatcggaagtgacggagacgtgctagcgcgtcgaaggtagctctatggttttcctcgcgttcttgagtcgggaaatggccgctgtgtggttgcaacggagataaattcccggaaccgcgattcggcgtgtcaggaattcgaatttagagtttaatttctcagagcattctctccaggaagaatttttacagtatctcaaagacttcacttgacttcttgatcctgcataaaaccaaggagaaaagaaatgggtcgctccaattctagatcacattcttcaaggtcaaagtctagatcacagtctagttctcgatcaagatcaagatctcattctagaaagaagcgatacagttctaggtctcgttccagaacatattcaaggtctcgtagtagagatcgtatgtattctagagattatcgtcgcgattacagaaataatagaggaatgagacgaccttatgggtacagaggaaggggtagagggtattatcaaggaggaggaggtagatatcatcgaggtggttatagacctgtctggaatagaaggcactctaggagtcctagacgaggtcgttcacgttccaggagtccaaaaagaagatccgtttcttctcaaagatccagaagcagatctcgccggtcatatagatcttctaggtctccaagatcatcctcttctcgttcttcatccccatatagcaaatctcctgtttctaaaagacgagggtctcaggaaaaacaaaccaaaaaagctgaaggggaaccccaagaagagagtccgttgaaaagtaaatcacaggaggaaccgaaagatacatttgaacatgacccatctgagtctatcgatgaatttaataagtcatcagccacatccggtgatatttggcctggcctttcagcttatgataatagtcctagatcaccccatagtccttcacctattgctacaccacctagtcagagttcatcttgctctgatgctcccatgctcagtacagttcactctgcaaaaaatactccttctcagcattcacattccattcagcatagtcctgaaaggtctgggtctggttctgttggaaatggatctagtcgatacagtccttctcagaatagtccaattcatcacatcccttcacgaagaagtcctgcaaagacaatcgcaccacagaatgctccaagagatgagtctaggggccgttcctcgttttatcctgatggtggagatcaggaaactgcaaagactgggaagttcttaaaaaggtaaaaactaaaatacagaatctagattataatattgtttttgttctttgaattctgtttggaattataaacgtaaaattgtgatatgtatttaactagcggtttttactcttgacttccttcattttaagataattccaaattgtttttactcttatctggtgaactttggaagctaagtgttttaataaaaattaatttatccagctactcaggaggctgaggcgggaggatctcttgagcccaggagttcaaggctgtggtgagctatgattgcgcctactgcactccagcctgggcgatagagcaagaccctgtctctttaaaaagaattaaaaaaacctaatttctatccctcctcttaat

SEQ ID NO: 315159 - DNA, 1949 bp, Homo sapiens
taatttcttttcaaactcaaaagatctcaacgctatcttcttcaaggaattactattgttccttttgtcacaggtaaaatcagtgttgggaattataatttgagaaaaatattacccagtaacattgaatgtagatggctaaacgattcttactcagtgtgatgtataatgatgcaacagggacccttgtaaattgtcatacgccaataaaatgtcacaagtaataactgctgttgtttgtttacctgtgtctatttcacacatcttatttctgtggcctattttagaatatcagcgcatctgttaggaagattactggtgtggtaaggcttgataaatgctttataaactccctcaaacctttctttactgtttttttgttttgtcttgtttttgtttttgtttttgtttttgttttttcccttgtctcccctgggaaaatgggaaattttacagttggtaaatctaagccaaaattattttgaaataaaggaattctggatgtccagtttagtcctcgttttcttacgttaatctgggaccttatcacccataatatggtgattacttctctttctaaaaacatagtagctagtaaataagtaaaaagaattgtcttttcattcactttaagtaagatgtggtataattcttaccatgtgccatcctgtcagttttaacaaagcattttcacagaaatttgtgtactaagacaaactgacacattttgactcatacaaatggcaaattagtccttaaaaattctgtgagagaaataactctgtgtgtacatacatatgcatgtaaagtgttgtgtaagatcattggtagcttaattatactggataattgtaatgttatatacaaatttcttatataaaagtatgctgcattattaacatttgtttaacttttcttatttttctttttctgggtttcaactggaatcccattggtggggatgtaccttaagtttccttgtggaataatagactttcacatccagaaagagaagttcagaggcctttctcaatttacagagttgaagaggaaaggcaaatggaggaataaacttcattgtcattgggattaatttggctagactcaatctcttgagccctaaaatgagaaagtaatatccattacatgtttagagttctcaaatagttgatactattattaaatgtttcaaattttattggggtagatactaaaaattagtacactgtcctaatgaagtttaaatgaacaagttttacatttcttaggattcaggaatatatggaatctagttgtatttaattgacttgagagccacagagattgtgttgatttatgagctggactcctattgttttagaaacatgcagtaatgattaacttgtgtcaatgatggtaatgagaccaaacttgtacatttaattaagggtaccagttctttttatgttactagactataccttggcctttaaaaatgaatctcactgattaaagagaacaggcattattaggatagcattccaccacaactagaaacattcaaataatgtgtcttaattgtaatctgtatataggaaaatttttcctatggatatttttggtgttttaccacagtgaactgatttgtagcacttatgaagtgcagaaggtaatattcttgaaaatagaaaaaggttgggtgagcaggctttaatgcctttcccccaagaatatacatcgaatttttcttaatcttttggggttggccagcttccagatttcattaataatgagctctgcctttaataaaagtacatgatcatagctacactgtatgtttaggtggtgtgaaatgatttataatcacagcttgaactgtgtttgcttggtactgtcatagtgattacaaatttcatggaatgcgaagagcaacaataaataaaaaataccactcaccctccagaatagtg

SEQ ID NO: 315160 - DNA, 923 bp, Homo sapiens
tgtacaaactgcagtcattttgaaacttggccttaagaacatccttactttttcctactcttctcttcctttcattaaagtaataaaagacataacttaatttaaaaatactaaagaactgaaccttattcttgacctttacagactactattttctaactggcaggccctagcatgtttttcattattgatgtaaaacacatattgaaggagaatggaaacagactgtgtcaaagtttaacacccaattattttatttacataattttattaggggatagtgttgttgacttgaaaaatatctcttctgttgtaagattcagcagggtctttatctttttaaaagtatcacattttttgttttctttattttgcagtaaacataaaagagagcaagatcattctcgatcttcatcctcttcagcatcaccttcttctcccagttctcgagaagaaaaggagagtaagaaggaaagagaagaagaatttaaaactcaccatgaaatgaaagaatactcaggctttgcaggagttagccgaccacgaggaacctttgtaagtgaaaaaattatctttgattgtttggtaggagtttatcttagagtactgtacataaggaaggtcatatacatgatttagagattgttatgtgtgtcattattcctaaagtcagagatagtattgaaacatgaagtggtgtttgaagtgctgtcttcatttagaaatgccattttgaggtctagaagcatctgtataaactaggtacttttcttgacttcgagatcaataactgtacctagtccttaaagaccaagagtcaaggaaagttactgatttgtaataacatttctttaatcacttagtttttgaaaaggtaccttaacgccttaataaaacccctgtatgttcatctctgtattaca

SEQ ID NO: 315161 - DNA, 5435 bp, Homo sapiens
tagcggcacccgaggccacgccccgagatcggaagtgacggagacgtgctagcgcgtcgaaggtagctctatggttttcctcgcgttcttgagtcgggaaatggccgctgtgtggttgcaacggagataaattcccggaaccgcgattcggcgtgtcaggaattcgaatttagagtttaatttctcagagcattctctccaggaagaatttttacagtatctcaaagacttcacttgacttcttgatcctgcataaaaccaaggagaaaagaaatgggtcgctccaattctagatcacattcttcaaggtcaaagtctagatcacagtctagttctcgatcaagatcaagatctcattctagaaagaagcgatacagttctaggtctcgttccagaacatattcaaggtctcgtagtagagatcgtatgtattctagagattatcgtcgcgattacagaaataatagaggaatgagacgaccttatgggtacagaggaaggggtagagggtattatcaaggaggaggaggtagatatcatcgaggtggttatagacctgtctggaatagaaggcactctaggagtcctagacgaggtcgttcacgttccaggagtccaaaaagaagatccgtttcttctcaaagatccagaagcagatctcgccggtcatatagatcttctaggtctccaagatcatcctcttctcgttcttcatccccatatagcaaatctcctgtttctaaaagacgagggtctcaggaaaaacaaaccaaaaaagctgaaggggaaccccaagaagagagtccgttgaaaagtaaatcacaggaggaaccgaaagatacatttgaacatgacccatctgagtctatcgatgaatttaataagtcatcagccacatccggtgatatttggcctggcctttcagcttatgataatagtcctagatcaccccatagtccttcacctattgctacaccacctagtcagagttcatcttgctctgatgctcccatgctcagtacagttcactctgcaaaaaatactccttctcagcattcacattccattcagcatagtcctgaaaggtctgggtctggttctgttggaaatggatctagtcgatacagtccttctcagaatagtccaattcatcacatcccttcacgaagaagtcctgcaaagacaatcgcaccacagaatgctccaagagatgagtctaggggccgttcctcgttttatcctgatggtggagatcaggaaactgcaaagactgggaagttcttaaaaagctctagattacttcagtgataaagagtctggaaaacaaaagtttaatgattcagaaggggatgacacagaggagacagaggattatagacagttcaggaagtcagtcctcgcagatcagggtaaaagttttgctactgcatctcaccggaatactgaggaggaaggactcaagtacaagtccaaagtttcactgaaaggcaatagagaaagtgatggatttagagaagaaaaaaattataaacttaaagagactggatatgtagtggaaaggcctagcactacaaaagataagcacaaagaagaagacaaaaattctgaaagaataacagtaaagaaagaaactcagtcacctgagcaggtaaagtctgaaaagctcaaagacctctttgattacagtccccctctacacaagaatctggatgcacgagaaaagtctaccttcagagaggaaagcccacttaggatcaaaatgatagcgagtgattctcaccgtcctgaagtcaaactcaaaatggcacctgttcctcttgatgattctaacagacctgcttccttgactaaagacaggctgcttgctagtacacttgtccattctgtcaagaaggagcaagaattccgatccatctttgaccacattaagttgccacaggccagcaaaagcacttcagagtcatttattcaacacattgtgtccttggttcatcatgttaaagagcaatacttcaagtcagctgcaatgaccctaaacgagcggttcacttcgtatcagaaagccactgaagaacatagtactcggcaaaagagccctgaaatacacaggagaattgacatctcaccaagtaccctgaggaagcatacccgtttagcaggggaagagagagtttttaaagaagaaaatcaaaagggagataaaaaattaaggtgtgactctgctgaccttcggcatgacattgatcgccgtagaaaagaaagaagtaaagaacggggagattccaagggctccagggaatccagtggatcaagaaagcaggaaaaaactccaaaagattacaaggaatacaaatcttacaaagatgacagtaaacataaaagagagcaagatcattctcgatcttcatcctcttcagcatcaccttcttctcccagttctcgagaagaaaaggagagtaagaaggaaagagaagaagaatttaaaactcaccatgaaatgaaagaatactcaggctttgcaggagttagccgaccacgaggaaccttttttcgaattagaggcagaggaagagccagaggagtttttgctgggacaaatactggtccaaacaactcaaatactacttttcaaaagagaccgaaggaagaggaatgggatccagaatataccccaaagagcaagaagtacttcttgcatgacgacagagatgatggtgtggattattgggccaaaagaggaagaggtcgtggtacttttcaacgtggcagagggcgctttaacttcaaaaaatcaggtagcagtcctaaatggactcatgacaaataccaaggggatgggattgttgaagatgaagaagagaccatggaaaataatgaagaaaagaaggacagacgcaaggaagaaaaggaataataaatatgaagtaagattacaacagagcagaacttgcacccaccattttttttacctgatttttgttttcaaataagaatgtaagcattttacttaaattttactgtttgcaagtagtctatagaaattttgttttaagtcttcaaatatcttgagaaatagtagactgtatgttgaaaattgtactgaaataaagtagaaaattgttacgtaccatatttgtaactatcaacttttaaaacttttaacgtttttgttacatgcattgtaattctgctttgtctataagatatggtcaagtacagctctgtgaaagttctgattctcttccttccctgtttgtcaatgttttattctgaagtaaacgttagctctacatataaatcctggaacagaaattgtttatagagactacactaattattttaactgtatacatctgtttaatttgaacacactacatcgtagggtgactgatttttgaagtataccacagacaaaaagttgttactatggtaaactaagctagtttaacacttgagcaaatgcttaagaaggaattaaaaaaaaaaagctttgccaatagctaaaaagtacaagctattaaaaatcagattgaaaagttttgagaaaatgttatttttactgaaagcaagcagtggcctataaagaacattcttaggagccttttctatttgcgttcaaaactgtgtgttctctttctattcctatttgatagtttgagtcatggtcttagatattagctatttgtgagaggaaactggtttgtaacaatactgcaaatagaaaccccatttctactgaacatcctagttttaaacagaagaaaaactgtaatcctggggttggtatgtaggaggtctatcctgcagaataagttgatacattagtacctgatttcatatcttacatatttatttgagctgaacattagtttgtagtgtaactattagtaaaaatagagaaacacagcatactgttcattaatagtattttaaaaaaattgtttttcaaatgtcaccaataaaagttttggcaggaagcttgttgcggcattgatctaacctttttcccccccatttcagttgcagtttttgtagaatggctttttctttttcctcttaagagttctattcttcaggtagataatttttcaaatgtgaattatcttttgtgtctatattgatagctcttaaaggagtgaaaatctaaaatagtaaatttcaatgttaagtgtctgctttatgggcatatataaaagtagacacatttcatttgttaatttagttgtgtgtgtgtgttaaaaggagctaatgcttattctgttaatgtaaacttttgaagatcttaagtgtattgctctttcatcttaaacactttcgaggatttgcagtgcgtctagcacctagattacagccaggaacattggttaagaactgttggaaacaaaactaaaagcaaactcaacatatgtgatgtttatggccctcagatccttagtattgtgtgattttcccccgttaacatgtctttctaaaattgtctattaaagcagaggaaatacctgccaaaggaagtatgtattgcattaatcagggcataactaatattctcctgttcagaataatacttatttacgtgtgaaagcaacatggatgtgattcccaacacagaattttcatgacccttttattgtatacaaataaataccataacagttacttggttagacatcaaatctgtgtgcatgactatgtgcttatccacttaagacaataggtaaaaggggatctgagaaattatgtaatagggagtgggaataaaactacttaattcctgtgggcaggttatattttaagttcaaatgcattgctttaacctttggttacttttattctgttaaacagaattgaagaaagagtattataccagagtgtagtaggctagggtgattgtaagaactctgtaatagaatgtcattgtggatgttacctttttcagatccaagcatataaaaagcctgtatattttttaaaaacacatcttaactccacgctttacgatattataaaagttgaatggttcctcttggtaaggatatttgcttacaagtgctaggaaataactcactgatacctgcgttaacatactttgttttgcctagagaggggcaataaaaatgaaccaaaggatatttccagaaaggattaagaaagctgtttaagaaggccatgactctttaggtgtgtatgtgtacctttcagcatcctaggaatttttatactaaaagcaaaatgttttttccagttagtcttcttcaaggaattactattgttccttttgtcacaggtaaaatcagtgttgggaattataatttgagaaaaatattacccagtaacattgaatgtagatggctaaacgattcttactcagtgtgatgtataatgatgcaacagggacccttgtaaattgtcatacgccaataaaatgtcacaagtaa

SEQ ID NO: 315162 - DNA, 5853 bp, Homo sapiens
tagcggcacccgaggccacgccccgagatcggaagtgacggagacgtgctagcgcgtcgaaggtagctctatggttttcctcgcgttcttgagtcgggaaatggccgctgtgtggttgcaacggagataaattcccggaaccgcgattcggcgtgtcaggaattcgaatttagagtttaatttctcagagcattctctccaggaagaatttttacagtatctcaaagacttcacttgacttcttgatcctgcataaaaccaaggagaaaagaaatgggtcgctccaattctagatcacattcttcaaggtcaaagtctagatcacagtctagttctcgatcaagatcaagatctcattctagaaagaagcgatacagttctaggtctcgttccagaacatattcaaggtctcgtagtagagatcgtatgtattctagagattatcgtcgcgattacagaaataatagaggaatgagacgaccttatgggtacagaggaaggggtagagggtattatcaaggaggaggaggtagatatcatcgaggtggttatagacctgtctggaatagaaggcactctaggagtcctagacgaggtcgttcacgttccaggagtccaaaaagaagatccgtttcttctcaaagatccagaagcagatctcgccggtcatatagatcttctaggtctccaagatcatcctcttctcgttcttcatccccatatagcaaatctcctgtttctaaaagacgagggtctcaggaaaaacaaaccaaaaaagctgaaggggaaccccaagaagagagtccgttgaaaagtaaatcacaggaggaaccgaaagatacatttgaacatgacccatctgagtctatcgatgaatttaataagtcatcagccacatccggtgatatttggcctggcctttcagcttatgataatagtcctagatcaccccatagtccttcacctattgctacaccacctagtcagagttcatcttgctctgatgctcccatgctcagtacagttcactctgcaaaaaatactccttctcagcattcacattccattcagcatagtcctgaaaggtctgggtctggttctgttggaaatggatctagtcgatacagtccttctcagaatagtccaattcatcacatcccttcacgaagaagtcctgcaaagacaatcgcaccacagaatgctccaagagatgagtctaggggccgttcctcgttttatcctgatggtggagatcaggaaactgcaaagactgggaagttcttaaaaaggttcacagatgaagagtctagagtattcctgcttgataggggtaataccagggataaagaggcttcaaaagagaaaggatcagagaaagggagggcagagggagaatgggaagatcaggaagctctagattacttcagtgataaagagtctggaaaacaaaagtttaatgattcagaaggggatgacacagaggagacagaggattatagacagttcaggaagtcagtcctcgcagatcagggtaaaagttttgctactgcatctcaccggaatactgaggaggaaggactcaagtacaagtccaaagtttcactgaaaggcaatagagaaagtgatggatttagagaagaaaaaaattataaacttaaagagactggatatgtagtggaaaggcctagcactacaaaagataagcacaaagaagaagacaaaaattctgaaagaataacagtaaagaaagaaactcagtcacctgagcaggtaaagtctgaaaagctcaaagacctctttgattacagtccccctctacacaagaatctggatgcacgagaaaagtctaccttcagagaggaaagcccacttaggatcaaaatgatagcgagtgattctcaccgtcctgaagtcaaactcaaaatggcacctgttcctcttgatgattctaacagacctgcttccttgactaaagacaggctgcttgctagtacacttgtccattctgtcaagaaggagcaagaattccgatccatctttgaccacattaagttgccacaggccagcaaaagcacttcagagtcatttattcaacacattgtgtccttggttcatcatgttaaagagcaatacttcaagtcagctgcaatgaccctaaacgagcggttcacttcgtatcagaaagccactgaagaacatagtactcggcaaaagagccctgaaatacacaggagaattgacatctcaccaagtaccctgaggaagcatacccgtttagcaggggaagagagagtttttaaagaagaaaatcaaaagggagataaaaaattaaggtgtgactctgctgaccttcggcatgacattgatcgccgtagaaaagaaagaagtaaagaacggggagattccaagggctccagggaatccagtggatcaagaaagcaggaaaaaactccaaaagattacaaggaatacaaatcttacaaagatgacaggtaattgttcaaactgactaagataggttttagcttctaattagcctttaataattgtcagcttaattgctttcaattttgactgtgtaatcgaatgtttaaatttaaacaattaaaattatttgttttacagcaaaaatgtatttgtcttttacacggcttatggtggatgaggacaaaaactttggaatagcaagctaacactgaaaaaaaaaatgacaaattaatgtgtcctattatccaggctacatcaggaggttggacttcaatgcagtgcatttctagaaacagtttgttaaacataaaagagagcaagatcattctcgatcttcatcctcttcagcatcaccttcttctcccagttctcgagaagaaaaggagagtaagaaggaaagagaagaagaatttaaaactcaccatgaaatgaaagaatactcaggctttgcaggagttagccgaccacgaggaaccttttttcgaattagaggcagaggaagagccagaggagtttttgctgggacaaatactggtccaaacaactcaaatactacttttcaaaagagaccgaaggaagaggaatgggatccagaatataccccaaagagcaagaagtacttcttgcatgacgacagagatgatggtgtggattattgggccaaaagaggaagaggtcgtggtacttttcaacgtggcagagggcgctttaacttcaaaaaatcaggtagcagtcctaaatggactcatgacaaataccaaggggatgggattgttgaagatgaagaagagaccatggaaaataatgaagaaaagaaggacagacgcaaggaagaaaaggaataataaatatgaagtaagattacaacagagcagaacttgcacccaccattttttttacctgatttttgttttcaaataagaatgtaagcattttacttaaattttactgtttgcaagtagtctatagaaattttgttttaagtcttcaaatatcttgagaaatagtagactgtatgttgaaaattgtactgaaataaagtagaaaattgttacgtaccatatttgtaactatcaacttttaaaacttttaacgtttttgttacatgcattgtaattctgctttgtctataagatatggtcaagtacagctctgtgaaagttctgattctcttccttccctgtttgtcaatgttttattctgaagtaaacgttagctctacatataaatcctggaacagaaattgtttatagagactacactaattattttaactgtatacatctgtttaatttgaacacactacatcgtagggtgactgatttttgaagtataccacagacaaaaagttgttactatggtaaactaagctagtttaacacttgagcaaatgcttaagaaggaattaaaaaaaaaaagctttgccaatagctaaaaagtacaagctattaaaaatcagattgaaaagttttgagaaaatgttatttttactgaaagcaagcagtggcctataaagaacattcttaggagccttttctatttgcgttcaaaactgtgtgttctctttctattcctatttgatagtttgagtcatggtcttagatattagctatttgtgagaggaaactggtttgtaacaatactgcaaatagaaaccccatttctactgaacatcctagttttaaacagaagaaaaactgtaatcctggggttggtatgtaggaggtctatcctgcagaataagttgatacattagtacctgatttcatatcttacatatttatttgagctgaacattagtttgtagtgtaactattagtaaaaatagagaaacacagcatactgttcattaatagtattttaaaaaaattgtttttcaaatgtcaccaataaaagttttggcaggaagcttgttgcggcattgatctaacctttttcccccccatttcagttgcagtttttgtagaatggctttttctttttcctcttaagagttctattcttcaggtagataatttttcaaatgtgaattatcttttgtgtctatattgatagctcttaaaggagtgaaaatctaaaatagtaaatttcaatgttaagtgtctgctttatgggcatatataaaagtagacacatttcatttgttaatttagttgtgtgtgtgtgttaaaaggagctaatgcttattctgttaatgtaaacttttgaagatcttaagtgtattgctctttcatcttaaacactttcgaggatttgcagtgcgtctagcacctagattacagccaggaacattggttaagaactgttggaaacaaaactaaaagcaaactcaacatatgtgatgtttatggccctcagatccttagtattgtgtgattttcccccgttaacatgtctttctaaaattgtctattaaagcagaggaaatacctgccaaaggaagtatgtattgcattaatcagggcataactaatattctcctgttcagaataatacttatttacgtgtgaaagcaacatggatgtgattcccaacacagaattttcatgacccttttattgtatacaaataaataccataacagttacttggttagacatcaaatctgtgtgcatgactatgtgcttatccacttaagacaataggtaaaaggggatctgagaaattatgtaatagggagtgggaataaaactacttaattcctgtgggcaggttatattttaagttcaaatgcattgctttaacctttggttacttttattctgttaaacagaattgaagaaagagtattataccagagtgtagtaggctagggtgattgtaagaactctgtaatagaatgtcattgtggatgttacctttttcagatccaagcatataaaaagcctgtatattttttaaaaacacatcttaactccacgctttacgatattataaaagttgaatggttcctcttggtaaggatatttgcttacaagtgctaggaaataactcactgatacctgcgttaacatactttgttttgcctagagaggggcaataaaaatgaaccaaaggatatttccagaaaggattaagaaagctgtttaagaaggccatgactctttaggtgtgtatgtgtacctttcagcatcctaggaatttttatactaaaagcaaaatgttttttccagttagtcttcttcaaggaattactattgttccttttgtcacaggtaaaatcagtgttgggaattataatttgagaaaaatattacccagtaacattgaatgtagatggctaaacgattcttactcagtgtgatgtataatgatgcaacagggacccttgtaaattgtcatacgccaataaaatgtcacaagtaa

SEQ ID NO: 315163 - DNA, 7135 bp, Homo sapiens
tagcggcacccgaggccacgccccgagatcggaagtgacggagacgtgctagcgcgtcgaaggtagctctatggttttcctcgcgttcttgagtcgggaaatggccgctgtgtggttgcaacggagataaattcccggaaccgcgattcggcgtgtcaggaattcgaatttagagtttaatttctcagagcattctctccaggaagaatttttacagtatctcaaagacttcacttgacttcttgatcctgcataaaaccaaggagaaaagaaatgggtcgctccaattctagatcacattcttcaaggtcaaagtctagatcacagtctagttctcgatcaagatcaagatctcattctagaaagaagcgatacagttctaggtctcgttccagaacatattcaaggtctcgtagtagagatcgtatgtattctagagattatcgtcgcgattacagaaataatagaggaatgagacgaccttatgggtacagaggaaggggtagagggtattatcaaggaggaggaggtagatatcatcgaggtggttatagacctgtctggaatagaaggcactctaggagtcctagacgaggtcgttcacgttccaggagtccaaaaagaagatccgtttcttctcaaagatccagaagcagatctcgccggtcatatagatcttctaggtctccaagatcatcctcttctcgttcttcatccccatatagcaaatctcctgtttctaaaagacgagggtctcaggaaaaacaaaccaaaaaagctgaaggggaaccccaagaagagagtccgttgaaaagtaaatcacaggaggaaccgaaagatacatttgaacatgacccatctgagtctatcgatgaatttaataagtcatcagccacatccggtgatatttggcctggcctttcagcttatgataatagtcctagatcaccccatagtccttcacctattgctacaccacctagtcagagttcatcttgctctgatgctcccatgctcagtacagttcactctgcaaaaaatactccttctcagcattcacattccattcagcatagtcctgaaaggtctgggtctggttctgttggaaatggatctagtcgatacagtccttctcagaatagtccaattcatcacatcccttcacgaagaagtcctgcaaagacaatcgcaccacagaatgctccaagagatgagtctaggggccgttcctcgttttatcctgatggtggagatcaggaaactgcaaagactgggaagttcttaaaaaggttcacagatgaagagtctagagtattcctgcttgataggggtaataccagggataaagaggcttcaaaagagaaaggatcagagaaagggagggcagagggagaatgggaagatcaggaagctctagattacttcagtgataaagagtctggaaaacaaaagtttaatgattcagaaggggatgacacagaggagacagaggattatagacagttcaggaagtcagtcctcgcagatcagggtaaaagttttgctactgcatctcaccggaatactgaggaggaaggactcaagtacaagtccaaagtttcactgaaaggcaatagagaaagtgatggatttagagaagaaaaaaattataaacttaaagagactggatatgtagtggaaaggcctagcactacaaaagataagcacaaagaagaagacaaaaattctgaaagaataacagtaaagaaagaaactcagtcacctgagcaggtaaagtctgaaaagctcaaagacctctttgattacagtccccctctacacaagaatctggatgcacgagaaaagtctaccttcagagaggaaagcccacttaggatcaaaatgatagcgagtgattctcaccgtcctgaagtcaaactcaaaatggcacctgttcctcttgatgattctaacagacctgcttccttgactaaagacaggctgcttgctagtacacttgtccattctgtcaagaaggagcaagaattccgatccatctttgaccacattaagttgccacaggccagcaaaagcacttcagagtcatttattcaacacattgtgtccttggttcatcatgttaaagagcaatacttcaagtcagctgcaatgaccctaaacgagcggttcacttcgtatcagaaagccactgaagaacatagtactcggcaaaagagccctgaaatacacaggagaattgacatctcaccaagtaccctgaggaagcatacccgtttagcaggggaagagagagtttttaaagaagaaaatcaaaagggagataaaaaattaaggtgtgactctgctgaccttcggcatgacattgatcgccgtagaaaagaaagaagtaaagaacggggagattccaagggctccagggaatccagtggatcaagaaagcaggaaaaaactccaaaagattacaaggaatacaaatcttacaaagatgacagtaaacataaaagagagcaagatcattctcgatcttcatcctcttcagcatcaccttcttctcccagttctcgagaagaaaaggagagtaagaaggaaagagaagaagaatttaaaactcaccatgaaatgaaagaatactcaggctttgcaggagttagccgaccacgaggaacctttcatgacgacagagatgatggtgtggattattgggccaaaagaggaagaggtcgtggtacttttcaacgtggcagagggcgctttaacttcaaaaaatcaggtagcagtcctaaatggactcatgacaaataccaaggggatgggattgttgaagatgaagaagagaccatggaaaataatgaagaaaagaaggacagacgcaaggaagaaaaggaataataaatatgaagtaagattacaacagagcagaacttgcacccaccattttttttacctgatttttgttttcaaataagaatgtaagcattttacttaaattttactgtttgcaagtagtctatagaaattttgttttaagtcttcaaatatcttgagaaatagtagactgtatgttgaaaattgtactgaaataaagtagaaaattgttacgtaccatatttgtaactatcaacttttaaaacttttaacgtttttgttacatgcattgtaattctgctttgtctataagatatggtcaagtacagctctgtgaaagttctgattctcttccttccctgtttgtcaatgttttattctgaagtaaacgttagctctacatataaatcctggaacagaaattgtttatagagactacactaattattttaactgtatacatctgtttaatttgaacacactacatcgtagggtgactgatttttgaagtataccacagacaaaaagttgttactatggtaaactaagctagtttaacacttgagcaaatgcttaagaaggaattaaaaaaaaaaagctttgccaatagctaaaaagtacaagctattaaaaatcagattgaaaagttttgagaaaatgttatttttactgaaagcaagcagtggcctataaagaacattcttaggagccttttctatttgcgttcaaaactgtgtgttctctttctattcctatttgatagtttgagtcatggtcttagatattagctatttgtgagaggaaactggtttgtaacaatactgcaaatagaaaccccatttctactgaacatcctagttttaaacagaagaaaaactgtaatcctggggttggtatgtaggaggtctatcctgcagaataagttgatacattagtacctgatttcatatcttacatatttatttgagctgaacattagtttgtagtgtaactattagtaaaaatagagaaacacagcatactgttcattaatagtattttaaaaaaattgtttttcaaatgtcaccaataaaagttttggcaggaagcttgttgcggcattgatctaacctttttcccccccatttcagttgcagtttttgtagaatggctttttctttttcctcttaagagttctattcttcaggtagataatttttcaaatgtgaattatcttttgtgtctatattgatagctcttaaaggagtgaaaatctaaaatagtaaatttcaatgttaagtgtctgctttatgggcatatataaaagtagacacatttcatttgttaatttagttgtgtgtgtgtgttaaaaggagctaatgcttattctgttaatgtaaacttttgaagatcttaagtgtattgctctttcatcttaaacactttcgaggatttgcagtgcgtctagcacctagattacagccaggaacattggttaagaactgttggaaacaaaactaaaagcaaactcaacatatgtgatgtttatggccctcagatccttagtattgtgtgattttcccccgttaacatgtctttctaaaattgtctattaaagcagaggaaatacctgccaaaggaagtatgtattgcattaatcagggcataactaatattctcctgttcagaataatacttatttacgtgtgaaagcaacatggatgtgattcccaacacagaattttcatgacccttttattgtatacaaataaataccataacagttacttggttagacatcaaatctgtgtgcatgactatgtgcttatccacttaagacaataggtaaaaggggatctgagaaattatgtaatagggagtgggaataaaactacttaattcctgtgggcaggttatattttaagttcaaatgcattgctttaacctttggttacttttattctgttaaacagaattgaagaaagagtattataccagagtgtagtaggctagggtgattgtaagaactctgtaatagaatgtcattgtggatgttacctttttcagatccaagcatataaaaagcctgtatattttttaaaaacacatcttaactccacgctttacgatattataaaagttgaatggttcctcttggtaaggatatttgcttacaagtgctaggaaataactcactgatacctgcgttaacatactttgttttgcctagagaggggcaataaaaatgaaccaaaggatatttccagaaaggattaagaaagctgtttaagaaggccatgactctttaggtgtgtatgtgtacctttcagcatcctaggaatttttatactaaaagcaaaatgttttttccagttagtcttcttcaaggaattactattgttccttttgtcacaggtaaaatcagtgttgggaattataatttgagaaaaatattacccagtaacattgaatgtagatggctaaacgattcttactcagtgtgatgtataatgatgcaacagggacccttgtaaattgtcatacgccaataaaatgtcacaagtaataactgctgttgtttgtttacctgtgtctatttcacacatcttatttctgtggcctattttagaatatcagcgcatctgttaggaagattactggtgtggtaaggcttgataaatgctttataaactccctcaaacctttctttactgtttttttgttttgtcttgtttttgtttttgtttttgtttttgttttttcccttgtctcccctgggaaaatgggaaattttacagttggtaaatctaagccaaaattattttgaaataaaggaattctggatgtccagtttagtcctcgttttcttacgttaatctgggaccttatcacccataatatggtgattacttctctttctaaaaacatagtagctagtaaataagtaaaaagaattgtcttttcattcactttaagtaagatgtggtataattcttaccatgtgccatcctgtcagttttaacaaagcattttcacagaaatttgtgtactaagacaaactgacacattttgactcatacaaatggcaaattagtccttaaaaattctgtgagagaaataactctgtgtgtacatacatatgcatgtaaagtgttgtgtaagatcattggtagcttaattatactggataattgtaatgttatatacaaatttcttatataaaagtatgctgcattattaacatttgtttaacttttcttatttttctttttctgggtttcaactggaatcccattggtggggatgtaccttaagtttccttgtggaataatagactttcacatccagaaagagaagttcagaggcctttctcaatttacagagttgaagaggaaaggcaaatggaggaataaacttcattgtcattgggattaatttggctagactcaatctcttgagccctaaaatgagaaagtaatatccattacatgtttagagttctcaaatagttgatactattattaaatgtttcaaattttattggggtagatactaaaaattagtacactgtcctaatgaagtttaaatgaacaagttttacatttcttaggattcaggaatatatggaatctagttgtatttaattgacttgagagccacagagattgtgttgatttatgagctggactcctattgttttagaaacatgcagtaatgattaacttgtgtcaatgatggtaatgagaccaaacttgtacatttaattaagggtaccagttctttttatgttactagactataccttggcctttaaaaatgaatctcactgattaaagagaacaggcattattaggatagcattccaccacaactagaaacattcaaataatgtgtcttaattgtaatctgtatataggaaaatttttcctatggatatttttggtgttttaccacagtgaactgatttgtagcacttatgaagtgcagaaggtaatattcttgaaaatagaaaaaggttgggtgagcaggctttaatgcctttcccccaagaatatacatcgaatttttcttaatcttttggggttggccagcttccagatttcattaataatgagctctgcctttaataaaagtacatgatcatagctacactgtatgtttaggtggtgtgaaatgatttataatcacagcttgaactgtgtttgcttggtactgtcatagtgattacaaatttcatggaatgcgaagagcaacaataaataaaaaataccactcaccctccagaatagtg

SEQ ID NO: 315164 - DNA, 4997 bp, Homo sapiens
ggtatttctcactgactaatgacatttgaaacagatacattgtttaaattctgatttcaagtgttgctgaaagttgctaacagtgaaaattggttgcttcatgtattgtgatttgacttaaaagtgagaaaatagaggaaacatgctgtttgtggaatagcactgcacaatctagaatttatgattgaactgatcattagtttctatgaaatagtgccagaaatcattatttttctagagcaagtttatatgaactgttctgtgattttcataaagtattaaattactgcagtggtaattaaatccatttgtgtgaactcttgtttatattaatagataatatctggaattttggggataattatcaatagaattctaacaatgtattatctattagtggttcttagtttcaaaaattaaatttaggcaatctctagaagttcgtgttagtgcagaattgtggattgtgactaaataggacaggtttttgtgattggctttgtgttttaaacttcagaagtcaaatgtaaatttattttaaaagtcagtacataagttctatatggatgctttcaatgatttttaaaagtggaatctgaaaaagcacttttcaatagggttattttctctcttgctggtcctgagggattgggcaacacatttaaatatggaagcgatctacagtgaatgcaatccagagttactatcctcttctttgcttattcgcaggttcacagatgaagagtctagagtattcctgcttgataggggtaataccagggataaagaggcttcaaaagagaaaggatcagagaaagggagggcagagggagaatgggaagatcaggaagctctagattacttcagtgataaagagtctggaaaacaaaagtttaatgattcagaaggggatgacacagaggagacagaggattatagacagttcaggaagtcagtcctcgcagatcagggtaaaagttttgctactgcatctcaccggaatactgaggaggaaggactcaagtacaagtccaaagtttcactgaaaggcaatagagaaagtgatggatttagagaagaaaaaaattataaacttaaagagactggatatgtagtggaaaggcctagcactacaaaagataagcacaaagaagaagacaaaaattctgaaagaataacagtaaagaaagaaactcagtcacctgagcaggtaaagtctgaaaagctcaaagacctctttgattacagtccccctctacacaagaatctggatgcacgagaaaagtctaccttcagagaggaaagcccacttaggatcaaaatgatagcgagtgattctcaccgtcctgaagtcaaactcaaaatggcacctgttcctcttgatgattctaacagacctgcttccttgactaaagacaggctgcttgctagtacacttgtccattctgtcaagaaggagcaagaattccgatccatctttgaccacattaagttgccacaggccagcaaaagcacttcagagtcatttattcaacacattgtgtccttggttcatcatgttaaagagcaatacttcaagtcagctgcaatgaccctaaacgagcggttcacttcgtatcagaaagccactgaagaacatagtactcggcaaaagagccctgaaatacacaggagaattgacatctcaccaagtaccctgaggaagcatacccgtttagcaggggaagagagagtttttaaagaagaaaatcaaaagggagataaaaaattaaggtgtgactctgctgaccttcggcatgacattgatcgccgtagaaaagaaagaagtaaagaacggggagattccaagggctccagggaatccagtggatcaagaaagcaggaaaaaactccaaaagattacaaggaatacaaatcttacaaagatgacagtaaacataaaagagagcaagatcattctcgatcttcatcctcttcagcatcaccttcttctcccagttctcgagaagaaaaggagagtaagaaggaaagagaagaagaatttaaaactcaccatgaaatgaaagaatactcaggctttgcaggagttagccgaccacgaggaaccttttttcgaattagaggcagaggaagagccagaggagtttttgctgggacaaatactggtccaaacaactcaaatactacttttcaaaagagaccgaaggaagaggaatgggatccagaatataccccaaagagcaagaagtacttcttgcatgacgacagagatgatggtgtggattattgggccaaaagaggaagaggtcgtggtacttttcaacgtggcagagggcgctttaacttcaaaaaatcaggtagcagtcctaaatggactcatgacaaataccaaggggatgggattgttgaagatgaagaagagaccatggaaaataatgaagaaaagaaggacagacgcaaggaagaaaaggaataataaatatgaagtaagattacaacagagcagaacttgcacccaccattttttttacctgatttttgttttcaaataagaatgtaagcattttacttaaattttactgtttgcaagtagtctatagaaattttgttttaagtcttcaaatatcttgagaaatagtagactgtatgttgaaaattgtactgaaataaagtagaaaattgttacgtaccatatttgtaactatcaacttttaaaacttttaacgtttttgttacatgcattgtaattctgctttgtctataagatatggtcaagtacagctctgtgaaagttctgattctcttccttccctgtttgtcaatgttttattctgaagtaaacgttagctctacatataaatcctggaacagaaattgtttatagagactacactaattattttaactgtatacatctgtttaatttgaacacactacatcgtagggtgactgatttttgaagtataccacagacaaaaagttgttactatggtaaactaagctagtttaacacttgagcaaatgcttaagaaggaattaaaaaaaaaaagctttgccaatagctaaaaagtacaagctattaaaaatcagattgaaaagttttgagaaaatgttatttttactgaaagcaagcagtggcctataaagaacattcttaggagccttttctatttgcgttcaaaactgtgtgttctctttctattcctatttgatagtttgagtcatggtcttagatattagctatttgtgagaggaaactggtttgtaacaatactgcaaatagaaaccccatttctactgaacatcctagttttaaacagaagaaaaactgtaatcctggggttggtatgtaggaggtctatcctgcagaataagttgatacattagtacctgatttcatatcttacatatttatttgagctgaacattagtttgtagtgtaactattagtaaaaatagagaaacacagcatactgttcattaatagtattttaaaaaaattgtttttcaaatgtcaccaataaaagttttggcaggaagcttgttgcggcattgatctaacctttttcccccccatttcagttgcagtttttgtagaatggctttttctttttcctcttaagagttctattcttcaggtagataatttttcaaatgtgaattatcttttgtgtctatattgatagctcttaaaggagtgaaaatctaaaatagtaaatttcaatgttaagtgtctgctttatgggcatatataaaagtagacacatttcatttgttaatttagttgtgtgtgtgtgttaaaaggagctaatgcttattctgttaatgtaaacttttgaagatcttaagtgtattgctctttcatcttaaacactttcgaggatttgcagtgcgtctagcacctagattacagccaggaacattggttaagaactgttggaaacaaaactaaaagcaaactcaacatatgtgatgtttatggccctcagatccttagtattgtgtgattttcccccgttaacatgtctttctaaaattgtctattaaagcagaggaaatacctgccaaaggaagtatgtattgcattaatcagggcataactaatattctcctgttcagaataatacttatttacgtgtgaaagcaacatggatgtgattcccaacacagaattttcatgacccttttattgtatacaaataaataccataacagttacttggttagacatcaaatctgtgtgcatgactatgtgcttatccacttaagacaataggtaaaaggggatctgagaaattatgtaatagggagtgggaataaaactacttaattcctgtgggcaggttatattttaagttcaaatgcattgctttaacctttggttacttttattctgttaaacagaattgaagaaagagtattataccagagtgtagtaggctagggtgattgtaagaactctgtaatagaatgtcattgtggatgttacctttttcagatccaagcatataaaaagcctgtatattttttaaaaacacatcttaactccacgctttacgatattataaaagttgaatggttcctcttggtaaggatatttgcttacaagtgctaggaaataactcactgatacctgcgttaacatactttgttttgcctagagaggggcaataaaaatgaaccaaaggatatttccagaaaggattaagaaagctgtttaagaaggccatgactctttaggtgtgtatgtgtacctttcagcatcctaggaatttttatactaaaagcaaaatgttttttccagttagtcttcttcaaggaattactattgttccttttgtcacaggtaaaatcagtgttgggaattataatttgagaaaaatattacccagtaacattgaatgtagatggctaaacgattcttactcagtgtgatgtataatgatgcaacagggacccttgtaaattgtcatacgccaataaaatgtcacaagtaa

SEQ ID NO: 315165 - DNA, 4463 bp, Homo sapiens
ctctcgccaaaaaaactaaaagggggttataaaaaaggtttgttgtctgccattactctgccaacattctgctctccccgcgggggataattctctttggagaggtgaagctgaatagtggggaacctgttccaaaagggtaccagccagaggcccccccaaaaggggtttttcccaacgcttggaaaaaggggggccccaactttaatggaagtgaaaaaacggttggaattggggaattttttaaaaggaaagacagaaggcgatactacagataaagtttgtgttgagaagcccttttaaaaaggaggtaccctgggaaataaatgcggttaagagctggggaaaaaaaggggccccttatagctcaaccgttaccctcaagatggagttatacgtcctccctcatagggtaaaggattatggcccctcaggaaaggtgttcttggaaaaaggagaattataacccaggtgtatataggtatatgaaaacctctcacgtgcacctctcgtaggtccacgggttaaaaagttgtctcgagaaaaagggcttccacaaaggagcctctctctcttggagagtttaaccacggtgtcccccccgctctctatacacccacaggagaattctggagaatgccaccgaggagaagaggtgctaacctcttcacgagagagggaaaatgccccaccttaaggagtccacaaaattgagtatggcgagagtgaattttctcacccgcttccctgagaagctcacaaactcacaaaatgggcaccctgtttccttcttgaatgaatttctaaccaagagacctggcttcccttgacctataaaacacacggctggcttggctagtaacacacttgtccacattctgtccaaagaaagggaggcaaagaaattctcgaatccaatctttgagccaccaattaaagttgccacacacaggccacgcacaaaagcacactttcaagagagtcaatttaattcaaacaccacattgtgtccttggttcatcatgttaaagagcaatacttcaagtcagctgcaatgaccctaaacgagcggttcacttcgtatcagaaagccactgaagaacatagtactcggcaaaagagccctgaaatacacaggagaattgacatctcaccaagtaccctgaggaagcatacccgtttagcaggggaagagagagtttttaaagaagaaaatcaaaagggagataaaaaattaaggtgtgactctgctgaccttcggcatgacattgatcgccgtagaaaagaaagaagtaaagaacggggagattccaagggctccagggaatccagtggatcaagaaagcaggaaaaaactccaaaagattacaaggaatacaaatcttacaaagatgacagtaaacataaaagagagcaagatcattctcgatcttcatcctcttcagcatcaccttcttctcccagttctcgagaagaaaaggagagtaagaaggaaagagaagaagaatttaaaactcaccatgaaatgaaagaatactcaggctttgcaggagttagccgaccacgaggaaccttttttcgaattagaggcagaggaagagccagaggagtttttgctgggacaaatactggtccaaacaactcaaatactacttttcaaaagagaccgaaggaagaggaatgggatccagaatataccccaaagagcaagaagtacttcttgcatgacgacagagatgatggtgtggattattgggccaaaagaggaagaggtcgtggtacttttcaacgtggcagagggcgctttaacttcaaaaaatcaggtagcagtcctaaatggactcatgacaaataccaaggggatgggattgttgaagatgaagaagagaccatggaaaataatgaagaaaagaaggacagacgcaaggaagaaaaggaataataaatatgaagtaagattacaacagagcagaacttgcacccaccattttttttacctgatttttgttttcaaataagaatgtaagcattttacttaaattttactgtttgcaagtagtctatagaaattttgttttaagtcttcaaatatcttgagaaatagtagactgtatgttgaaaattgtactgaaataaagtagaaaattgttacgtaccatatttgtaactatcaacttttaaaacttttaacgtttttgttacatgcattgtaattctgctttgtctataagatatggtcaagtacagctctgtgaaagttctgattctcttccttccctgtttgtcaatgttttattctgaagtaaacgttagctctacatataaatcctggaacagaaattgtttatagagactacactaattattttaactgtatacatctgtttaatttgaacacactacatcgtagggtgactgatttttgaagtataccacagacaaaaagttgttactatggtaaactaagctagtttaacacttgagcaaatgcttaagaaggaattaaaaaaaaaaagctttgccaatagctaaaaagtacaagctattaaaaatcagattgaaaagttttgagaaaatgttatttttactgaaagcaagcagtggcctataaagaacattcttaggagccttttctatttgcgttcaaaactgtgtgttctctttctattcctatttgatagtttgagtcatggtcttagatattagctatttgtgagaggaaactggtttgtaacaatactgcaaatagaaaccccatttctactgaacatcctagttttaaacagaagaaaaactgtaatcctggggttggtatgtaggaggtctatcctgcagaataagttgatacattagtacctgatttcatatcttacatatttatttgagctgaacattagtttgtagtgtaactattagtaaaaatagagaaacacagcatactgttcattaatagtattttaaaaaaattgtttttcaaatgtcaccaataaaagttttggcaggaagcttgttgcggcattgatctaacctttttcccccccatttcagttgcagtttttgtagaatggctttttctttttcctcttaagagttctattcttcaggtagataatttttcaaatgtgaattatcttttgtgtctatattgatagctcttaaaggagtgaaaatctaaaatagtaaatttcaatgttaagtgtctgctttatgggcatatataaaagtagacacatttcatttgttaatttagttgtgtgtgtgtgttaaaaggagctaatgcttattctgttaatgtaaacttttgaagatcttaagtgtattgctctttcatcttaaacactttcgaggatttgcagtgcgtctagcacctagattacagccaggaacattggttaagaactgttggaaacaaaactaaaagcaaactcaacatatgtgatgtttatggccctcagatccttagtattgtgtgattttcccccgttaacatgtctttctaaaattgtctattaaagcagaggaaatacctgccaaaggaagtatgtattgcattaatcagggcataactaatattctcctgttcagaataatacttatttacgtgtgaaagcaacatggatgtgattcccaacacagaattttcatgacccttttattgtatacaaataaataccataacagttacttggttagacatcaaatctgtgtgcatgactatgtgcttatccacttaagacaataggtaaaaggggatctgagaaattatgtaatagggagtgggaataaaactacttaattcctgtgggcaggttatattttaagttcaaatgcattgctttaacctttggttacttttattctgttaaacagaattgaagaaagagtattataccagagtgtagtaggctagggtgattgtaagaactctgtaatagaatgtcattgtggatgttacctttttcagatccaagcatataaaaagcctgtatattttttaaaaacacatcttaactccacgctttacgatattataaaagttgaatggttcctcttggtaaggatatttgcttacaagtgctaggaaataactcactgatacctgcgttaacatactttgttttgcctagagaggggcaataaaaatgaaccaaaggatatttccagaaaggattaagaaagctgtttaagaaggccatgactctttaggtgtgtatgtgtacctttcagcatcctaggaatttttatactaaaagcaaaatgttttttccagttagtcttcttcaaggaattactattgttccttttgtcacaggtaaaatcagtgttgggaattataatttgagaaaaatattacccagtaacattgaatgtagatggctaaacgattcttactcagtgtgatgtataatgatgcaacagggacccttgtaaattgtcatacgccaataaaatgtcacaagtaa

SEQ ID NO: 315166 - DNA, 3530 bp, Homo sapiens
aaatatctggttggagcattttaattcattctttgtgggtattttttcttaattgtgtattataaactaaattaatagtcttggtgtgctaaattagttgattgggagagaaataactgtcttaggaaaatggataatcgtgtggatgtttttgaaccaaaaagttaataatatgactaaaaatatattttattttacattaaggagaattgacatctcaccaagtaccctgaggaagcatacccgtttagcaggggaagagagagtttttaaagaagaaaatcaaaagggagataaaaaattaaggtgtgactctgctgaccttcggcatgacattgatcgccgtagaaaagaaagaagtaaagaacggggagattccaagggctccagggaatccagtggatcaagaaagcaggaaaaaactccaaaagattacaaggaatacaaatcttacaaagatgacagtaaacataaaagagagcaagatcattctcgatcttcatcctcttcagcatcaccttcttctcccagttctcgagaagaaaaggagagtaagaaggaaagagaagaagaatttaaaactcaccatgaaatgaaagaatactcaggctttgcaggagttagccgaccacgaggaaccttttttcgaattagaggcagaggaagagccagaggagtttttgctgggacaaatactggtccaaacaactcaaatactacttttcaaaagagaccgaaggaagaggaatgggatccagaatataccccaaagagcaagaagtacttcttgcatgacgacagagatgatggtgtggattattgggccaaaagaggaagaggtcgtggtacttttcaacgtggcagagggcgctttaacttcaaaaaatcaggtagcagtcctaaatggactcatgacaaataccaaggggatgggattgttgaagatgaagaagagaccatggaaaataatgaagaaaagaaggacagacgcaaggaagaaaaggaataataaatatgaagtaagattacaacagagcagaacttgcacccaccattttttttacctgatttttgttttcaaataagaatgtaagcattttacttaaattttactgtttgcaagtagtctatagaaattttgttttaagtcttcaaatatcttgagaaatagtagactgtatgttgaaaattgtactgaaataaagtagaaaattgttacgtaccatatttgtaactatcaacttttaaaacttttaacgtttttgttacatgcattgtaattctgctttgtctataagatatggtcaagtacagctctgtgaaagttctgattctcttccttccctgtttgtcaatgttttattctgaagtaaacgttagctctacatataaatcctggaacagaaattgtttatagagactacactaattattttaactgtatacatctgtttaatttgaacacactacatcgtagggtgactgatttttgaagtataccacagacaaaaagttgttactatggtaaactaagctagtttaacacttgagcaaatgcttaagaaggaattaaaaaaaaaaagctttgccaatagctaaaaagtacaagctattaaaaatcagattgaaaagttttgagaaaatgttatttttactgaaagcaagcagtggcctataaagaacattcttaggagccttttctatttgcgttcaaaactgtgtgttctctttctattcctatttgatagtttgagtcatggtcttagatattagctatttgtgagaggaaactggtttgtaacaatactgcaaatagaaaccccatttctactgaacatcctagttttaaacagaagaaaaactgtaatcctggggttggtatgtaggaggtctatcctgcagaataagttgatacattagtacctgatttcatatcttacatatttatttgagctgaacattagtttgtagtgtaactattagtaaaaatagagaaacacagcatactgttcattaatagtattttaaaaaaattgtttttcaaatgtcaccaataaaagttttggcaggaagcttgttgcggcattgatctaacctttttcccccccatttcagttgcagtttttgtagaatggctttttctttttcctcttaagagttctattcttcaggtagataatttttcaaatgtgaattatcttttgtgtctatattgatagctcttaaaggagtgaaaatctaaaatagtaaatttcaatgttaagtgtctgctttatgggcatatataaaagtagacacatttcatttgttaatttagttgtgtgtgtgtgttaaaaggagctaatgcttattctgttaatgtaaacttttgaagatcttaagtgtattgctctttcatcttaaacactttcgaggatttgcagtgcgtctagcacctagattacagccaggaacattggttaagaactgttggaaacaaaactaaaagcaaactcaacatatgtgatgtttatggccctcagatccttagtattgtgtgattttcccccgttaacatgtctttctaaaattgtctattaaagcagaggaaatacctgccaaaggaagtatgtattgcattaatcagggcataactaatattctcctgttcagaataatacttatttacgtgtgaaagcaacatggatgtgattcccaacacagaattttcatgacccttttattgtatacaaataaataccataacagttacttggttagacatcaaatctgtgtgcatgactatgtgcttatccacttaagacaataggtaaaaggggatctgagaaattatgtaatagggagtgggaataaaactacttaattcctgtgggcaggttatattttaagttcaaatgcattgctttaacctttggttacttttattctgttaaacagaattgaagaaagagtattataccagagtgtagtaggctagggtgattgtaagaactctgtaatagaatgtcattgtggatgttacctttttcagatccaagcatataaaaagcctgtatattttttaaaaacacatcttaactccacgctttacgatattataaaagttgaatggttcctcttggtaaggatatttgcttacaagtgctaggaaataactcactgatacctgcgttaacatactttgttttgcctagagaggggcaataaaaatgaaccaaaggatatttccagaaaggattaagaaagctgtttaagaaggccatgactctttaggtgtgtatgtgtacctttcagcatcctaggaatttttatactaaaagcaaaatgttttttccagttagtcttcttcaaggaattactattgttccttttgtcacaggtaaaatcagtgttgggaattataatttgagaaaaatattacccagtaacattgaatgtagatggctaaacgattcttactcagtgtgatgtataatgatgcaacagggacccttgtaaattgtcatacgccaataaaatgtcacaagtaa

SEQ ID NO: 315167 - DNA, 2820 bp, Homo sapiens
  misc_feature (33)..(34): n is a, c, g, or t
  misc_feature (74)..(74): n is a, c, g, or t
  misc_feature (77)..(77): n is a, c, g, or t
tatatttcttcctgttccagtcgttcccactcnnttttatcccctttttttatttctccacataggacgacagnatnagtcatgacgacagagatgatggtgtggattattgggccaaaagaggaagaggtcgtggtacttttcaacgtggcagagggcgctttaacttcaaaaaatcaggtagcagtcctaaatggactcatgacaaataccaaggggatgggattgttgaagatgaagaagagaccatggaaaataatgaagaaaagaaggacagacgcaaggaagaaaaggaataataaatatgaagtaagattacaacagagcagaacttgcacccaccattttttttacctgatttttgttttcaaataagaatgtaagcattttacttaaattttactgtttgcaagtagtctatagaaattttgttttaagtcttcaaatatcttgagaaatagtagactgtatgttgaaaattgtactgaaataaagtagaaaattgttacgtaccatatttgtaactatcaacttttaaaacttttaacgtttttgttacatgcattgtaattctgctttgtctataagatatggtcaagtacagctctgtgaaagttctgattctcttccttccctgtttgtcaatgttttattctgaagtaaacgttagctctacatataaatcctggaacagaaattgtttatagagactacactaattattttaactgtatacatctgtttaatttgaacacactacatcgtagggtgactgatttttgaagtataccacagacaaaaagttgttactatggtaaactaagctagtttaacacttgagcaaatgcttaagaaggaattaaaaaaaaaaagctttgccaatagctaaaaagtacaagctattaaaaatcagattgaaaagttttgagaaaatgttatttttactgaaagcaagcagtggcctataaagaacattcttaggagccttttctatttgcgttcaaaactgtgtgttctctttctattcctatttgatagtttgagtcatggtcttagatattagctatttgtgagaggaaactggtttgtaacaatactgcaaatagaaaccccatttctactgaacatcctagttttaaacagaagaaaaactgtaatcctggggttggtatgtaggaggtctatcctgcagaataagttgatacattagtacctgatttcatatcttacatatttatttgagctgaacattagtttgtagtgtaactattagtaaaaatagagaaacacagcatactgttcattaatagtattttaaaaaaattgtttttcaaatgtcaccaataaaagttttggcaggaagcttgttgcggcattgatctaacctttttcccccccatttcagttgcagtttttgtagaatggctttttctttttcctcttaagagttctattcttcaggtagataatttttcaaatgtgaattatcttttgtgtctatattgatagctcttaaaggagtgaaaatctaaaatagtaaatttcaatgttaagtgtctgctttatgggcatatataaaagtagacacatttcatttgttaatttagttgtgtgtgtgtgttaaaaggagctaatgcttattctgttaatgtaaacttttgaagatcttaagtgtattgctctttcatcttaaacactttcgaggatttgcagtgcgtctagcacctagattacagccaggaacattggttaagaactgttggaaacaaaactaaaagcaaactcaacatatgtgatgtttatggccctcagatccttagtattgtgtgattttcccccgttaacatgtctttctaaaattgtctattaaagcagaggaaatacctgccaaaggaagtatgtattgcattaatcagggcataactaatattctcctgttcagaataatacttatttacgtgtgaaagcaacatggatgtgattcccaacacagaattttcatgacccttttattgtatacaaataaataccataacagttacttggttagacatcaaatctgtgtgcatgactatgtgcttatccacttaagacaataggtaaaaggggatctgagaaattatgtaatagggagtgggaataaaactacttaattcctgtgggcaggttatattttaagttcaaatgcattgctttaacctttggttacttttattctgttaaacagaattgaagaaagagtattataccagagtgtagtaggctagggtgattgtaagaactctgtaatagaatgtcattgtggatgttacctttttcagatccaagcatataaaaagcctgtatattttttaaaaacacatcttaactccacgctttacgatattataaaagttgaatggttcctcttggtaaggatatttgcttacaagtgctaggaaataactcactgatacctgcgttaacatactttgttttgcctagagaggggcaataaaaatgaaccaaaggatatttccagaaaggattaagaaagctgtttaagaaggccatgactctttaggtgtgtatgtgtacctttcagcatcctaggaatttttatactaaaagcaaaatgttttttccagttagtcttcttcaaggaattactattgttccttttgtcacaggtaaaatcagtgttgggaattataatttgagaaaaatattacccagtaacattgaatgtagatggctaaacgattcttactcagtgtgatgtataatgatgcaacagggacccttgtaaattgtcatacgccaataaaatgtcacaagtaa
